United States Patent Application Publication US 2026/0337666 A1 - sequence listing, part 7

SEQ ID NO: 8885 - DNA, 2197 bp, Homo sapiens
  source 1..2197: mol_type = unassigned DNA
tgcgggctgcggggagatgtggggagggccccctccactttggagggcagtgaaggagagggatcctctaaattgtcgaggcttcatctctccagattgtatgcccttctcagcaacaccgcctccggccctccgatgggaaagtggaggccgggacaagggcacacaactggttccgttaagcccctctcttgctcagacgccatggagctggatctgtctccacctcatcttagcagctctccggaagacctttgcccagcccctgggacccctcctgggactccccggccccctgatacccctctgcctgaggaggtaaagaggtcccagcctctcctcatcccaaccaccggcaggaaacttcgagaggaggagaggcgtgccacctccctcccctctatccccaaccccttccctgagctctgcagtcctccctcacagagcccaattctcgggggcccctccagtgcaagggggctgctcccccgcgatgccagccgcccccatgtagtaaaggtgtacagtgaggatggggcctgcaggtctgtggaggtggcagcaggtgccacagctcgccacgtgtgtgaaatgctggtgcagcgagctcacgccttgagcgacgagacctgggggctggtggagtgccacccccacctagcactggagcggggtttggaggaccacgagtccgtggtggaagtgcaggctgcctggcccgtgggcggagatagccgcttcgtcttccggaaaaacttcgccaagtacgaactgttcaagagctccccacactccctgttcccagaaaaaatggtctccagctgtctcgatgcacacactggtatatcccatgaagacctcatccagaacttcctgaatgctggcagctttcctgagatccagggctttctgcagctgcggggttcaggacggaagctttggaaacgctttttctgcttcttgcgccgatctggcctctattactccaccaagggcacctctaaggatccgaggcacctgcagtacgtggcagatgtgaacgagtccaacgtgtacgtggtgacgcagggccgcaagctctacgggatgcccactgacttcggtttctgtgtcaagcccaacaagcttcgaaatggccacaaggggcttcggatcttctgcagtgaagatgagcagagccgcacctgctggctggctgccttccgcctcttcaagtacggggtgcagctgtacaagaattaccagcaggcacagtctcgccatctgcatccatcttgtttgggctccccacccttgagaagtgcctcagataataccctggtggccatggacttctctggccatgctgggcgtgtcattgagaacccccgggaggctctgagtgtggccctggaggaggcccaggcctggaggaagaagacaaaccaccgcctcagcctgcccatgccagcctccggcacgagcctcagtgcagccatccaccgcacccaactctggttccacgggcgcatttcccgtgaggagagccagcggcttattggacagcagggcttggtagacggcctgttcctggtccgggagagtcagcggaacccccagggctttgtcctctctttgtgccacctgcagaaagtgaagcattatctcatcctgccgagcgaggaggagggccgcctgtacttcagcatggatgatggccagacccgcttcactgacctgctgcagctcgtggagttccaccagctgaaccgcggcatcctgccgtgcttgctgcgccattgctgcacgcgggtggccctctgaccaggccgtggactggctcatgcctcagcccgccttcaggctgcccgccgcccctccacccatccagtggactctggggcgcggccacaggggacgggatgaggagcgggagggttccgccactccagttttctcctctgcttctttgcctccctcagatagaaaacagcccccactccagtccactcctgacccctctcctcaagggaaggccttgggtggccccctctccttctcctagctctggaggtgctgctctagggcagggaattatgggagaagtgggggcagcccaggcggtttcacgccccacactttgtacagaccgagaggccagttgatctgctctgttttatactagtgacaataaagattattttttgatacacctatg

SEQ ID NO: 8886 - DNA, 1955 bp, Homo sapiens
  source 1..1955: mol_type = unassigned DNA
aggcaaaccccagccttggactggccctctctgatctctgaggccaggctctaatgtgatttgaatctacttctaaccccttccaagcactgccctcccgaattctctgctcctctccccaccccactgttggtctgtgatttcgaggcaggcgtggccccctgcagcctggaatgaagtcactggggctgtttggagaccggggctgtttggaggacaagggcacacaactggttccgttaagcccctctcttgctcagacgccatggagctggatctgtctccacctcatcttagcagctctccggaagacctttgcccagcccctgggacccctcctgggactccccggccccctgatacccctctgcctgaggaggtaaagaggtcccagcctctcctcatcccaaccaccggcaggaaacttcgagaggaggagaggcgtgccacctccctcccctctatccccaaccccttccctgagctctgcagtcctccctcacagagcccaattctcgggggcccctccagtgcaagggggctgctcccccgcgatgccagccgcccccatgtagtaaaggtgtacagtgaggatggggcctgcaggtctgtggaggtggcagcaggtgccacagctcgccacgtgtgtgaaatgctggtgcagcgagctcacgccttgagcgacgagacctgggggctggtggagtgccacccccacctagcactggagcggggtttggaggaccacgagtccgtggtggaagtgcaggctgcctggcccgtgggcggagatagccgcttcgtcttccggaaaaacttcgccaagtacgaactgttcaagagctccccacactccctgttcccagaaaaaatggtctccagctgtctcgatgcacacactggtatatcccatgaagacctcatccagaacttcctgaatgctggcagctttcctgagatccagggctttctgcagctgcggggttcaggacggaagctttggaaacgctttttctgcttcttgcgccgatctggcctctattactccaccaagggcacctctaaggatccgaggcacctgcagtacgtggcagatgtgaacgagtccaacgtgtacgtggtgacgcagggccgcaagctctacgggatgcccactgacttcggtttctgtgtcaagcccaacaagcttcgaaatggccacaaggggcttcggatcttctgcagtgaagatgagcagagccgcacctgctggctggctgccttccgcctcttcaagtacggggtgcagctgtacaagaattaccagcaggcacagtctcgccatctgcatccatcttgtttgggctccccacccttgagaagtgcctcagataataccctggtggccatggacttctctggccatgctgggcgtgtcattgagaacccccgggaggctctgagtgtggccctggaggaggcccaggcctggaggaagaagacaaaccaccgcctcagcctgcccatgccagcctccggcacgagcctcagtgcagccatccaccgcacccaactctggttccacgggcgcatttcccgtgaggagagccagcggcttattggacagcagggcttggtagacggcctgttcctggtccgggagagtcagcggaacccccagggctttgtcctctctttgtgccacctgcagaaagtgaagcattatctcatcctgccgagcgaggaggagggccgcctgtacttcagcatggatgatggccagacccgcttcactgacctgctgcagctcgtggagttccaccagctgaaccgcggcatcctgccgtgcttgctgcgccattgctgcacgcgggtggccctctgaccaggccgtggactggctcatgcctcagcccgccttcaggctgcccgccgcccctccacccatccagtggactctggggcgcggccacagg

SEQ ID NO: 8887 - DNA, 584 bp, Homo sapiens
  source 1..584: mol_type = unassigned DNA
agcctggaatgaagtcactggggctgtttggagaccggggctgtttggaggacaagggcacacaactggttccgttaagcccctctcttgctcagacgccatggagctggatctgtctccacctcatcttagcagctctccggaagacctttgcccagcccctgggacccctcctgggactccccggccccctgatacccctctgcctgaggaggtaaagaggtcccagcctctcctcatcccaaccaccggcaggaaacttcgagaggaggagaggcgtgccacctccctcccctctatccccaaccccttccctgagctctgcagtcctccctcacagagcccaattctcgggggcccctccagtgcaagggggctgctcccccgcgatgccagccgcccccatgtgagttgtccctcagaagggaagggagggatgcacgggttctgggtctgtgggagatacacagccgcttccatggaggcaggggatcttggttaggagtccctgagggtctagcaggtgcggaaagggaatgaatcaccctttgcctcccctcaagtcgtgtgcaattcctggggcg

SEQ ID NO: 8888 - DNA, 1667 bp, Homo sapiens
  source 1..1667: mol_type = unassigned DNA
gacaagggcacacaactggttccgttaagcccctctcttgctcagacgccatggagctggatctgtctccacctcatcttagcagctctccggaagacctttgcccagcccctgggacccctcctgggactccccggccccctgatacccctctgcctgaggaggtaaagaggtcccagcctctcctcatcccaaccaccggcaggaaacttcgagaggaggagaggcgtgccacctccctcccctctatccccaaccccttccctgagctctgcagtcctccctcacagagcccaattctcgggggcccctccagtgcaagggggctgctcccccgcgatgccagccgcccccatgtagtaaaggtgtacagtgaggatggggcctgcaggtctgtggaggtggcagcaggtgccacagctcgccacgtgtgtgaaatgctggtgcagcgagctcacgccttgagcgacgagacctgggggctggtggagtgccacccccacctagcactggagcggggtttggaggaccacgagtccgtggtggaagtgcaggctgcctggcccgtgggcggagatagccgcttcgtcttccggaaaaacttcgccaagtacgaactgttcaagagctccccacactccctgttcccagaaaaaatggtctccagctgtctcgatgcacacactggtatatcccatgaagacctcatccagaacttcctgaatgctggcagctttcctgagatccagggctttctgcagctgcggggttcaggacggaagctttggaaacgctttttctgcttcttgcgccgatctggcctctattactccaccaagggcacctctaaggatccgaggcacctgcagtacgtggcagatgtgaacgagtccaacgtgtacgtggtgacgcagggccgcaagctctacgggatgcccactgacttcggtttctgtgtcaagcccaacaagcttcgaaatggccacaaggggcttcggatcttctgcagtgaagatgagcagagccgcacctgctggctggctgccttccgcctcttcaagtacggggtgcagctgtacaagaattaccagcaggcacagtctcgccatctgcatccatcttgtttgggctccccacccttgagaagtgcctcagataataccctggtggccatggacttctctggccatgctgggcgtgtcattgagaacccccgggaggctctgagtgtggccctggaggaggcccaggcctggaggaagaagacaaaccaccgcctcagcctgcccatgccagcctccggcacgagcctcagtgcagcctgttcctggtccgggagagtcagcggaacccccagggctttgtcctctctttgtgccacctgcagaaagtgaagcattatctcatcctgccgagcgaggaggagggccgcctgtacttcagcatggatgatggccagacccgcttcactgacctgctgcagctcgtggagttccaccagctgaaccgcggcatcctgccgtgcttgctgcgccattgctgcacgcgggtggccctctgaccaggccgtggactggctcatgcctcagcccgccttcaggctgcccgccgcccctccacccatccagtggactctggggcgcggccacaggggacgggatgaggag

SEQ ID NO: 8889 - DNA, 554 bp, Homo sapiens
  source 1..554: mol_type = unassigned DNA
tctgtggaggtggcagcaggtgccacagctcgccacgtgtgtgaaatgctggtgcagcgagctcacgccttgagcgacgagacctgggggctggtggagtgccacccccacctagcactggagcggggtttggaggaccacgagtccgtggtggaagtgcaggctgcctggcccgtgggcggagatagccgcttcgtcttccggaaaaacttcgccaagtacgaactgttcaagagctccccagtgagtgcatgagggctgtctgggcgctgggatgccctgatcctcaacctggatgctggagccctgatccctgacacttgtctacccacagcactccctgttcccagaaaaaatggtctccagctgtctcgatgcacacactggtatatcccatgaagacctcatccaggtggggggaccccccatttcactgcagattcacgactccccagcattggccagtgcttctccacccttaagtcctgtgcctcccctctatgttgtagaaagagccaaatcacagtcctgtgtgactggggacagtcactttc

SEQ ID NO: 8890 - DNA, 467 bp, Homo sapiens
  source 1..467: mol_type = unassigned DNA
gccaagtacgaactgttcaagagctccccacactccctgttcccagaaaaaatggtctccagctgtctcgatgcacacactggtatatcccatgaagacctcatccagaacttcctgaatgctggcagctttcctgagatccagggctttctgcagctgcggggttcaggacggaagctttggaaacgctttttctgcttcttgcgccgatctggcctctattactccaccaagggcacctctaaggtaaggtcttgagggtaccagccccagcccctccagtccctggtccttttagaagttgccccttctctgctggaacctctgagcccttctccccctgggccccccaggccagccacctccagtttaccatctctccctacatccttgcctagctcacctgcccagggaggtagcaggagaaaagatgatcttagtttaagtcctggctctacttctatttg

SEQ ID NO: 8891 - DNA, 438 bp, Homo sapiens
  source 1..438: mol_type = unassigned DNA
ctcaggtgcgaggttccgtccatctttctgaacccacgcagctgcagctgaggacagccaccctttcttcgtctctgctgagcgaaggctacacggcccttcctccttgcagctgtttcaccttctaccttgcgtggagccaggcttttgcaccgaatctgagatgccattttaaacagaagactccatcctcttgaagatgggaaattcttacgctggacagctgaagacgacacgctttgaagaggtcttgcacaattccatcgaggcatccctgcggtccaacaacctggtgcccaggcccatcttttcccagctgtacctggaagctgagcagcagcttgccgctctagaaggtggtagccgagtggacaatgaggaagaggaagaagagggagaaggagggctggaaacaaatggccccccaaaccctttcca

SEQ ID NO: 8892 - DNA, 8484 bp, Homo sapiens
  source 1..8484: mol_type = unassigned DNA
aaataaagttttttcaatggaaggcttgcagctcttgaggacctgccaaatggaagaaggacagagacctggagccctatggaaagttctgacaccatgtgtggaaggacatggcttttaacacgtgtggtgactggagtagctgcagctgaggacagccaccctttcttcgtctctgctgagcgaaggctacacggcccttcctccttgcagctgtttcaccttctaccttgcgtggagccaggcttttgcaccgaatctgagatgccattttaaacagaagactccatcctcttgaagatgggaaattcttacgctggacagctgaagacgacacgctttgaagaggtcttgcacaattccatcgaggcatccctgcggtccaacaacctggtgcccaggcccatcttttcccagctgtacctggaagctgagcagcagcttgccgctctagaaggtggtagccgagtggacaatgaggaagaggaagaagagggagaaggagggctggaaacaaatggccccccaaaccctttccagctgcaccctctgcctgaaggatgctgtaccacagacgggttttgccaggccgggaaggacctgcgccttgtctccatttccaacgagcccatggatgtccctgcgggctttctcctcgtgggggtcaagtcccccagcctgccggaccatctcctggtgtgcgccgttgacaagaggttcttgccagatgacaatggccacaatgctcttcttggtttctctgggaattgtgttggctgtggaaagaaaggcttctgttacttcacggaattctccaatcatataaatctgaaactgaccactcaacccaagaagcagaaacacttgaagtattacctggtccgtaatgcacaagggactctaaccaaaggacctttaatctgttggaaaggctcagagtttagaagccggcagatccccgccagtacttgttccagttccctcttcccagccctggagagcacggctgccttccccagcgagcccgttcctgggacgaaccccagcatcctgatgggagctcagcaggcaggaccagcttctgatcacccctcactaaacgcagcaatgggtccggctgttttcaacggcaaagattccccgaagtgccaacaactggcaaagaataacctgttggccctgccgcgaccatcggctttaggtatcttgtcaaactccgggccccccaaaaaacgccacaaagggtggtctccagaatctccatcagctccagatggtggctgcccccaaggtggtgggaacagagctaagtatgagagcgcaggcatgtcctgcgtgccgcaggttggcttggtgggaccagcttcagtcacctttccagtggtggcctctggagaaccagtgtctgttcctgacaacttgctgaaaatatgcaaggccaagccagtgatatttaaaggccatgggaacttcccttacctctgtgggaacctgaatgacgtcgtggtcagccccctcttgtacacgtgctaccagaattcccagtctgtctcacgggcatacgagcagtacggcgcctctgccatccagcccatctccgaggagatgcagctcctgcttaccgtctactacctggtccagctggccgcggaccaggtgcccttgatggaggacctggagcagatcttcctgcgctcttggcgcgagtcgcacctgaccgagatccggcagtaccagcaggcgccgccgcagcccttcccgcccgcgcccagcgccgcggcacccgtgacctccgcgcagctgccctggctggccagcctggccgccagctcctgcaacgacagcgtgcacgtcatcgagtgtgcttactccctggccgagggcctctccgagatgttccggctgttggtcgagggcaagcttgccaagaccaactacgtggtcatcatctgcgcctgccgcagcgcggccatcgactcctgcatcgccgtcaccggaaaataccaagcccggattctttccgagagccttctcactcctgcggagtaccagaaggaagtcaattacgagctggttacggggaaggtagactcgctgggggccttctttagcaccctctgtccagagggtgacattgacattttgctggacaaatttcaccaggaaaatcaaggccatatttcttcctcactcgctgcctcttctgtcactaaagcagcatccctggatgtcagtgggacaccggtgtgcacaagttacaatctggagccacacagcatccggcccttccagctggcagtagcgcagaagctcctctcccatgtgtgttccattgcggattccagcacccaaaatctggacctgggatcctttgagaaggtggactttctcatttgcattcccccctcagaagtgacctaccagcagactctgctccatgtgtggcattcaggggttttgctggagcttggtctgaagaaagagcacatgacgaagcagagggtggaacagtatgttctgaagctagacacggaggcacagacaaaatttaaggcttttctgcaaaactccttccagaacccgcatacactttttgtcctaatccatgaccatgcgcactgggatcttgtgagtagcactgttcataacctctattctcaaagtgacccgtcggtgggattggtggaccgattgctcaactgcagggaggtgaaggaggcccccaacattgtgacacttcacgtgacctccttcccgtatgcactgcagacacagcacaccctcatcagcccctacaacgagatccactggcctgcctcctgcagtaatggagtggacttatatcatgaaaataagaagtacttcgggctgtcggagtttattgaatccaccctttcaggacacagcctccccttgctcagatacgatagctcctttgaggccatggtcactgcattaggaaaaaggttcccccgcctgcacagcgcggtgatcaggacctttgttctcgtgcagcactacgcggccgccctgatggccgtaagcggcctcccgcagatgaagaactacacgtcggtggagacgctggagatcacgcagaacctcctcaactccccgaagcagtgcccctgcggccacgggctcatggtcctgctgcgggtgccctgttcgcccctggcggtggtggcctatgagcggctggcccacgtgcgggcccggctggcgctggaggagcactttgagatcatcctgggcagtcccagctcaggcgtcaccgtggggaagcacttcgtaaagcagctcaggatgtggcagaaaattgaggatgtggagtggagaccccagacttacttggagctggagggtctgccttgcatcctgatcttcagtgggatggacccgcatggggagtccttgccgaggtctttgaggtactgtgacctgcgattgataaactcctcctgcttggtgagaacagccttggagcaggagctgggcctggctgcctactttgtgagcaacgaggttcccttggagaagggggctaggaacgaggccttggagagtgatgctgagaagctgagcagcacagacaacgaggatgaggagctggggacagaaggctctacctcggagaagagaagccccatgaaaagggagaggtcccgctcccacgactcagcatcctcatccctctcctccaaggcttccggttcagcgctcggtggcgagtcctcggctcagcccacagcactcccccagggagagcatgccaggtcgccccagccccgtggccccgcagaggagggcagagcccctggtgagaaacagaggccccgggcaagtcaggggccaccctcggccatcagcaggcacagtcccgggccgacgccccagcccgactgtagcctcaggaccggccagaggagcgtccaggtgtcggtcacctcgtcgtgctcccagctgtcctcctcctcgggctcatcctcctcatccgtggcgcccgctgccggcacgtgggtcctgcaggcctcccagtgctccttgaccaaggcctgccgccagccacccattgtcttcttgcccaagctcgtgtacgacatggttgtgtccactgacagcagtggcctgcccaaggccgcctccctcctgccctccccctcggtcatgtgggccagctctttccgccccctgctcagcaagaccatgacatccaccgagcagtccctctactaccggcagtggacggtgccccggcccagccacatggactacggcaaccgggccgagggccgcgtggacggcttccacccccgcaggctgctgctcagcggcccccctcagatcgggaagacaggtgcctacctgcagttcctcagtgtcctgtccaggatgcttgttcggctcacagaagtggatgtctatgacgaggaggagatcaatatcaacctcagagaagaatctgactggcattatctccagcttagcgacccctggccagacctggagctgttcaagaagttgccctttgactacatcattcacgacccgaagtatgaagatgccagcctgatttgttcgcactatcagggtataaagagtgaagacagagggatgtcccggaagccggaggacctttatgtgcggcgtcagacggcacggatgagactgtccaagtacgcagcgtacaacacttaccaccactgtgagcagtgccaccagtacatgggcttccacccccgctaccagctgtatgagtccaccctgcacgcctttgccttctcttactccatgctaggagaggagatccagctgcacttcatcatccccaagtccaaggagcaccactttgtcttcagccaacctggaggccagctggagagcatgcgactacccctcgtgacagacaagagccatgaatatataaaaagtccgacattcactccaaccaccggccgtcacgaacatgggctctttaatctgtaccacgcaatggacggtgccagccatttgcacgtgctggttgtcaaggaatacgagatggcaatttataagaaatattggcccaaccacatcatgctggtgctccccagtatcttcaacagtgctggagttggtgctgctcatttcctcatcaaggagctgtcctaccataacctggagctcgagcggaaccggcaggaggagctgggaatcaagccgcaggacatctggcctttcattgtgatctctgatgactcctgcgtgatgtggaacgtggtggatgtcaactctgctggggagagaagcagggagttctcctggtcggaaaggaacgtgtctttgaagcacatcatgcagcacatcgaggcggcccccgacatcatgcactacgccctgctgggcctgcggaagtggtccagcaagacccgggccagcgaggtgcaagagcccttctcccgctgccacgtgcacaacttcatcatcctgaacgtggacctgacccagaacgtgcagtacaaccagaaccggttcctgtgtgacgatgtagacttcaacctgcgggtgcacagcgccggcctcctgctctgccggttcaaccgcttcagcgtgatgaagaagcagatcgtggtgggcggccacaggtccttccacatcacatccaaggtgtctgataactctgccgcggtcgtgccggcccagtacatctgtgccccggacagcaagcacacgttcctcgcagcgcccgcccagctcctgctggagaagttcctgcagcaccacagccacctcttcttcccgctgtccctgaagaaccatgaccacccagtgctgtctgtcgactgttacctgaacctgggatctcagatttctgtttgctatgtgagctccaggccccactctttaaacatcagctgctcggacttgctgttcagtgggctgctgctgtacctctgtgactcttttgtgggagctagctttttgaaaaagtttcattttctgaaaggtgcgacgttgtgtgtcatctgtcaggaccggagctcactgcgccagacggtcgtccgcctggagctcgaggacgagtggcagttccggctgcgcgatgagttccagaccgccaatgccagggaagaccggccgctcttttttctgacgggacgacacatctgaggaagacagcggcgagttttctgaagagatgagtgctcagagccctcatgctgttgaggctaaagggaggcctggaacggtggggcgtttgactggaatggaccccagggactgtccaggtgcagcccctcctagtacacatgggcccccgaggccgtggtcctgggagccaggaagactccgcagtgggtgagaatgaaaacttgagactcccaagttctgggccagcccattgctctgggctgttttaaagcccatttcacgaggaacaaagatttacttcctgtcctgccattcgtgtgcttccatggacaaacctgatttttttctcttagttctaaagaatcttgggttattttgtagcggtgccagtatttcagtagatgggatttcagccaagtaggttcccctgtaacctcctacaaagcaatattccaaaggaacattttaactgtaaaggctggagacaagaaaaaataagtagatcgttttaataacaattatttaattgcctataagtttgctgtttcagaggctagcccaaaggcatcaaatttaataaagttaaacaaattgatttacttcagagcaaatatgatcctattaaaataatatagggtaaataccctacctcttagaaagggcaaaaatgcaaagaagctttctttaaaactaaaagggttttttggggggggagttggcggggaggaaataaggctaacagaggttgacctaaaattagccttacaaaggagaaaggaccacattgcttacttgaaacagacaatgaaaacaaccaaagtgatatataaaatagttgatgagaactagacttatgactgtagtttactagagtttagttttcagttgctgaagtagctcattttctcttactaatgtttggttcctcagggaagaatctcacttgactagagaggaggtgggaacagaagagagaaggaggcagggagatgtatttcttagggctcaccccttcacagactgacagaatggttttgttttgttttgttttgttttgttttgtttttgagatggactctagctctgtcacccaggctggagtgcagtggtgcgatctcggctcactgcaagctccgcctcccgggttctcaccattctcctgcctcagcctcccgagtagctgggactacaggcgcccaccaccacgcccggctaattttttgtattttttagtagagacggggtttcaccatgttagccaggatggtctcgatctcctgacctcgtgatccgcccgcctcggcctcccaaagtgctgggattacaggcgtgagccaccgtgcctgccccagaatggtttttaaagccacagttgagaggccacccattgcccggcgcctggacagtgatcatcttgttcatcttgttcagtcctttcttgtgtgattggaattattcatcccctttgaaagatgagaaggttgagatgcaaagagtctacctttccaagttctcactgctggaaagagctagaagcacagttcaaagttctggcttctggactctgcagtccaggtctcccttctcccacttgcctaccctcaatgccacactgtttttgaagtggcccataacttgaaggaaaagtttaaagacagttcaatttaatcatcagaatgcattcttttttttttcggagacggagtttcactcttgctgcccaggctggagtgcaatggtgcaatgacctcggctcactgcaacctctgcctcctgggttcaagtgattctccagcctcagcctcccgagtagctgggattatgggcgcccaccaccatgcccagctaatttttgtattttttttttttagtagagatggggtttcgccaggttggccaggctggtcttgtgaactcctggcctcaggtgatctgcccacctcatcctccaaaagtgctgggattacaggcatgagccactgcgcctggcctcagaatgcattcttacacatctatcctagacatttataagcactctaatggataacaatccaagaataaatgattgtaaaagatgatgccgaagagttgatgtcaatctttttttcctaagaaaaaaagtccgcgagtattaaatatttagatcaatgtttataaaatgattactttgtatatctcattattcctattttggaataaaaactgaccttctttaatcatatacttgtcttttgtaaatagcagcttttgtgtcattctccccactttattagttaatttaaattggaaaaaaccctcaaactaatattcttgtctgttccagtcttataaataaaacttataatgcatgta

SEQ ID NO: 8893 - DNA, 2448 bp, Homo sapiens
  source 1..2448: mol_type = unassigned DNA
gatactagctctgaaacttttcccctggctggcttggctgcctctccctgccgggcaggggccaggaagcctgggtgtcaggcagacccgagccaggctctgcacagcagggcattacgcgccccacgcatcctcttccatccccaggcacagatcaaaggcgcagcccaggaggcgggagcccctgcacactttccacctctgctgggcttagcctcttggctggttggtctgtggagtgcctgaagtgaccagctttttgtaagtagctgcagctgaggacagccaccctttcttcgtctctgctgagcgaaggctacacggcccttcctccttgcagctgtttcaccttctaccttgcgtggagccaggcttttgcaccgaatctgagatgccattttaaacagaagactccatcctcttgaagatgggaaattcttacgctggacagctgaagacgacacgctttgaagaggtcttgcacaattccatcgaggcatccctgcggtccaacaacctggtgcccaggcccatcttttcccagctgtacctggaagctgagcagcagcttgccgctctagaaggtggtagccgagtggacaatgaggaagaggaagaagagggagaaggagggctggaaacaaatggccccccaaaccctttccagctgcaccctctgcctgaaggatgctgtaccacagacgggttttgccaggccgggaaggacctgcgccttgtctccatttccaacgagcccatggatgtccctgcgggctttctcctcgtgggggtcaagtcccccagcctgccggaccatctcctggtgtgcgccgttgacaagaggttcttgccagatgacaatggccacaatgctcttcttggtttctctgggaattgtgttggctgtggaaagaaaggcttctgttacttcacggaattctccaatcatataaatctgaaactgaccactcaacccaagaagcagaaacacttgaagtattacctggtccgtaatgcacaagggactctaaccaaaggacctttaatctgttggaaaggctcagagtttagaagccggcagatccccgccagtacttgttccagttccctcttcccagccctggagagcacggctgccttccccagcgagcccgttcctgggacgaaccccagcatcctgatgggagctcagcaggcaggaccagcttctgatcacccctcactaaacgcagcaatgggtccggctgttttcaacggcaaagattccccgaagtgccaacaactggcaaagaataacctgttggccctgccgcgaccatcggctttaggtatcttgtcaaactccgggccccccaaaaaacgccacaaagggtggtctccagaatctccatcagctccagatggtggctgcccccaaggtggtgggaacagagctaagtatgagagcgcaggcatgtcctgcgtgccgcaggttggcttggtgggaccagcttcagtcacctttccagtggtggcctctggagaaccagtgtctgttcctgacaacttgctgaaaatatgcaaggccaagccagtgatatttaaagtatttgtaaatggtgctacccaaatggtagcccttggtccggcagaacctgcatcgccccggagcttatgagaggcgtgaattcatggacccatcctggaatcagaatcaggccccacttctgcatcagaagccctgggtggcaccagcaagtgtttggcaagcccttgagaagcagtgtctttgagaacgtgacctgtgccccaggcaccagctttactccccgagcccagcaggacatctgcatataacacacagccgaagtcagaaaatatatttttggtgactaaatggagtacctggagtacaagataacacacacacacacacacacacacacacacacacacacacacacacacgccacctttgggagctcagcagccccgagaggatttgatagcttcaccgcttcacctggttttacaaatgcggagactgaggtttagggcagttaagcttcttgcttagcatcatgtaggtaaagaatggtggaaagatatttgaacccgacctgggcaattccacctctgagggctgtcctcagaatgaatcttctgatgggctgggcacggtggctcacgcctgtaatcccagaactttgagaggccgaggcgggtagatcactttaggtcagaagttcaagatcagcctgggcaacatggtgaaaccttgtctctactaaaaatacaaaaattggccgggtgtggtggtgatgcgcacctgtcatcccagctactcgggaggctgaggtgggagaatcacttgaacttgggaggcagaggttgtggtgagccgagatcacgccactgcactccagcccggggacagagcaagacactgtctcaaaaaaaaaaaaagaa

SEQ ID NO: 8894 - DNA, 1315 bp, Homo sapiens
  source 1..1315: mol_type = unassigned DNA
gacacggggcggctgagcagcagtgtgttcatggagaaagaatcaaagcgcacatcttgtactttgatgcccataggaagggctctcctctggcccctctggctttgtttggagcagaaaacaacaaagtgagttcaggtggtagccgagtggacaatgaggaagaggaagaagagggagaaggagggctggaaacaaatggccccccaaaccctttccagctgcaccctctgcctgaaggatgctgtaccacagacgggttttgccaggccgggaaggacctgcgccttgtctccatttccaacgagcccatggatgtccctgcgggctttctcctcgtgggggtcaagtcccccagcctgccggaccatctcctggtgtgcgccgttgacaagaggttcttgccagatgacaatggccacaatgctcttcttggtttctctgggaattgtgttggctgtggaaagaaaggcttctgttacttcacggaattctccaatcatataaatctgaaactgaccactcaacccaagaagcagaaacacttgaagtattacctggtccgtaatgcacaagggactctaaccaaaggacctttaatctgttggaaaggctcagagtttagaagccggcagatccccgccagtacttgttccagttccctcttcccagccctggagagcacggctgccttccccagcgagcccgttcctgggacgaaccccagcatcctgatgggagctcagcaggcaggaccagcttctgatcacccctcactaaacgcagcaatgggtccggctgttttcaacggcaaagattccccgaagtgccaacaactggcaaagaataacctgttggccctgccgcgaccatcggctttaggtagctctgcctgtcctggccgtcctggggatcctgctcttctttgggccaaggccagagggggcatgggagctgctgggctggggccgctgagcctcctggagtctgatgtggcttccatgagagtcaggccaggaccacaggtgcctcctgagtccgtgggtctgggcccaggccctggtgctctatgagtgacacttgggagttaccgtatgtgccaaggagcagtgagacacctgtggtaatggcgagtgacctgtcctatgggctgcacagctggaggatggtagaattttggagcaatagtgggcagtgtgttgttggggaagaacatgggcttctgaatcagaaaaatatgaattcaaaacctaccgctgtctcttgttagtcaggggaccttggccaagtctcaataaatgtttcttcatctgga

SEQ ID NO: 8895 - DNA, 2347 bp, Homo sapiens
  source 1..2347: mol_type = unassigned DNA
gaaagaatcaaagcgcacatcttgtactttgatgcccataggaagggctctcctctggcccctctggctttgtttggagcagaaaacaacaaactgcagctgaggacagccaccctttcttcgtctctgctgagcgaaggctacacggcccttcctccttgcagctgtttcaccttctaccttgcgtggagccaggcttttgcaccgaatctgagatgccattttaaacagaagactccatcctcttgaagatgggaaattcttacgctggacagctgaagacgacacgctttgaagaggtcttgcacaattccatcgaggcatccctgcggtccaacaacctggtgcccaggcccatcttttcccagctgtacctggaagctgagcagcagcttgccgctctagaaggtggtagccgagtggacaatgaggaagaggaagaagagggagaaggagggctggaaacaaatggccccccaaaccctttccagctgcaccctctgcctgaaggatgctgtaccacagacgggttttgccaggccgggaaggacctgcgccttgtctccatttccaacgagcccatggatgtccctgcgggctttctcctcgtgggggtcaagtcccccagcctgccggaccatctcctggtgtgcgccgttgacaagaggttcttgccagatgacaatggccacaatgctcttcttggtttctctgggaattgtgttggctgtggaaagaaaggcttctgttacttcacggaattctccaatcatataaatctgaaactgaccactcaacccaagaagcagaaacacttgaagtattacctggtccgtaatgcacaagggactctaaccaaaggacctttaatctgttggaaaggctcagagtttagaagccggcagatccccgccagtacttgttccagttccctcttcccagccctggagagcacggctgccttccccagcgagcccgttcctgggacgaaccccagcatcctgatgggagctcagcaggcaggaccagcttctgatcacccctcactaaacgcagcaatgggtccggctgttttcaacggcaaagattccccgaagtgccaacaactggcaaagaataacctgttggccctgccgcgaccatcggctttaggtatcttgtcaaactccgggccccccaaaaaacgccacaaagggtggtctccagaatctccatcagctccagatggtggctgcccccaaggtggtgggaacagagctaagtatgagagcgcaggcatgtcctgcgtgccgcaggttggcttggtgggaccagcttcagtcacctttccagtggtggcctctggagaaccagtgtctgttcctgacaacttgctgaaaatatgcaaggccaagccagtgatatttaaaggccatgggaacttcccttacctctgtgggaacctgaatgacgtcgtggtcagccccctcttgtacacgtgctaccagaattcccagtctgtctcacgggcatacgagcagtacggcgcctctgccatccagcccatctccgaggagatgcagctcctgcttaccgtctactacctggtccagctggcacatcaaatacgaaatccggacgtataaaccagacaattcataaaagagaaaataccagaaggaaacaaatattgaaaagtattcagtctcactcatcatcaaagacatgcaaatcacaaatcaagtcatctttttctgaattaataacccaaatgatggtacccagtggtgcttaggtgcggtaaaaccagcgcttgtccgatgcaccgttcgcgtggtaaactgacgcattcaggctcttgggaagcaatctgatgatatgtagtagctggttctgtaaatccacctttgagaatttaggcgaaggaagtaacgttctatatgtcaagatgtgcattgcagagggatttataaaggtgaatatttggaagaaataagagaatccacaatagagaccttgctaagtaaacggtggtgctcacgtatgatgggacattatggacacactaacagcactctttatgttggctgaaaatggcactgaaactgatgatagggtcatggttaaggaaagaatgcaagacccaaagtttatactgacaatcattgcagctatttgtaaggacagttttaatactaattccagcaatacatgtttttattccctgtcctggagtaggagaaagcctatattcccaggctgaatgttctacacatttaccactgtatatgcacatagggacagtgtaacctgtctataccaccgtagttccagtcctaactttctgaattctgtttaaagaccttct

SEQ ID NO: 8896 - DNA, 833 bp, Homo sapiens
  source 1..833: mol_type = unassigned DNA
ggaaattcttacgctggacagctgaagacgacacgctttgaagaggtcttgcacaattccatcgaggcatccctgcggtccaacaacctggtgcccaggcccatcttttcccagctgtacctggaagctgagcagcagcttgccgctctagaaggtggtagccgagtggacaatgaggaagaggaagaagagggagaaggagggctggaaacaaatggccccccaaaccctttccagctgcaccctctgcctgaaggatgctgtaccacagacggtgagcctctgccagctcctggccaggcagtgcctgccatgctgcccggaggcagtggccaggcgggtgactgggcctgtgactgtgtgctgcaggggtcctctttgctcttcctctttgctttccctgaggtgtgagccatgcccctgggcccgcagcaggtgctggcccggcctgccctcctgaaacaggagctccagagacaccatcctgggatgctaaggcaggcctctgtgccactctttggacagtctcaactttaccagtggcttgggagccagacattcatttttctgtgttggttgcttggaacctagaatacattttccctactcaggcctgtttgcacagcatattgaactcacaagtgattaggaggaataatctttctttctttcttttttttttttgacggaatctcactctgttgcccaggctggagtgcagtggtgcaatctcagatcactgcaacctccgcctcccaggttcaagcaattctcctgcctcagcctcccaagtagctgggattataggcacatgccaccatgcctggctaatt

SEQ ID NO: 8897 - DNA, 2052 bp, Homo sapiens
  source 1..2052: mol_type = unassigned DNA
ctggtctctgtggtgatatattgtcccaactcaccttgccagacagccctgggagaatgcagggcagaatcctccctgcttggagtcagggaggcaagacctggcaggcagcacccagtgaagctctggaaggtgctctgcccacaaggtgtcccattggtggtgctggaggagtgacaggtggcggctgcttggctctgggcaagtccctccctccagccccctcacttgtaaaaaataagaggattggacgaaatgaaccagcaagtggcacagccccattggttagaaaaggtgactcctctcatcctaggctccaggagggtgagcaggtgcactcaatgagcaaggcttcccaggacagggcactcgagggacctggcgcagctcacctatctccttcagtgccctcacccccagagaacccacatgtatgggaccgtaagctgtgcacaagactgggtgccaagtcgctgctgttcctctgcaggccatgggaacttcccttacctctgtgggaacctgaatgacgtcgtggtcagccccctcttgtacacgtgctaccagaattcccagtctgtctcacgggcatacgagcagtacggcgcctctgccatccagcccatctccgaggagatgcagctcctgcttaccgtctactacctggtccagctggccgcggaccaggtgcccttgatggaggacctggagcagatcttcctgcgctcttggcgcgagtcgcacctgaccgagatccggcagtaccagcaggcgccgccgcagcccttcccgcccgcgcccagcgccgcggcacccgtgacctccgcgcagctgccctggctggccagcctggccgccagctcctgcaacgacagcgtgcacgtcatcgagtgtgcttactccctggccgagggcctctccgagatgttccggctgttggtcgagggcaagcttgccaagaccaactacgtggtcatcatctgcgcctgccgcagcgcggccatcgactcctgcatcgccgtcaccggaaaataccaagcccggattctttccgagagccttctcactcctgcggagtaccagaaggaagtcaattacgagctggttacggggaaggtagactcgctgggggccttctttagcaccctctgtccagagggtgacattgacattttgctggacaaatttcaccaggaaaatcaaggccatatttcttcctcactcgctgcctcttctgtcactaaagcagcatccctggatgtcagtgggacaccggtgtgcacaagttacaatctggagccacacagcatccggcccttccagctggcagtagcgcagaagctcctctcccatgtgtgttccattgcggattccagcacccaaaatctggacctgggatcctttgagaaggtggactttctcatttgcattcccccctcagaagtgacctaccagcagactctgctccatgtgtggcattcaggggttttgctggagcttggtctgaagaaagagcacatgacgaagcagagggtggaacagtatgttctgaagctagacacggaggcacagacaaaatttaaggcttttctgcaaaactccttccagaacccgcatacactttttgtcctaatccatgaccatgcgcactgggatcttgtgagtagcactgttcataacctctattctcaaagtgacccgtcggtgggattggtggaccgattgctcaactgcagggaggtgaaggaggcccccaacattgtgacacttcacgtgacctccttcccgtatgcactgcagacacagcacaccctcatcagcccctacaacgagatccactggcctgcctcctgcagtaatggagtggacttatatcatgaaaataagaagtacttcgggctgtcggagtttattgaatccaccctttcaggacacagcctccccttgctcagatacgatagctcctttgaggccatggtcactgcattaggaaaaaggttcccccgcctgcacagcgcggtgatcaggacctttgttctcgtgcagcactac

SEQ ID NO: 8898 - DNA, 5296 bp, Homo sapiens
  source 1..5296: mol_type = unassigned DNA
gctgatagagatgtcttggacatgctctggctggctaatctccatgttctagccgactgaaaatacggtggccaagtggatggtgtgcttatttgcagtctaaagaaatttccttttgatgtggcagaaaattgaggatgtggagtggagaccccagacttacttggagctggagggtctgccttgcatcctgatcttcagtgggatggacccgcatggggagtccttgccgaggtctttgaggtactgtgacctgcgattgataaactcctcctgcttggtgagaacagccttggagcaggagctgggcctggctgcctactttgtgagcaacgaggttcccttggagaagggggctaggaacgaggccttggagagtgatgctgagaagctgagcagcacagacaacgaggatgaggagctggggacagaaggctctacctcggagaagagaagccccatgaaaagggagaggtcccgctcccacgactcagcatcctcatccctctcctccaaggcttccggttcagcgctcggtggcgagtcctcggctcagcccacagcactcccccagggagagcatgccaggtcgccccagccccgtggccccgcagaggagggcagagcccctggtgagaaacagaggccccgggcaagtcaggggccaccctcggccatcagcaggcacagtcccgggccgacgccccagcccgactgtagcctcaggaccggccagaggagcgtccaggtgtcggtcacctcgtcgtgctcccagctgtcctcctcctcgggctcatcctcctcatccgtggcgcccgctgccggcacgtgggtcctgcaggcctcccagtgctccttgaccaaggcctgccgccagccacccattgtcttcttgcccaagctcgtgtacgacatggttgtgtccactgacagcagtggcctgcccaaggccgcctccctcctgccctccccctcggtcatgtgggccagctctttccgccccctgctcagcaagaccatgacatccaccgagcagtccctctactaccggcagtggacggtgccccggcccagccacatggactacggcaaccgggccgagggccgcgtggacggcttccacccccgcaggctgctgctcagcggcccccctcagatcgggaagacaggtgcctacctgcagttcctcagtgtcctgtccaggatgcttgttcggctcacagaagtggatgtctatgacgaggaggagatcaatatcaacctcagagaagaatctgactggcattatctccagcttagcgacccctggccagacctggagctgttcaagaagttgccctttgactacatcattcacgacccgaagtatgaagatgccagcctgatttgttcgcactatcagggtataaagagtgaagacagagggatgtcccggaagccggaggacctttatgtgcggcgtcagacggcacggatgagactgtccaagtacgcagcgtacaacacttaccaccactgtgagcagtgccaccagtacatgggcttccacccccgctaccagctgtatgagtccaccctgcacgcctttgccttctcttactccatgctaggagaggagatccagctgcacttcatcatccccaagtccaaggagcaccactttgtcttcagccaacctggaggccagctggagagcatgcgactacccctcgtgacagacaagagccatgaatatataaaaagtccgacattcactccaaccaccggccgtcacgaacatgggctctttaatctgtaccacgcaatggacggtgccagccatttgcacgtgctggttgtcaaggaatacgagatggcaatttataagaaatattggcccaaccacatcatgctggtgctccccagtatcttcaacagtgctggagttggtgctgctcatttcctcatcaaggagctgtcctaccataacctggagctcgagcggaaccggcaggaggagctgggaatcaagccgcaggacatctggcctttcattgtgatctctgatgactcctgcgtgatgtggaacgtggtggatgtcaactctgctggggagagaagcagggagttctcctggtcggaaaggaacgtgtctttgaagcacatcatgcagcacatcgaggcggcccccgacatcatgcactacgccctgctgggcctgcggaagtggtccagcaagacccgggccagcgaggtgcaagagcccttctcccgctgccacgtgcacaacttcatcatcctgaacgtggacctgacccagaacgtgcagtacaaccagaaccggttcctgtgtgacgatgtagacttcaacctgcgggtgcacagcgccggcctcctgctctgccggttcaaccgcttcagcgtgatgaagaagcagatcgtggtgggcggccacaggtccttccacatcacatccaaggtgtctgataactctgccgcggtcgtgccggcccagtacatctgtgccccggacagcaagcacacgttcctcgcagcgcccgcccagctcctgctggagaagttcctgcagcaccacagccacctcttcttcccgctgtccctgaagaaccatgaccacccagtgctgtctgtcgactgttacctgaacctgggatctcagatttctgtttgctatgtgagctccaggccccactctttaaacatcagctgctcggacttgctgttcagtgggctgctgctgtacctctgtgactcttttgtgggagctagctttttgaaaaagtttcattttctgaaaggtgcgacgttgtgtgtcatctgtcaggaccggagctcactgcgccagacggtcgtccgcctggagctcgaggacgagtggcagttccggctgcgcgatgagttccagaccgccaatgccagggaagaccggccgctcttttttctgacgggacgacacatctgaggaagacagcggcgagttttctgaagagatgagtgctcagagccctcatgctgttgaggctaaagggaggcctggaacggtggggcgtttgactggaatggaccccagggactgtccaggtgcagcccctcctagtacacatgggcccccgaggccgtggtcctgggagccaggaagactccgcagtgggtgagaatgaaaacttgagactcccaagttctgggccagcccattgctctgggctgttttaaagcccatttcacgaggaacaaagatttacttcctgtcctgccattcgtgtgcttccatggacaaacctgatttttttctcttagttctaaagaatcttgggttattttgtagcggtgccagtatttcagtagatgggatttcagccaagtaggttcccctgtaacctcctacaaagcaatattccaaaggaacattttaactgtaaaggctggagacaagaaaaaataagtagatcgttttaataacaattatttaattgcctataagtttgctgtttcagaggctagcccaaaggcatcaaatttaataaagttaaacaaattgatttacttcagagcaaatatgatcctattaaaataatatagggtaaataccctacctcttagaaagggcaaaaatgcaaagaagctttctttaaaactaaaagggttttttggggggggagttggcggggaggaaataaggctaacagaggttgacctaaaattagccttacaaaggagaaaggaccacattgcttacttgaaacagacaatgaaaacaaccaaagtgatatataaaatagttgatgagaactagacttatgactgtagtttactagagtttagttttcagttgctgaagtagctcattttctcttactaatgtttggttcctcagggaagaatctcacttgactagagaggaggtgggaacagaagagagaaggaggcagggagatgtatttcttagggctcaccccttcacagactgacagaatggttttgttttgttttgttttgttttgttttgtttttgagatggactctagctctgtcacccaggctggagtgcagtggtgcgatctcggctcactgcaagctccgcctcccgggttctcaccattctcctgcctcagcctcccgagtagctgggactacaggcgcccaccaccacgcccggctaattttttgtattttttagtagagacggggtttcaccatgttagccaggatggtctcgatctcctgacctcgtgatccgcccgcctcggcctcccaaagtgctgggattacaggcgtgagccaccgtgcctgccccagaatggtttttaaagccacagttgagaggccacccattgcccggcgcctggacagtgatcatcttgttcatcttgttcagtcctttcttgtgtgattggaattattcatcccctttgaaagatgagaaggttgagatgcaaagagtctacctttccaagttctcactgctggaaagagctagaagcacagttcaaagttctggcttctggactctgcagtccaggtctcccttctcccacttgcctaccctcaatgccacactgtttttgaagtggcccataacttgaaggaaaagtttaaagacagttcaatttaatcatcagaatgcattcttttttttttcggagacggagtttcactcttgctgcccaggctggagtgcaatggtgcaatgacctcggctcactgcaacctctgcctcctgggttcaagtgattctccagcctcagcctcccgagtagctgggattatgggcgcccaccaccatgcccagctaatttttgtattttttttttttagtagagatggggtttcgccaggttggccaggctggtcttgtgaactcctggcctcaggtgatctgcccacctcatcctccaaaagtgctgggattacaggcatgagccactgcgcctggcctcagaatgcattcttacacatctatcctagacatttataagcactctaatggataacaatccaagaataaatgattgtaaaagatgatgccgaagagttgatgtcaatctttttttcctaagaaaaaaagtccgcgagtattaaatatttagatcaatgtttataaaatgattactttgtatatctcattattcctattttggaataaaaactgaccttctttaatcatatacttgtcttttgtaaatagcagcttttgtgtcattctccccactttattagttaatttaaattggaaaaaaccctcaaactaatattcttgtctgttccagtcttataaataaaacttataatgcatgta

SEQ ID NO: 8899 - DNA, 571 bp, Homo sapiens
  source 1..571: mol_type = unassigned DNA
gtgcttatttgcagtctaaagaaatttccttttggtcagaagatatagttcaaggagtttaaattggtgtgggaggccatcaggattcctctgagctgggctggttgggaagggaggcgtctgtggctttatttctttttcgttatctgcagatgtggcagaaaattgaggatgtggagtggagaccccagacttacttggagctggagggtctgccttgcatcctgatcttcagtgggatggacccgcatggggagtccttgccgaggtctttgaggtactgtgacctgcgattgataaactcctcctgcttggtgagaacagccttggagcaggagctgggcctggctgcctactttgtgagcaacgaggttcccttggagaagggggctaggaacgaggccttggagagtgatgctgagaagctgagcagcacagacaacgaggatgaggagctggggacagaaggctctacctcggagaagagaagccccatgaaaagggagaggtcccgctcccacgactcagcatcctcatccctctcctccaaggcttccggttcagcgctcgg

SEQ ID NO: 8900 - DNA, 8444 bp, Homo sapiens
  source 1..8444: mol_type = unassigned DNA
gaggcagctcctagtgaaacagtctaagaggtgtcaggctctgctgagtgctaaattagagaaagctgttacttatataacttcctgtaattgcccggcagtagctgcagctgaggacagccaccctttcttcgtctctgctgagcgaaggctacacggcccttcctccttgcagctgtttcaccttctaccttgcgtggagccaggcttttgcaccgaatctgagatgccattttaaacagaagactccatcctcttgaagatgggaaattcttacgctggacagctgaagacgacacgctttgaagaggtcttgcacaattccatcgaggcatccctgcggtccaacaacctggtgcccaggcccatcttttcccagctgtacctggaagctgagcagcagcttgccgctctagaaggtggtagccgagtggacaatgaggaagaggaagaagagggagaaggagggctggaaacaaatggccccccaaaccctttccagctgcaccctctgcctgaaggatgctgtaccacagacgggttttgccaggccgggaaggacctgcgccttgtctccatttccaacgagcccatggatgtccctgcgggctttctcctcgtgggggtcaagtcccccagcctgccggaccatctcctggtgtgcgccgttgacaagaggttcttgccagatgacaatggccacaatgctcttcttggtttctctgggaattgtgttggctgtggaaagaaaggcttctgttacttcacggaattctccaatcatataaatctgaaactgaccactcaacccaagaagcagaaacacttgaagtattacctggtccgtaatgcacaagggactctaaccaaaggacctttaatctgttggaaaggctcagagtttagaagccggcagatccccgccagtacttgttccagttccctcttcccagccctggagagcacggctgccttccccagcgagcccgttcctgggacgaaccccagcatcctgatgggagctcagcaggcaggaccagcttctgatcacccctcactaaacgcagcaatgggtccggctgttttcaacggcaaagattccccgaagtgccaacaactggcaaagaataacctgttggccctgccgcgaccatcggctttaggtatcttgtcaaactccgggccccccaaaaaacgccacaaagggtggtctccagaatctccatcagctccagatggtggctgcccccaaggtggtgggaacagagctaagtatgagagcgcaggcatgtcctgcgtgccgcaggttggcttggtgggaccagcttcagtcacctttccagtggtggcctctggagaaccagtgtctgttcctgacaacttgctgaaaatatgcaaggccaagccagtgatatttaaaggccatgggaacttcccttacctctgtgggaacctgaatgacgtcgtggtcagccccctcttgtacacgtgctaccagaattcccagtctgtctcacgggcatacgagcagtacggcgcctctgccatccagcccatctccgaggagatgcagctcctgcttaccgtctactacctggtccagctggccgcggaccaggtgcccttgatggaggacctggagcagatcttcctgcgctcttggcgcgagtcgcacctgaccgagatccggcagtaccagcaggcgccgccgcagcccttcccgcccgcgcccagcgccgcggcacccgtgacctccgcgcagctgccctggctggccagcctggccgccagctcctgcaacgacagcgtgcacgtcatcgagtgtgcttactccctggccgagggcctctccgagatgttccggctgttggtcgagggcaagcttgccaagaccaactacgtggtcatcatctgcgcctgccgcagcgcggccatcgactcctgcatcgccgtcaccggaaaataccaagcccggattctttccgagagccttctcactcctgcggagtaccagaaggaagtcaattacgagctggttacggggaaggtagactcgctgggggccttctttagcaccctctgtccagagggtgacattgacattttgctggacaaatttcaccaggaaaatcaaggccatatttcttcctcactcgctgcctcttctgtcactaaagcagcatccctggatgtcagtgggacaccggtgtgcacaagttacaatctggagccacacagcatccggcccttccagctggcagtagcgcagaagctcctctcccatgtgtgttccattgcggattccagcacccaaaatctggacctgggatcctttgagaaggtggactttctcatttgcattcccccctcagaagtgacctaccagcagactctgctccatgtgtggcattcaggggttttgctggagcttggtctgaagaaagagcacatgacgaagcagagggtggaacagtatgttctgaagctagacacggaggcacagacaaaatttaaggcttttctgcaaaactccttccagaacccgcatacactttttgtcctaatccatgaccatgcgcactgggatcttgtgagtagcactgttcataacctctattctcaaagtgacccgtcggtgggattggtggaccgattgctcaactgcagggaggtgaaggaggcccccaacattgtgacacttcacgtgacctccttcccgtatgcactgcagacacagcacaccctcatcagcccctacaacgagatccactggcctgcctcctgcagtaatggagtggacttatatcatgaaaataagaagtacttcgggctgtcggagtttattgaatccaccctttcaggacacagcctccccttgctcagatacgatagctcctttgaggccatggtcactgcattaggaaaaaggttcccccgcctgcacagcgcggtgatcaggacctttgttctcgtgcagcactacgcggccgccctgatggccgtaagcggcctcccgcagatgaagaactacacgtcggtggagacgctggagatcacgcagaacctcctcaactccccgaagcagtgcccctgcggccacgggctcatggtcctgctgcgggtgccctgttcgcccctggcggtggtggcctatgagcggctggcccacgtgcgggcccggctggcgctggaggagcactttgagatcatcctgggcagtcccagctcaggcgtcaccgtggggaagcacttcgtaaagcagctcaggatgtggcagaaaattgaggatgtggagtggagaccccagacttacttggagctggagggtctgccttgcatcctgatcttcagtgggatggacccgcatggggagtccttgccgaggtctttgaggtactgtgacctgcgattgataaactcctcctgcttggtgagaacagccttggagcaggagctgggcctggctgcctactttgtgagcaacgaggttcccttggagaagggggctaggaacgaggccttggagagtgatgctgagaagctgagcagcacagacaacgaggatgaggagctggggacagaaggctctacctcggagaagagaagccccatgaaaagggagaggtcccgctcccacgactcagcatcctcatccctctcctccaaggcttccggttcagcgctcggtggcgagtcctcggctcagcccacagcactcccccagggagagcatgccaggtcgccccagccccgtggccccgcagaggagggcagagcccctggtgagaaacagaggccccgggcaagtcaggggccaccctcggccatcagcaggcacagtcccgggccgacgccccagcccgactgtagcctcaggaccggccagaggagcgtccaggtgtcggtcacctcgtcgtgctcccagctgtcctcctcctcgggctcatcctcctcatccgtggcgcccgctgccggcacgtgggtcctgcaggcctcccagtgctccttgaccaaggcctgccgccagccacccattgtcttcttgcccaagctcgtgtacgacatggttgtgtccactgacagcagtggcctgcccaaggccgcctccctcctgccctccccctcggtcatgtgggccagctctttccgccccctgctcagcaagaccatgacatccaccgagcagtccctctactaccggcagtggacggtgccccggcccagccacatggactacggcaaccgggccgagggccgcgtggacggcttccacccccgcaggctgctgctcagcggcccccctcagatcgggaagacaggtgcctacctgcagttcctcagtgtcctgtccaggatgcttgttcggctcacagaagtggatgtctatgacgaggaggagatcaatatcaacctcagagaagaatctgactggcattatctccagcttagcgacccctggccagacctggagctgttcaagaagttgccctttgactacatcattcacgacccgaagtatgaagatgccagcctgatttgttcgcactatcagggtataaagagtgaagacagagggatgtcccggaagccggaggacctttatgtgcggcgtcagacggcacggatgagactgtccaagtacgcagcgtacaacacttaccaccactgtgagcagtgccaccagtacatgggcttccacccccgctaccagctgtatgagtccaccctgcacgcctttgccttctcttactccatgctaggagaggagatccagctgcacttcatcatccccaagtccaaggagcaccactttgtcttcagccaacctggaggccagctggagagcatgcgactacccctcgtgacagacaagagccatgaatatataaaaagtccgacattcactccaaccaccggccgtcacgaacatgggctctttaatctgtaccacgcaatggacggtgccagccatttgcacgtgctggttgtcaaggaatacgagatggcaatttataagaaatattggcccaaccacatcatgctggtgctccccagtatcttcaacagtgctggagttggtgctgctcatttcctcatcaaggagctgtcctaccataacctggagctcgagcggaaccggcaggaggagctgggaatcaagccgcaggacatctggcctttcattgtgatctctgatgactcctgcgtgatgtggaacgtggtggatgtcaactctgctggggagagaagcagggagttctcctggtcggaaaggaacgtgtctttgaagcacatcatgcagcacatcgaggcggcccccgacatcatgcactacgccctgctgggcctgcggaagtggtccagcaagacccgggccagcgaggtgcaagagcccttctcccgctgccacgtgcacaacttcatcatcctgaacgtggacctgacccagaacgtgcagtacaaccagaaccggttcctgtgtgacgatgtagacttcaacctgcgggtgcacagcgccggcctcctgctctgccggttcaaccgcttcagcgtgatgaagaagcagatcgtggtgggcggccacaggtccttccacatcacatccaaggtgtctgataactctgccgcggtcgtgccggcccagtacatctgtgccccggacagcaagcacacgttcctcgcagcgcccgcccagctcctgctggagaagttcctgcagcaccacagccacctcttcttcccgctgtccctgaagaaccatgaccacccagtgctgtctgtcgactgttacctgaacctgggatctcagatttctgtttgctatgtgagctccaggccccactctttaaacatcagctgctcggacttgctgttcagtgggctgctgctgtacctctgtgactcttttgtgggagctagctttttgaaaaagtttcattttctgaaaggtgcgacgttgtgtgtcatctgtcaggaccggagctcactgcgccagacggtcgtccgcctggagctcgaggacgagtggcagttccggctgcgcgatgagttccagaccgccaatgccagggaagaccggccgctcttttttctgacgggacgacacatctgaggaagacagcggcgagttttctgaagagatgagtgctcagagccctcatgctgttgaggctaaagggaggcctggaacggtggggcgtttgactggaatggaccccagggactgtccaggtgcagcccctcctagtacacatgggcccccgaggccgtggtcctgggagccaggaagactccgcagtgggtgagaatgaaaacttgagactcccaagttctgggccagcccattgctctgggctgttttaaagcccatttcacgaggaacaaagatttacttcctgtcctgccattcgtgtgcttccatggacaaacctgatttttttctcttagttctaaagaatcttgggttattttgtagcggtgccagtatttcagtagatgggatttcagccaagtaggttcccctgtaacctcctacaaagcaatattccaaaggaacattttaactgtaaaggctggagacaagaaaaaataagtagatcgttttaataacaattatttaattgcctataagtttgctgtttcagaggctagcccaaaggcatcaaatttaataaagttaaacaaattgatttacttcagagcaaatatgatcctattaaaataatatagggtaaataccctacctcttagaaagggcaaaaatgcaaagaagctttctttaaaactaaaagggttttttggggggggagttggcggggaggaaataaggctaacagaggttgacctaaaattagccttacaaaggagaaaggaccacattgcttacttgaaacagacaatgaaaacaaccaaagtgatatataaaatagttgatgagaactagacttatgactgtagtttactagagtttagttttcagttgctgaagtagctcattttctcttactaatgtttggttcctcagggaagaatctcacttgactagagaggaggtgggaacagaagagagaaggaggcagggagatgtatttcttagggctcaccccttcacagactgacagaatggttttgttttgttttgttttgttttgttttgtttttgagatggactctagctctgtcacccaggctggagtgcagtggtgcgatctcggctcactgcaagctccgcctcccgggttctcaccattctcctgcctcagcctcccgagtagctgggactacaggcgcccaccaccacgcccggctaattttttgtattttttagtagagacggggtttcaccatgttagccaggatggtctcgatctcctgacctcgtgatccgcccgcctcggcctcccaaagtgctgggattacaggcgtgagccaccgtgcctgccccagaatggtttttaaagccacagttgagaggccacccattgcccggcgcctggacagtgatcatcttgttcatcttgttcagtcctttcttgtgtgattggaattattcatcccctttgaaagatgagaaggttgagatgcaaagagtctacctttccaagttctcactgctggaaagagctagaagcacagttcaaagttctggcttctggactctgcagtccaggtctcccttctcccacttgcctaccctcaatgccacactgtttttgaagtggcccataacttgaaggaaaagtttaaagacagttcaatttaatcatcagaatgcattcttttttttttcggagacggagtttcactcttgctgcccaggctggagtgcaatggtgcaatgacctcggctcactgcaacctctgcctcctgggttcaagtgattctccagcctcagcctcccgagtagctgggattatgggcgcccaccaccatgcccagctaatttttgtattttttttttttagtagagatggggtttcgccaggttggccaggctggtcttgtgaactcctggcctcaggtgatctgcccacctcatcctccaaaagtgctgggattacaggcatgagccactgcgcctggcctcagaatgcattcttacacatctatcctagacatttataagcactctaatggataacaatccaagaataaatgattgtaaaagatgatgccgaagagttgatgtcaatctttttttcctaagaaaaaaagtccgcgagtattaaatatttagatcaatgtttataaaatgattactttgtatatctcattattcctattttggaataaaaactgaccttctttaatcatatacttgtcttttgtaaatagcagcttttgtgtcattctccccactttattagttaatttaaattggaaaaaaccctcaaactaatattcttgtctgttccagtcttataaataaaacttataatgcatg

SEQ ID NO: 8901 - DNA, 3020 bp, Homo sapiens
  source 1..3020: mol_type = unassigned DNA
cagccgccggcggcgctagcacctcggagtcgggcggccggagcagcggagcgcagcgcggcgcagggaacggcactgggggtggggagaccagcccggccgagccgagggccaccccctggtcctctgccctcgcgccccgctagggccaggtgcacaaaaagctttaaacaagttaaaatctaggcaacagactccctgaagtgttgactgcccaacttaatcatgactgtgattcaaaaatgttaataaataaaccaaggtgtagatcatggggaattcatatgctgggcaactgaaatctgctcgatttgaggaagctctccacaactccatagaagcctccctcagatgtagtagtgtggtaccacggccaattttttcccagctatacctggaccctgaccagcatcctttctcatctgcagatgtcaaacccaaggtggaggatctggacaaagatttggtaaaccgctacactcaaaatggaagtctggatttttctaacaatctaacagttaatgaaatggaagatgatgaagacgatgaagaaatgtctgattcaaacagcccaccaattccctattcacaaaaacctgccccagaaggatcttgcactacagatggtttttgtcaagcaggaaaggatttgcgtttggtatcactgtgtatggaacaaattgacatcccagcaggattcctcctggtgggggccaagtctcccaatctgcctgaacacatcctagtttgtgctgtggacaagcgatttctaccagatgatcatggaaaaaatgcacttttagggttttctggaaattgtatcggctgtggagaaagaggatttcgatatttcacggaattttccaaccacattaacttgaagctcaccactcagccaaagaagcagaagcacttaaagtactacctagtcagaagctcccagggtgtactgtctaaaggacctcttatctgctggaaagaatgtagaagccgacaatcctctgcttcttgccactctattaagccaagctcttcagtgtcgtcaactgtgaccccagaaaatgggacaactaatggatacaaatcaggattcactcagacagatgctgctaatggaaacagtagccatggagggaagggcagtgcatccagctccactccagcccacacagggaattactctttgtcaccacgacctagctatgcatcaggagatcaagctaccatgttcatttctgggccaccaaagaaacgacaccggggatggtatcctgggtcacctctcccccaacctggcttagttgtacctgtccctacagttcgccctctttcaagaacggagccccttttatctgccccagttccacagaccccactaactggaattttacaacccaggcccattcctgcaggggaaactgtaattgttcctgaaaacctgctgagtaactcaggagttagaccagtaattctgataggctatggcactttaccctatttctatggaaatgttggtgacattgttgtgagtcctctgctggtgaattgctacaagattccacagttggaaaacaaagatttggaaaaattagggttgaccggcagccaatttctgagcgtggaaaacatgattcttctgacgatacagtatcttgtgcggctgggtcctgatcaggtacctctcagggaagaatttgagcaaattatgctgaaagctatgcaagaatttactctgagagaaagagccctgcagataggtgctcagtgtgtccctgtgtcaccaggacaactcccctggcttgctagattaattgccagcgtatctcaagacttggttcatgtggttgtgacccagaactctttggcggagggcatttcagagaccttaaggactctcagtgaaatgagacactatcaaaggctgccagattatgtggtggtaatttgtgcatcgaaaatcagaggaaatgaattttgtgtggtagtgttaggtcagcaccagtcccgagctctggcagagagcatgctcaccacaagtgagtttttgaaagaaattagttatgagcttatcacaggaaaggtcagtttcctggcatcacatttcaaaaccacatcattaggcgatgacctagacaagctgctggaaaaaatgcaacaaagaagaggagacagtgtggttacccctttcgatggagaccttaatgaatgtgtgtcaccccaggaggctgctgctatgattcccacacaaaacctggatttagataatgaaaccttccacatttatcaaccgcagctaacagttgccagaaaactcttatcccaggtgtgtgctatagcggacagtggcagccagagcctggacctcggtcacttcagcaaagtagacttcatcatcattgttcccagatcggaggtgttggttcagcaaactcttcagcggattcgacaatcaggtaagagtgaactttcaaagaggagcccacctagatccagcttcagatcccctctgcctctttcttttgcttaatccaaacgtctagaggatgcttaaaaccttcttcagtaataaaaatcataaaagcactttgttattttgggtttatctgaagttttccctcaaagtactctgtcctttttccctcaaggtcaagggtaaattgttgtgcatgtttgccaggtatcattaagttcatgatgtaatctgtgggactagaatctggtcatttatggatgaagagaaattttctcaaggcgaggatggccctgcatgggttgatggcgtctgtgccacctgaactcctcccacctgcaggcctcatttgcataggtggattcttggccatctagcacattaacagcacgtctgggacctggaaaccagaacaccatcccccatgtcagcaatgacgttctttaagaaaaaaaggttagcgttatttctaataactttaagtgtaaagaaaaaaaaatgtttttcccagaaaatgtgaaaaggtagagagcaaaaattttacaagtct

SEQ ID NO: 8902 - DNA, 5600 bp, Homo sapiens
  source 1..5600: mol_type = unassigned DNA
ccctggtcctctgccctcgcgccccgctagggccaggtgcacaaaaagctttaaacaagttaaaatctaggcaacagactccctgaagtgttgactgcccaacttaatcatgactgtgattcaaaaatgttaataaataaaccaaggtgtagatcatggggaattcatatgctgggcaactgaaatctgctcgatttgaggaagctctccacaactccatagaagcctccctcagatgtagtagtgtggtaccacggccaattttttcccagctatacctggaccctgaccagcatcctttctcatctgcagatgtcaaacccaaggtggaggatctggacaaagatttggtaaaccgctacactcaaaatggaagtctggatttttctaacaatctaacagttaatgaaatggaagatgatgaagacgatgaagaaatgtctgattcaaacagcccaccaattccctattcacaaaaacctgccccagaaggatcttgcactacagatggtttttgtcaagcaggaaaggatttgcgtttggtatcactgtgtatggaacaaattgacatcccagcaggattcctcctggtgggggccaagtctcccaatctgcctgaacacatcctagtttgtgctgtggacaagcgatttctaccagatgatcatggaaaaaatgcacttttagggttttctggaaattgtatcggctgtggagaaagaggatttcgatatttcacggaattttccaaccacattaacttgaagctcaccactcagccaaagaagcagaagcacttaaagtactacctagtcagaagctcccagggtgtactgtctaaaggacctcttatctgctggaaagaatgtagaagccgacaatcctctgcttcttgccactctattaagccaagctcttcagtgtcgtcaactgtgaccccagaaaatgggacaactaatggatacaaatcaggattcactcagacagatgctgctaatggaaacagtagccatggagggaagggcagtgcatccagctccactccagcccacacagggaattactctttgtcaccacgacctagctatgcatcaggagatcaagctaccatgttcatttctgggccaccaaagaaacgacaccggggatggtatcctgggtcacctctcccccaacctggcttagttgtacctgtccctacagttcgccctctttcaagaacggagccccttttatctgccccagttccacagaccccactaactggaattttacaacccaggcccattcctgcaggggaaactgtaattgttcctgaaaacctgctgagtaactcaggagttagaccagtaattctgataggctatggcactttaccctatttctatggaaatgttggtgacattgttgtgagtcctctgctggtgaattgctacaagattccacagttggaaaacaaagatttggaaaaattagggttgaccggcagccaatttctgagcgtggaaaacatgattcttctgacgatacagtatcttgtgcggctgggtcagcaccagtcccgagctctggcagagagcatgctcaccacaagtgagtttttgaaagaaattagttatgagcttatcacaggaaaggtcagtttcctggcatcacatttcaaaaccacatcattaggcgatgacctagacaagctgctggaaaaaatgcaacaaagaagaggagacagtgtggttacccctttcgatggagaccttaatgaatgtgtgtcaccccaggaggctgctgctatgattcccacacaaaacctggatttagataatgaaaccttccacatttatcaaccgcagctaacagttgccagaaaactcttatcccaggtgtgtgctatagcggacagtggcagccagagcctggacctcggtcacttcagcaaagtagacttcatcatcattgttcccagatcggaggtgttggttcagcaaactcttcagcggattcgacaatcaggtgtccttgtagacttgggtctggaggaaaatgggacagcccatcagagagcagaaaaatatgttgttcgtctagacaatgagattcaaaccaagtttgaagtttttatgaggagagtgaaacagaacccgtacacactgtttgtgctagttcatgacaactcccatgtggaactaacgagtgtcatttcaggctctttgtcacatagcgaacccagtcatgggctagctgatagagtcattaattgcagagaagttctggaagctttcaacctcctggtgctccaggtcagctccttcccatacactctgcagacccaacagtcccgcattagctctagcaatgaggttcactggatacagctggatactggggaggacgtgggctgcgaggagaagctgtactttggcttgagtgagtacagcaagtctctgcagtgggggatcacgagcccacttctgagatgtgacgagacttttgaaaaaatggtgaacacactcttggagaggtaccccaggctgcacagcatggtcgtccgctgctatcttctcatccagcagtactctgaggccctgatggctctcaccaccatggcgtcactccgcgaccacagcacaccagaaacactcagcattatggatgacctcatcagctccccaggcaaaaacaaaagtgggaggggacacatgctcattatcagggtgccctcggtgcagctggcgatgttagccaaggagcggctacaggaggtgcgcgacaaactgggtctgcagtatcggtttgagatcatccttgggaacccggccaccgaactcagtgttgcaactcactttgtggcgcgattaaagagttggagaggaaatgaaccagaagagtggatccctcggacataccaagatttagacggtctaccttgtattgtgatattaactggcaaagatcctcttggagaaacctttcccaggtctttgaagtactgtgacctccggttaattgactcaagctatttaactcgcacggccttggagcaggaggtgggtctggcatgctgctatgtctcaaaagaggtcatccggggacccactgttgccctggacctcagcgggaaggagcaggagagagctgctgtcagtgagaatgactccgatgagctgctcatcgacctggagcggccccagagcaacagcagcgctgtcacagggacctcgggttccatcatggagaatggagtgagctcttccagcacagctgacaagtcccagaagcagtccctgacccccagctttcagagcccagccaccagcttggggctggatgaaggggtctccgccagctcagctggagccggagccggggagactctgaagcaggaatgtgactccctgggcccccagatggcgagcagcaccacctccaagccgtcatcatcatcctcaggacccaggaccctcccatggccgggacagcccatcagaggctgccggggcccacaggcagccctgccaccagtggtgatcctatccaaagcggcctacagtctcctgggctcccagaagagtggcaagctgccatcctcctcctccctgctgccccacgccgacgtggcctgggtgagctccctgcggccactcctgaacaaggacatgagcagtgaggagcagtccctctactacaggcagtggaccttggcccggcagcaccacgctgactatagcaaccagctggacccggcctctggcacccgaaacttccacccccgacggctcctgctgacagggcccccacaggtgggaaagacgggctcctatttacagttcctcaggatcctcttccgcatgctcatcaggctcctggaggtggacgtgtatgatgaggaggagatcaacaccgatcacaatgaaagcagtgaagtgagccagtcagagggagagccctggcctgacatcgagagcttcagtaaaatgccttttgatgtcagtgtgcatgaccccaagtacagtttgatgagcctggtgtatactgagaagctggcaggggtcaaacaagaagtgataaaggaatccaaagttgaagagcccaggaaacgggaaactgtatccataatgctgaccaaatatgcagcctataacacctttcaccactgtgaacagtgccgccagtacatggacttcacctctgcctcccagatgtctgactccacccttcatgccttcacattctcttcttctatgctgggagaagaggttcagctctatttcatcattcccaaatccaaagagagtcattttgtcttcagcaagcagggcaagcacctggagagcatgcggctgcccctggtttcagacaagaatttgaatgcagtcaagagccctattttcactccttccagtggtcgacatgagcacggactcctaaaccttttccacgccatggagggcatcagccaccttcacctcctggtggtcaaagagtatgagatgcctctgtaccgcaagtactggcccaaccacatcatgctggtgcttcccggcatgttcaataatgcaggcgtgggtgctgccaggttcctcatcaaggagctatcatatcacaacctagaattggagagaaaccgcctggaggagctaggcattaaacgccagtgtgtctggcctttcatcgtcatgatggatgactcatgtgtcctatggaacattcacagtgttcaggagccatccagccagcccatggaagtaggagtttccagtaagaatgtgtccttgaagactgtcttgcagcacattgaagccacaccaaaaattgtccactatgcaatcttgggcatacagaaatggagcagcaagctgacttctcagagcctaaaggccccattctctaggtgtcacgtgcatgatttcattctcctcaacacagacttgactcagaatgtgcagtatgacttcaacaggtatttctgtgaagatgctgactttaatctgagaacaaacagtagtggcctgctcatctgccgctttaataacttcagtctcatgaagaaacatgttcaggttggagggcaaagggactttatcattaaaccaaagatcatggtgtcagagagcttagcacccatcttgccccttcaatacatctgtgctcccgacagtgaacacacactactggcagcccctgcacagtttctcctggagaaattccttcagcacgcctcatataaactcttccccaaagccatccataacttcaggagtcctgtgctggccattgactgctaccttaacattggaccagaggtggccatatgctatatcagctccagaccccactccagcaatgtcaactgtgaaggggtgtttttcagtggactccttttgtacctctgtgactcttttgtaggtgctgatcttaagaaatttaaatttctaaaaggtgctacactgtgtgtcatctgccaagacagaagttccttgcgccaaacaattgtccgcttagagctagaagatgagtggcagttccgcctccgggacgagtttcaaactgctaacagcagtgatgacaagcctctctactttcttactggacgtcatgtatga

SEQ ID NO: 8903 - DNA, 8749 bp, Homo sapiens
  source 1..8749: mol_type = unassigned DNA
gtttctgagagcatctgtcactttaggcattacaagatggatgggtctccagtgaactgctggttgaagcaaatggtgaaaataagaaaatcaaggggtttcagggtctgcagaggggacagacaacaaggaaacactgttagaaatcaagagtaagctgagcaatagaggaagagagcaaagatggatcagatgtcattttataaacatcttggaaatcagaatcttttggtggctttcgtgatctgagggagacatctgcatcatggtgcacaaaaagctttaaacaagttaaaatctaggcaacagactccctgaagtgttgactgcccaacttaatcatgactgtgattcaaaaatgttaataaataaaccaagatcatggggaattcatatgctgggcaactgaaatctgctcgatttgaggaagctctccacaactccatagaagcctccctcagatgtagtagtgtggtaccacggccaattttttcccagctatacctggaccctgaccagcatcctttctcatctgcagatgtcaaacccaaggtggaggatctggacaaagatttggtaaaccgctacactcaaaatggaagtctggatttttctaacaatctaacagttaatgaaatggaagatgatgaagacgatgaagaaatgtctgattcaaacagcccaccaattccctattcacaaaaacctgccccagaaggatcttgcactacagatggtttttgtcaagcaggaaaggatttgcgtttggtatcactgtgtatggaacaaattgacatcccagcaggattcctcctggtgggggccaagtctcccaatctgcctgaacacatcctagtttgtgctgtggacaagcgatttctaccagatgatcatggaaaaaatgcacttttagggttttctggaaattgtatcggctgtggagaaagaggatttcgatatttcacggaattttccaaccacattaacttgaagctcaccactcagccaaagaagcagaagcacttaaagtactacctagtcagaagctcccagggtgtactgtctaaaggacctcttatctgctggaaagaatgtagaagccgacaatcctctgcttcttgccactctattaagccaagctcttcagtgtcgtcaactgtgaccccagaaaatgggacaactaatggatacaaatcaggattcactcagacagatgctgctaatggaaacagtagccatggagggaagggcagtgcatccagctccactccagcccacacagggaattactctttgtcaccacgacctagctatgcatcaggagatcaagctaccatgttcatttctgggccaccaaagaaacgacaccggggatggtatcctgggtcacctctcccccaacctggcttagttgtacctgtccctacagttcgccctctttcaagaacggagccccttttatctgccccagttccacagaccccactaactggaattttacaacccaggcccattcctgcaggggaaactgtaattgttcctgaaaacctgctgagtaactcaggagttagaccagtaattctgataggctatggcactttaccctatttctatggaaatgttggtgacattgttgtgagtcctctgctggtgaattgctacaagattccacagttggaaaacaaagatttggaaaaattagggttgaccggcagccaatttctgagcgtggaaaacatgattcttctgacgatacagtatcttgtgcggctgggtcctgatcaggtacctctcagggaagaatttgagcaaattatgctgaaagctatgcaagaatttactctgagagaaagagccctgcagataggtgctcagtgtgtccctgtgtcaccaggacaactcccctggcttgctagattaattgccagcgtatctcaagacttggttcatgtggttgtgacccagaactctttggcggagggcatttcagagaccttaaggactctcagtgaaatgagacactatcaaaggctgccagattatgtggtggtaatttgtgcatcgaaaatcagaggaaatgaattttgtgtggtagtgttaggtcagcaccagtcccgagctctggcagagagcatgctcaccacaagtgagtttttgaaagaaattagttatgagcttatcacaggaaaggtcagtttcctggcatcacatttcaaaaccacatcattaggcgatgacctagacaagctgctggaaaaaatgcaacaaagaagaggagacagtgtggttacccctttcgatggagaccttaatgaatgtgtgtcaccccaggaggctgctgctatgattcccacacaaaacctggatttagataatgaaaccttccacatttatcaaccgcagctaacagttgccagaaaactcttatcccaggtgtgtgctatagcggacagtggcagccagagcctggacctcggtcacttcagcaaagtagacttcatcatcattgttcccagatcggaggtgttggttcagcaaactcttcagcggattcgacaatcaggtgtccttgtagacttgggtctggaggaaaatgggacagcccatcagagagcagaaaaatatgttgttcgtctagacaatgagattcaaaccaagtttgaagtttttatgaggagagtgaaacagaacccgtacacactgtttgtgctagttcatgacaactcccatgtggaactaacgagtgtcatttcaggctctttgtcacatagcgaacccagtcatgggctagctgatagagtcattaattgcagagaagttctggaagctttcaacctcctggtgctccaggtcagctccttcccatacactctgcagacccaacagtcccgcattagctctagcaatgaggttcactggatacagctggatactggggaggacgtgggctgcgaggagaagctgtactttggcttgagtgagtacagcaagtctctgcagtgggggatcacgagcccacttctgagatgtgacgagacttttgaaaaaatggtgaacacactcttggagaggtaccccaggctgcacagcatggtcgtccgctgctatcttctcatccagcagtactctgaggccctgatggctctcaccaccatggcgtcactccgcgaccacagcacaccagaaacactcagcattatggatgacctcatcagctccccaggcaaaaacaaaagtgggaggggacacatgctcattatcagggtgccctcggtgcagctggcgatgttagccaaggagcggctacaggaggtgcgcgacaaactgggtctgcagtatcggtttgagatcatccttgggaacccggccaccgaactcagtgttgcaactcactttgtggcgcgattaaagagttggagaggaaatgaaccagaagagtggatccctcggacataccaagatttagacggtctaccttgtattgtgatattaactggcaaagatcctcttggagaaacctttcccaggtctttgaagtactgtgacctccggttaattgactcaagctatttaactcgcacggccttggagcaggaggtgggtctggcatgctgctatgtctcaaaagaggtcatccggggacccactgttgccctggacctcagcgggaaggagcaggagagagctgctgtcagtgagaatgactccgatgagctgctcatcgacctggagcggccccagagcaacagcagcgctgtcacagggacctcgggttccatcatggagaatggagtgagctcttccagcacagctgacaagtcccagaagcagtccctgacccccagctttcagagcccagccaccagcttggggctggatgaaggggtctccgccagctcagctggagccggagccggggagactctgaagcaggaatgtgactccctgggcccccagatggcgagcagcaccacctccaagccgtcatcatcatcctcaggacccaggaccctcccatggccgggacagcccatcagaggctgccggggcccacaggcagccctgccaccagtggtgatcctatccaaagcggcctacagtctcctgggctcccagaagagtggcaagctgccatcctcctcctccctgctgccccacgccgacgtggcctgggtgagctccctgcggccactcctgaacaaggacatgagcagtgaggagcagtccctctactacaggcagtggaccttggcccggcagcaccacgctgactatagcaaccagctggacccggcctctggcacccgaaacttccacccccgacggctcctgctgacagggcccccacaggtgggaaagacgggctcctatttacagttcctcaggatcctcttccgcatgctcatcaggctcctggaggtggacgtgtatgatgaggaggagatcaacaccgatcacaatgaaagcagtgaagtgagccagtcagagggagagccctggcctgacatcgagagcttcagtaaaatgccttttgatgtcagtgtgcatgaccccaagtacagtttgatgagcctggtgtatactgagaagctggcaggggtcaaacaagaagtgataaaggaatccaaagttgaagagcccaggaaacgggaaactgtatccataatgctgaccaaatatgcagcctataacacctttcaccactgtgaacagtgccgccagtacatggacttcacctctgcctcccagatgtctgactccacccttcatgccttcacattctcttcttctatgctgggagaagaggttcagctctatttcatcattcccaaatccaaagagagtcattttgtcttcagcaagcagggcaagcacctggagagcatgcggctgcccctggtttcagacaagaatttgaatgcagtcaagagccctattttcactccttccagtggtcgacatgagcacggactcctaaaccttttccacgccatggagggcatcagccaccttcacctcctggtggtcaaagagtatgagatgcctctgtaccgcaagtactggcccaaccacatcatgctggtgcttcccggcatgttcaataatgcaggcgtgggtgctgccaggttcctcatcaaggagctatcatatcacaacctagaattggagagaaaccgcctggaggagctaggcattaaacgccagtgtgtctggcctttcatcgtcatgatggatgactcatgtgtcctatggaacattcacagtgttcaggagccatccagccagcccatggaagtaggagtttccagtaagaatgtgtccttgaagactgtcttgcagcacattgaagccacaccaaaaattgtccactatgcaatcttgggcatacagaaatggagcagcaagctgacttctcagagcctaaaggccccattctctaggtgtcacgtgcatgatttcattctcctcaacacagacttgactcagaatgtgcagtatgacttcaacaggtatttctgtgaagatgctgactttaatctgagaacaaacagtagtggcctgctcatctgccgctttaataacttcagtctcatgaagaaacatgttcaggttggagggcaaagggactttatcattaaaccaaagatcatggtgtcagagagcttagcacccatcttgccccttcaatacatctgtgctcccgacagtgaacacacactactggcagcccctgcacagtttctcctggagaaattccttcagcacgcctcatataaactcttccccaaagccatccataacttcaggagtcctgtgctggccattgactgctaccttaacattggaccagaggtggccatatgctatatcagctccagaccccactccagcaatgtcaactgtgaaggggtgtttttcagtggactccttttgtacctctgtgactcttttgtaggtgctgatcttaagaaatttaaatttctaaaaggtgctacactgtgtgtcatctgccaagacagaagttccttgcgccaaacaattgtccgcttagagctagaagatgagtggcagttccgcctccgggacgagtttcaaactgctaacagcagtgatgacaagcctctctactttcttactggacgtcatgtatgagcttttgaagagaccaaaacagcaaaaagatgcctaggtgggatgggacagaaacaatttgggatttttctttttcctttaaagtacaatcactgtggagcaaagtgcaacatatttgtctaaattctccaaagaactccccaaatctgatccaggtctttggggacatcactttccttcagttccaattacaggacccttaaattcaggtaaactctatcctaggcagttatgcaattacttaagatacggtctgcccatgggatcctgaggaggatatactttggagagtgaatatggagtttgcattatttttttctattactatgttagggggaaactgactgtcaggattaactagcctgaatgtgttacatgagactcatgccattggtgtggaatcaattgaagattaacgtttgaggcctgaaccctcagtttctcttcagatctgtactttggtacagtattactcaggggtttgaaatgatagaatgtagacgatatttgtatttaaaaaaagaagtagctttgtctttctctgtgcagtgttagtttaagatttataatcttctatgtattgaaacttttggcaaaatttccacaggagttagaagtttactatttaaactgaacaaacaaatcagtaaatgcagagcaggcattgtgtgcatttatgcatcttctcctagcctaattcctttgctttacccactctttaaatgtgtttccagtctttaagaatatcttatctatgagactatggaacagtgattaatcttttgcaagaacttaagtcagttaagaagctttcagcaggtaacctgcacccaccgtttggttggaattaagcagttggcaccagcaaacctaaatgtcaggctgaggttctgttgcagagtgaaactagtttgtttcctttcagggactcaagcaaagcttcctttaaaagatgcactaaatattaccaccttacactgacaacgccacagaaattgccgaattgggaaattgagccatagaaagagaaatgtttttttacttaatcttaccagtgactcttgtgaggagtaaggaagactccattaagagtctttttgattcattaaaatcagcagggggtgtttgtccagtatcggcaatgggaggcatatgtttctacagatttctcaaatattttaatcaaaaacattatttttagaaagtgttctagataaaactaagtcttagaagtttactcttaaattactccagttctcatcattgaacaatctcttgagagttttctcattagcccatatttactactttatccccacttaaaatggccatttttacttgaatcaatcttgtttgtgacctgaaactactgaggggcctactaagcctgcatttacttagaacaaatagtgttaattgaccagctttattatcttatgacaacaaggagtttacaaagctagtgaaaaaatggaatgtattagactaaaaatggtttgcagatctcttggttttaatatagctacttataatgctttaactgtattttgaagtgaacaattccttttaaccccatttttaattgtccttcaaagaggacctgccttatatatgctttaaaaaatactccttaattttagtacagcagaatttttggtaaagaggtatgttttgaagcaatttggtttaaatatgaatgtatttcacttgttcctgttttgttgaaagggcctaatgcaaataataccaagaaacccactgtctgtgcaatattccaataacatttacatagggcaaataaaatacttgaaagaattctgaaacaattgtacctggggtggatggcctctcagggtttcttctggctttatgacttcatagtttaaagaactttttttttaagtagttacatcagatgcaggtactccattagttagggctgcactctgaaaattcaaattattattatgagctcttaaatactatttaactctggaagagatatgccagaataaagccaaaagaccatcacccctataatggagaaattgatctgcctattcttttcaaagcctatcttactaatgtttggatcttttaaaatcatcttatcatcagtataattcttgagtatgttaggtccttctttaaggataaaattgcacaagcacaggacaccatgatttgtgtgtatatatatatatatcctagtgtgttcagctttaagctttgcaatcccttaggacactgatgtgggatgaatggattcgctaggcccacacagtaactcacctgtagacctgctgaacctcagcatgtatgacagttcacacaggttaatactgaatgtaaacgaaaaactagaagacaattgttataattttttttggctgtaatttatgcaattgctttttgtgatttttagaaaatggggcacccgtgttattactgtaaaatgttcttaaccaaaatttggtgaatttcactagtctacctcacattttgttaatgattcaaaattgtcttgtgtctactgttatatttttgtcctttgatttaatttgcttaatgtattaaagttatctcccaccccctc

SEQ ID NO: 8904 - DNA, 2446 bp, Homo sapiens
  source 1..2446: mol_type = unassigned DNA
ttaaacaagttaaaatctaggcaacagactccctgaagtgttgactgcccaacttaatcatgactgtgattcaaaaatgttaataaataaaccaaggtgtagatcatggggaattcatatgctgggcaactgaaatctgctcgatttgaggaagctctccacaactccatagaagcctccctcagatgtagtagtgtggtaccacggccaattttttcccagctatacctggaccctgaccagcatcctttctcatctgcagatgtcaaacccaaggtggaggatctggacaaagatttggtaaaccgctacactcaaaatggaagtctggatttttctaacaatctaacagttaatgaaatggaagatgatgaagacgatgaagaaatgtctgattcaaacagcccaccaattccctattcacaaaaacctgccccagaaggatcttgcactacagatggtttttgtcaagcaggaaaggatttgcgtttggtatcactgtgtatggaacaaattgacatcccagcaggattcctcctggtgggggccaagtctcccaatctgcctgaacacatcctagtttgtgctgtggacaagcgatttctaccagatgatcatggaaaaaatgcacttttagggttttctggaaattgtatcggctgtggagaaagaggatttcgatatttcacggaattttccaaccacattaacttgaagctcaccactcagccaaagaagcagaagcacttaaagtactacctagtcagaagctcccagggtgtactgtctaaaggacctcttatctgctggaaagaatgtagaagccgacaatcctctgcttcttgccactctattaagccaagctcttcagtgtcgtcaactgtgaccccagaaaatgggacaactaatggatacaaatcaggattcactcagacagatgctgctaatggaaacagtagccatggagggaagggcagtgcatccagctccactccagcccacacagggaattactctttgtcaccacgacctagctatgcatcaggagatcaagctaccatgttcatttctgggccaccaaagaaacgacaccggggatggtatcctgggtcacctctcccccaacctggcttagttgtacctgtccctacagttcgccctctttcaagaacggagccccttttatctgccccagttccacagaccccactaactggaattttacaacccaggcccattcctgcaggggaaactgtaattgttcctgaaaacctgctgagtaactcaggagttagaccagtaattctgataggctatggcactttaccctatttctatggaaatgttggtgacattgttgtgagtcctctgctggtgaattgctacaagattccacagttggaaaacaaagatttggaaaaattagggttgaccggcagccaatttctgagcgtggaaaacatgattcttctgacgatacagtatcttgtgcggctgggtcctgatcaggtacctctcagggaagaatttgagcaaattatgctgaaagctatgcaagaatttactctgagagaaagagccctgcagataggtgctcagtgtgtccctgtgtcaccaggacaactcccctggcttgctagattaattgccagcgtatctcaagacttggttcatgtggttgtgacccagaactctttggcggagggcatttcagagaccttaaggactctcagtgaaatgagacactatcaaaggctgccagattatgtggtggtaatttgtgcatcgaaaatcagaggaaatgaattttgtgtggtagtgttaggtcagcaccagtcccgagctctggcagagagcatgctcaccacaagtgagtttttgaaagaaattagttatgagcttatcacaggaaaggtcagtttcctggcatcacatttcaaaaccacatcattaggcgatgacctagacaagctgctggaaaaaatgcaacaaagaagaggagacagtgtggttacccctttcgatggagaccttaatgaatgtgtgtcaccccaggaggctgctgctatgattcccacacaaaacctggatttagataatgaaaccttccacatttatcaaccgcagctaacagttgccagaaaactcttatcccaggtgtgtgctatagcggacagtggcagccagagcctggacctcggtcacttcagcaaagtagacttcatcatcattgttcccagatcggaggtgttggttcagcaaactcttcagcggattcgacaatcaggttccagtccaggttcacacattgcattcagttatgtcctcttcatctcctgcaatctatgacatttcttcagtctttcctggcttttcatgaccttaagtgaatactaatcaattgttttgtgtagggaatgtttgagttttctcacaattaaattga

SEQ ID NO: 8905 - DNA, 598 bp, Homo sapiens
  source 1..598: mol_type = unassigned DNA
gaagctcaccactcagccaaagaagcagaagcacttaaagtactacctagtcagaagctcccagggtgtactgtctaaaggacctcttatctgctggaaagaatgtagaagccgacaatcctctgcttcttgccactctattaagccaagctcttcagtgtcgtcaactgtgaccccagaaaatgggacaactaatggatacaaatcaggattcactcagacagattcgccgattctcagtccagctaattctgcaatcaatttaagtggagctcaggacctgacccggaataacaatgttgtgaaaccactggctttatctttgcaggttgtagggaagacttttgctgcagatgctgctaatggaaacagtagccatggagggaagggcagtgcatccagctccactccagcccacacagggaattactctttgtcaccacgacctagctatgcatcaggagatcaagctaccatgttcatttctgggccaccaaagaaacgacaccggggatggtatcctgggtcacctctcccccaacctggcttagttgtacctgtccctacagttcgccctctttcaagaacggagcccctt

SEQ ID NO: 8906 - DNA, 682 bp, Homo sapiens
  source 1..682: mol_type = unassigned DNA
ctcccctggcttgctagattaattgccagcgtatctcaagacttggttcatgtggttgtgacccagaactctttggcggagggcatttcagagaccttaaggactctcagtgaaatgagacactatcaaaggctgccagattatgtggtggtaatttgtgcatcgaaaatcagaggaaatgaattttgtgtggtagtgttaggtcagcaccagtcccgagctctggcagagagcatgctcaccacaagtgagtttttgaaagaaattagttatgagcttatcacaggaaaggtcagtttcctggcatcacatttcaaaaccacatcattaggcgatgacctagacaagctgctggaaaaaatgcaacaaagaagaggagacagtgtggttacccctttcgatggagaccttaatgaatgtgtgtcaccccaggaggctgctgctatgattcccacacaaaacctgggtaatgtcatctcagaccaagaggaggaagtcagtccttgggacagacattgtaaaaactaagtcattctaagggttttgaggattcttcaagtcacagaccacaacagccttttcctgattgtctacatgataaacctggttgaaattaaaaatgctttcccatgtggcctggatcaaaggctttgttcctagtaaaagtcttctggaatgaaaa

SEQ ID NO: 8907 - DNA, 444 bp, Homo sapiens
  source 1..444: mol_type = unassigned DNA
tcagtgaaatgagacactatcaaaggctgccagattatgtggtggtaatttgtgcatcgaaaatcagaggaaatgaattttgtgtggtagtgttaggtcagcaccagtcccgagctctggcagagagcatgctcaccacaagtgagtttttgaaagaaattagttatgagcttatcacaggaaaggtcagtttcctggcatcacatttcaaaaccacatcattaggtgagtggttgtaagatttggcaacactggcagcccctagttgtatgattttctgagtttaaatcttagcctgtcaagatgagtgtggagctcaagcttgccagctgatctttcatttgaaatggtttatcctaagtattttgtcactaacaccacaggaagcagtaagggggtctagaggaaggcccattggtactggattcaaaagtctcagctcag

SEQ ID NO: 8908 - DNA, 2882 bp, Homo sapiens
  source 1..2882: mol_type = unassigned DNA
tatcacaggaaaggtcagtttcctggcatcacatttcaaaaccacatcattaggcgatgacctagacaagctgctggaaaaaatgcaacaaagaagaggagacagtgtggttacccctttcgatggagaccttaatgaatgtgtgtcaccccaggaggctgctgctatgattcccacacaaaacctggatttagataatgaaaccttccacatttatcaaccgcagctaacagttgccagaaaactcttatcccaggtgtgtgctatagcggacagtggcagccagagcctggacctcggtcacttcagcaaagtagacttcatcatcattgttcccagatcggaggtgttggttcagcaaactcttcagcggattcgacaatcagtgtcatttcaggctctttgtcacatagcgaacccagtcatgggctagctgatagagtcattaattgcagagaagttctggaagctttcaacctcctggtgctccaggtcagctccttcccatacactctgcagacccaacagtcccgcattagctctagcaatgaggttcactggatacagctggatactggggaggacgtgggctgcgaggagaagctgtactttggcttgagtgagtacagcaagtctctgcagtgggggatcacgagcccacttctgagatgtgacgagacttttgaaaaaatggtgaacacactcttggagaggtaccccaggctgcacagcatggtcgtccgctgctatcttctcatccagcagtactctgaggccctgatggctctcaccaccatggcgtcactccgcgaccacagcacaccagaaacactcagcattatggatgacctcatcagctccccaggcaaaaacaaaagtgggaggggacacatgctcattatcagggtgccctcggtgcagctggcgatgttagccaaggagcggctacaggaggtgcgcgacaaactgggtctgcagtatcggtttgagatcatccttgggaacccggccaccgaactcagtgttgcaactcactttgtggcgcgattaaagagttggagaggaaatgaaccagaagagtggatccctcggacataccaagatttagacggtctaccttgtattgtgatattaactggcaaagatcctcttggagaaacctttcccaggtctttgaagtactgtgacctccggttaattgactcaagctatttaactcgcacggccttggagcaggaggtgggtctggcatgctgctatgtctcaaaagaggtcatccggggacccactgttgccctggacctcagcgggaaggagcaggagagagctgctgtcagtgagaatgactccgatgagctgctcatcgacctggagcggccccagagcaacagcagcgctgtcacagggacctcgggttccatcatggagaatggagtgagctcttccagcacagctgacaagtcccagaagcagtccctgacccccagctttcagagcccagccaccagcttggggctggatgaaggggtctccgccagctcagctggagccggagccggggagactctgaagcaggaatgtgactccctgggcccccagatggcgagcagcaccacctccaagccgtcatcatcatcctcaggacccaggaccctcccatggccgggacagcccatcagaggctgccggggcccacaggcagccctgccaccagtggtgatcctatccaaagcggcctacagtctcctgggctcccagaagagtggcaagctgccatcctcctcctccctgctgccccacgccgacgtggcctgggtgagctccctgcggccactcctgaacaaggacatgagcagtgaggagcagtccctctactacaggcagtggaccttggcccggcagcaccacgctgactatagcaaccagctggacccggcctctggcacccgaaacttccacccccgacggctcctgctgacagggcccccacaggtgggaaagacgggctcctatttacagttcctcaggatcctcttccgcatgctcatcaggctcctggaggtggacgtgtatgatgaggaggagatcaacaccgatcacaatgaaagcagtgaagtgagccagtcagagggagagccctggcctgacatcgagagcttcagtaaaatgccttttgatgtcagtgtgcatgaccccaagtacagtttgatgagcctggtgtatactgagaagctggcaggggtcaaacaagaagtgataaaggaatccaaagttgaagagcccaggaaacgggaaactgtatccataatgctgaccaaatatgcagcctataacacctttcaccactgtgaacagtgccgccagtacatggacttcacctctgcctcccagatgtctgactccacccttcatgccttcacattctcttcttctatgctgggagaagaggttcagctctatttcatcattcccaaatccaaagagagtcattttgtcttcagcaagcagggcaagcacctggagagcatgcggctgcccctggtttcagacaagaatttgaatgcagtcaagagccctattttcactccttccagtggtcgacatgagcacggactcctaaaccttttccacgccatggagggcatcagccaccttcacctcctggtggtcaaagagtatgagatgcctctgtaccgcaagtactggcccaaccacatcatgctggtgcttcccggcatgttcaataatgcaggcgtgggtaaggggcccccctgggatggggagaagggcttcgaagataaactgagctccattcccctggcatgaaactttcagattcccctgcctctagaaattgtcctgccctcctcaccactcttcgg

SEQ ID NO: 8909 - DNA, 605 bp, Homo sapiens
  source 1..605: mol_type = unassigned DNA
atgtgcctgaaggaagtgtgtcaactttccactaatcacatattcagttcctttgaaattaaaagaagtttcacttagtgcctcagagatgactgcagagttggtgtcgggttacataatgaaacagtattttttcttacttgtcaggaaataacctcttacagcggtcatttctgtaaaccccactttctggaaaacaagacacactgtatcctgtcctcattgggtttttgctctgtattttgaaccaggaggacgtgggctgcgaggagaagctgtactttggcttgagtgagtacagcaagtctctgcagtgggggatcacgagcccacttctgagatgtgacgagacttttgaaaaaatggtgaacacactcttggagaggtaccccaggctgcacagcatggtcgtccgctgctatcttctcatccagcagtactctgaggccctgatggctctcaccaccatggcgtcactccgcgaccacagcacaccagaaacactcagcattatggatgacctcatcagctccccaggcaaaaacaaaagtgggaggggacacatgctcattatcagggtgccctcggtgcagctggcgatgtta

SEQ ID NO: 8910 - DNA, 568 bp, Homo sapiens
  source 1..568: mol_type = unassigned DNA
acgccagtgtgtctggcctttcatcgtcatgatggatgactcatgtgtcctatggaacattcacagtgttcaggagccatccagccagcccatggaagtaggagtttccagtaagaatgtgtccttgaagactgtcttgcagcacattgaagccacaccaaaaattgtccactatgcaatcttgggcatacagaaatggagcagcaagctgacttctcagagcctaaaggccccattctctaggtgtcacgtgcatgatttcattctcctcaacacagacttgactcagaatgtgcagtatgacttcaacaggtatttctgtgaagatgctgactttaatctgagaacaaacagtagtggcctgctcatctgccgctttaataacttcagtctcatgaagaaacatgttcaggttggagggcaaagggactttatcattaaaccaaagatcatgccatccataacttcaggagtcctgtgctggccattgactgctaccttaacattggaccagaggtggccatatgctatatcagctccagaccccactccagcaatgtcaactgtg

SEQ ID NO: 8911 - DNA, 6052 bp, Homo sapiens
  source 1..6052: mol_type = unassigned DNA
cagccgccggcggcgctagcacctcggagtcgggcggccggagcagcggagcgcagcgcggcgcagggaacggcactgggggtggggagaccagcccggccgagccgagggccaccccctggtcctctgccctcgcgccccgctagggccaggtgcacaaaaagctttaaacaagttaaaatctaggcaacagactccctgaagtgttgactgcccaacttaatcatgactgtgattcaaaaatgttaataaataaaccaaggtgtagatcatggggaattcatatgctgggcaactgaaatctgctcgatttgaggaagctctccacaactccatagaagcctccctcagatgtagtagtgtggtaccacggccaattttttcccagctatacctggaccctgaccagcatcctttctcatctgcagatgtcaaacccaaggtggaggatctggacaaagatttggtaaaccgctacactcaaaatggaagtctggatttttctaacaatctaacagttaatgaaatggaagatgatgaagacgatgaagaaatgtctgattcaaacagcccaccaattccctattcacaaaaacctgccccagaaggatcttgcactacagatggtttttgtcaagcaggaaaggatttgcgtttggtatcactgtgtatggaacaaattgacatcccagcaggattcctcctggtgggggccaagtctcccaatctgcctgaacacatcctagtttgtgctgtggacaagcgatttctaccagatgatcatggaaaaaatgcacttttagggttttctggaaattgtatcggctgtggagaaagaggatttcgatatttcacggaattttccaaccacattaacttgaagctcaccactcagccaaagaagcagaagcacttaaagtactacctagtcagaagctcccagggtgtactgtctaaaggacctcttatctgctggaaagaatgtagaagccgacaatcctctgcttcttgccactctattaagccaagctcttcagtgtcgtcaactgtgaccccagaaaatgggacaactaatggatacaaatcaggattcactcagacagatgctgctaatggaaacagtagccatggagggaagggcagtgcatccagctccactccagcccacacagggaattactctttgtcaccacgacctagctatgcatcaggagatcaagctaccatgttcatttctgggccaccaaagaaacgacaccggggatggtatcctgggtcacctctcccccaacctggcttagttgtacctgtccctacagttcgccctctttcaagaacggagccccttttatctgccccagttccacagaccccactaactggaattttacaacccaggcccattcctgcaggggaaactgtaattgttcctgaaaacctgctgagtaactcaggagttagaccagtaattctgataggctatggcactttaccctatttctatggaaatgttggtgacattgttgtgagtcctctgctggtgaattgctacaagattccacagttggaaaacaaagatttggaaaaattagggttgaccggcagccaatttctgagcgtggaaaacatgattcttctgacgatacagtatcttgtgcggctgggtcctgatcaggtacctctcagggaagaatttgagcaaattatgctgaaagctatgcaagaatttactctgagagaaagagccctgcagataggtgctcagtgtgtccctgtgtcaccaggacaactcccctggcttgctagattaattgccagcgtatctcaagacttggttcatgtggttgtgacccagaactctttggcggagggcatttcagagaccttaaggactctcagtgaaatgagacactatcaaaggctgccagattatgtggtggtaatttgtgcatcgaaaatcagaggaaatgaattttgtgtggtagtgttaggtcagcaccagtcccgagctctggcagagagcatgctcaccacaagtgagtttttgaaagaaattagttatgagcttatcacaggaaaggtcagtttcctggcatcacatttcaaaaccacatcattaggcgatgacctagacaagctgctggaaaaaatgcaacaaagaagaggagacagtgtggttacccctttcgatggagaccttaatgaatgtgtgtcaccccaggaggctgctgctatgattcccacacaaaacctggatttagataatgaaaccttccacatttatcaaccgcagctaacagttgccagaaaactcttatcccaggtgtgtgctatagcggacagtggcagccagagcctggacctcggtcacttcagcaaagtagacttcatcatcattgttcccagatcggaggtgttggttcagcaaactcttcagcggattcgacaatcaggtgtccttgtagacttgggtctggaggaaaatgggacagcccatcagagagcagaaaaatatgttgttcgtctagacaatgagattcaaaccaagtttgaagtttttatgaggagagtgaaacagaacccgtacacactgtttgtgctagttcatgacaactcccatgtggaactaacgagtgtcatttcaggctctttgtcacatagcgaacccagtcatgggctagctgatagagtcattaattgcagagaagttctggaagctttcaacctcctggtgctccaggtcagctccttcccatacactctgcagacccaacagtcccgcattagctctagcaatgaggttcactggatacagctggatactggggaggacgtgggctgcgaggagaagctgtactttggcttgagtgagtacagcaagtctctgcagtgggggatcacgagcccacttctgagatgtgacgagacttttgaaaaaatggtgaacacactcttggagaggtaccccaggctgcacagcatggtcgtccgctgctatcttctcatccagcagtactctgaggccctgatggctctcaccaccatggcgtcactccgcgaccacagcacaccagaaacactcagcattatggatgacctcatcagctccccaggcaaaaacaaaagtgggaggggacacatgctcattatcagggtgccctcggtgcagctggcgatgttagccaaggagcggctacaggaggtgcgcgacaaactgggtctgcagtatcggtttgagatcatccttgggaacccggccaccgaactcagtgttgcaactcactttgtggcgcgattaaagagttggagaggaaatgaaccagaagagtggatccctcggacataccaagatttagacggtctaccttgtattgtgatattaactggcaaagatcctcttggagaaacctttcccaggtctttgaagtactgtgacctccggttaattgactcaagctatttaactcgcacggccttggagcaggaggtgggtctggcatgctgctatgtctcaaaagaggtcatccggggacccactgttgccctggacctcagcgggaaggagcaggagagagctgctgtcagtgagaatgactccgatgagctgctcatcgacctggagcggccccagagcaacagcagcgctgtcacagggacctcgggttccatcatggagaatggagtgagctcttccagcacagctgacaagtcccagaagcagtccctgacccccagctttcagagcccagccaccagcttggggctggatgaaggggtctccgccagctcagctggagccggagccggggagactctgaagcaggaatgtgactccctgggcccccagatggcgagcagcaccacctccaagccgtcatcatcatcctcaggacccaggaccctcccatggccgggacagcccatcagaggctgccggggcccacaggcagccctgccaccagtggtgatcctatccaaagcggcctacagtctcctgggctcccagaagagtggcaagctgccatcctcctcctccctgctgccccacgccgacgtggcctgggtgagctccctgcggccactcctgaacaaggacatgagcagtgaggagcagtccctctactacaggcagtggaccttggcccggcagcaccacgctgactatagcaaccagctggacccggcctctggcacccgaaacttccacccccgacggctcctgctgacagggcccccacaggtgggaaagacgggctcctatttacagttcctcaggatcctcttccgcatgctcatcaggctcctggaggtggacgtgtatgatgaggaggagatcaacaccgatcacaatgaaagcagtgaagtgagccagtcagagggagagccctggcctgacatcgagagcttcagtaaaatgccttttgatgtcagtgtgcatgaccccaagtacagtttgatgagcctggtgtatactgagaagctggcaggggtcaaacaagaagtgataaaggaatccaaagttgaagagcccaggaaacgggaaactgtatccataatgctgaccaaatatgcagcctataacacctttcaccactgtgaacagtgccgccagtacatggacttcacctctgcctcccagatgtctgactccacccttcatgccttcacattctcttcttctatgctgggagaagaggttcagctctatttcatcattcccaaatccaaagagagtcattttgtcttcagcaagcagggcaagcacctggagagcatgcggctgcccctggtttcagacaagaatttgaatgcagtcaagagccctattttcactccttccagtggtcgacatgagcacggactcctaaaccttttccacgccatggagggcatcagccaccttcacctcctggtggtcaaagagtatgagatgcctctgtaccgcaagtactggcccaaccacatcatgctggtgcttcccggcatgttcaataatgcaggcgtgggtgctgccaggttcctcatcaaggagctatcatatcacaacctagaattggagagaaaccgcctggaggagctaggcattaaacgccagtgtgtctggcctttcatcgtcatgatggatgactcatgtgtcctatggaacattcacagtgttcaggagccatccagccagcccatggaagtaggagtttccagtaagaatgtgtccttgaagactgtcttgcagcacattgaagccacaccaaaaattgtccactatgcaatcttgggcatacagaaatggagcagcaagctgacttctcagagcctaaaggccccattctctaggtgtcacgtgcatgatttcattctcctcaacacagacttgactcagaatgtgcagtatgacttcaacaggtatttctgtgaagatgctgactttaatctgagaacaaacagtagtggcctgctcatctgccgctttaataacttcagtctcatgaagaaacatgttcaggttggagggcaaagggactttatcattaaaccaaagatcatggtgtcagagagcttagcacccatcttgccccttcaatacatctgtgctcccgacagtgaacacacactactggcagcccctgcacagtttctcctggagaaattccttcagcacgcctcatataaactcttccccaaagccatccataacttcaggagtcctgtgctggccattgactgctaccttaacattggaccagaggtggccatatgctatatcagctccagaccccactccagcaatgtcaactgtgaaggggtgtttttcagtggactccttttgtacctctgtgactcttttgtaggtgctgatcttaagaaatttaaatttctaaaaggtgctacactgtgtgtcatctgccaagacagaagttccttgcgccaaacaattgtccgcttagagctagaagatgagtggcagttccgcctccgggacgagtttcaaactgctaacagcagtgatgacaagcctctctactttcttactggacgtcatgtatgagcttttgaa

SEQ ID NO: 8912 - DNA, 564 bp, Homo sapiens
  source 1..564: mol_type = unassigned DNA
agagcgagaaaagcaaacccaacccgtcggggccgccgctccggacccgcagccgccgccgccgcctcctccccccggatcgggtgtactgtcccaacccgaaagtccagttctgcggcccggcagcggcgagcgggcgcgatgacacaggagtacgacaacaaacggccagtgttggttcttcagaatgaagcactttatccacagcggcggtcctacactagtgaggatgaggcctggaaatccttcctggaaaaccctctcactgcagcgaccaaagcgatgatgagcatcaatggagatgaagacagcgccgctgcgctgggcctgctctatgactactacaaggttccaagagagagaaggtcatcaacagcaaagccagaggtggagcaccctgagccagatcacagcaaaaggtaacattcagtgcctaacagcataaagagtgcagggggaaatgccacgtttctgtaacagcaaaatgggagtttgtttaaatgaacaaccactagtgaaagagatagaaacagcataccaattgtgacagagcagcccctcatc

SEQ ID NO: 8913 - DNA, 5400 bp, Homo sapiens
  source 1..5400: mol_type = unassigned DNA
agagcgagaaaagcaaacccaacccgtcggggccgccgctccggacccgcagccgccgccgccgcctcctccccccggatcgggtgtactgtcccaacccgaaagtccagttctgcggcccggcagcggcgagcgggcgcgatgacacaggagtacgacaacaaacggccagtgttggttcttcagaatgaagcactttatccacagcggcggtcctacactagtgaggatgaggcctggaaatccttcctggaaaaccctctcactgcagcgaccaaagcgatgatgagcatcaatggagatgaagacagcgccgctgcgctgggcctgctctatgactactacaaggttccaagagagagaaggtcatcaacagcaaagccagaggtggagcaccctgagccagatcacagcaaaaggtaacattcagtgcctaacagcataaagagtgcagggggaaatgccacgtttctgtaacagcaaaatgggagtttgtttaaatgaacaaccactagtgaaagagataggtaagttggactcttactatctaaattcagatttcatcactgatttgcctctgttgctctgaaatttccttttttctttgggcgtagtagttgccttttctaggatgaaagcactaacattctcctcctccaaagggatagttttagtaataacttcagtatttgcttatttgtttttgaggttttctttagaaggatgtgtggcagtggtctattaaaaaaattaagcaccagtgactcttgaacaactgcctgagtaaaattgaataaagcaagttaaattgtattcaaattcctgttgaaattatttgtgaaatattttagattaaaactttcagaaaatttaattaacgtttggctagccatgaaaaactttaaaaagacaccttttaaattgtcttgtgttttattatcaatcaaggaatgaaacatatttaaaggaagaatgatcatcacccagtatcccattatcgtgatgattgctttattcattgttttgatgtgtatgcaaattttatgtagcgtagttgtgttcacagataggatttggtagtgtactttcttctacttagtttgtttcataaacattttctctgtattttaatcttcataattatcctttggaagaggacttgtggcttttatcttttacttttcattatgggcattttcaaacataataaaaatagaaaaacagtataagcccacatgtatccatgaccagcctcaacagttatcaacacaattcctcttgtttgatttgttcttccctcttcttcaactttgagattaattcatgtttttattttatttatttttgctggaacattctgaagcaaactgtaaatatccttacaattgctgctatatctagttttcactattaagaagtcttaaggaacaactttctagactttttccgttttaggataaattcctgggagtgaatttatggttcagggttcaaacagttttattgatcttgaaatgtacagaattctcaatttgcctgtttcttgaagcttcagcctatatgatttctgggggctttgaaaattcattcattttacccactggaaatcatcttgtattgctcaaattatttatcaaaccaaaatttaattttataaaaagcagatgtgtctactgatgcaatgtaacaataggttttcttgggtgaaagagaaagccaggcccggcacagtggctcatgcctgtaatcgcagcgctttgggaggctgaggcaggtggatcacctgaggtcaggagttcgagaccagcctggccaacatggtaaaacccagtctctactaaaaatacaaaaattagccaagtgtggtggcgtgcgcctgtaatcccagctactcgggaggctgaggtgggagaatcgcttgaacccgggaggcggaggttgcagtgagcctagatcacgccattgcacaccagcctgggccataagggcaagactctgtctcaaaaaaataaaaaattaaaaaaaaaaaaaggagaaagccaaatggcataggtggtaggaaaagtggtgaccaagtaataatagctcatacttcttgaagactgtgtgtcaggcattattatacaccttttagtgtatcatctcatctcaacctgatgagaatggatgccattattgtccccattttgcagatgaggattcagttactaagagatgaagtaacttgctcaggtgacacagaacttgaacccaggcaatttgaccctggcgtctatgctgtaaccccagttgatcagatcgcatagcttcaggtttctagtaaaacacagtaattgtttttaggattatggaaagtaaagcttgttagaggagagctctgagcccttagtatttcgaatgaaattttacttaataggtttggattttatttgaccgataaccagaaagcctttttccctttatctagtaatgggtagttttgatgttttctgtttattctgtcaagtgttattgcacaggacccaacagcccaatgccattaggaaaataaaaattgtcaaagaactacatcagcatcgcgtttgaaagcagttttcttttcttaaagaaacagcataccaattgtgacagagcagcccctcatctctgctggagaaaacagagtgcaagtactgaaaaatgtgccatttaacattgtccttccccatggcaaccagctgggcattgataagagaggccatctgacagctccagatacgacagtcactgtctccatagcaacgatgcctacccactccatcaagacagaaacccagccacatggcttcgctgtgggaatccccccagcagtgtatcatcctgagcccactgagcgggtggtggttttcgatcggaatctcaatactgaccagttcagctctggtgctcaagccccaaatgctcaaaggcgaactccagactcgaccttctcagagaccttcaaggaaggcgttcaggaggttttcttcccctcggatctcagtctgcggatgcctggcatgaattcagaggactatgtttttgacagtgtttctgggaacaactttgaatataccctagaagcttcaaaatcacttcgacagaagccaggagacagtaccatgacgtacctgaacaaaggccagttctatcccatcaccttgaaggaggtgagcagcagtgaaggaatccatcatcccatcagcaaagttcgaagtgtgatcatggtggtttttgctgaagacaaaagcagagaagatcagttaaggcattggaagtactggcactcccggcagcacaccgctaaacaaagatgcattgacataggtaagcagctcaagagcccgcttttattcccagaggtgcagccatccagttttctaaatccaattatttttggcagtgatcagcttcctgccgaaagcatttgaatttttatgccagctactgatctgttccaaacactgtcctcggcctcctggaaccagtgctctcaccattgctcccatgcagtaatgggacatgtgcccacgtggtggctttccacaggacactagggccagaagccatgtagctggctaacctgagaatgtccccactgttcagtctgcaattgctttaaggggtaatatcttctttaaaagattctgattattatttggagatgatggaggtagagaaaaaaacaagtaaaagaaagatattgctgctgtgcagttgcctaacagtcttccctagtcacgtgctaaaccgtgtaactaacctctctgtgggctgtagtggcaaacctgtgcaaatctgtatttactgaagtagcgttacacagacctctgttcttgccatgtatgtaattttcatgtaaaaccattgtctgtatcacagatggctgtttaatattagtgttactttttttctttaccttttgtaatgctcttgtttccttttcaggagaatgagaactcagttctaatcttggttctacagagtagttttgtgaccttgggactgttatttaaactttttagacttaaatttcctaattgtgacataatgagattgaattaaatatgtctaagcttgcctctattacaaaaactctgtgattctttttcttcgtattttgaacttcttctaatcgaacaaaatgttaatttaaattgtccagaggtgataatgctaaaaactagatcttattttgaactgctgggatcccatgttgaaactaagactcatgagttttcattttctcttccaccgcttcctgtagctgactataaagaaagcttcaacactatcagtaacatcgaggagattgcgtataacgccatttccttcacatgggacatcaacgatgaagcaaaggtgggtggtgaggtctgggcgccttatgtccagccatttgagaaatgggaggagtttaatgatttgacaactgatttttttttttttcacagttttatgtgtttcattctcaggtgttatgaaactatcctcttccctttttattctcccctcctccaaaacagatcatttttgttgccatcctttgcacagagtccagtgtgtgaaacattgagattaagttgcactctgccactcctgcctgttcagccttgagtctgactcctcatttgctttgcctcatttcctcatttgcacagtggaggtgatatctgtctcctccctctattgaaggaggtgtaaggagtaatgaaacaatgcccatcaaactgttggagtggctttgagaaaggctcttaaatataagtgattattagtagtactctgtttcatatcatcaccttgtaaatatgactctgtgttaagattcttctgtcttgggcttttcccattgaagagttgcctccagttcagttggagtaactctaattggctagagttactccttgtgggcgactctaatgggaatttttgtgcccttgaagaaaaattcagcatattcctaagtcctttctgccttgcccctgccttcttccctgtgagtgtgatccttctccactcaattattagagttcctgtatttctttctttctttggattactttaaaaactgggagctcaagaaactgaatagaggccagaagtggtggctcacacttgtaatcccagcactttgggaggctgcggcgggtgggtcacttgaggccaggagtttgagaccagcctggccaacatggtgaaaccctgtctctactaaaaatacaaaaagtagccaggcgtggtggcacacgcttctaatcccagctactctggaggttgaggcaggagaatcgcttgaacccgggagacgggggttacagtgagctgagatcacgccactgcactccagcctaggcaacagagtgagaccctgtccccccc

SEQ ID NO: 8914 - DNA, 2099 bp, Homo sapiens
  source 1..2099: mol_type = unassigned DNA
agagcgagaaaagcaaacccaacccgtcggggccgccgctccggacccgcagccgccgccgccgcctcctccccccggatcgggtgtactgtcccaacccgaaagtccagttctgcggcccggcagcggcgagcgggcgcgatgacacaggagtacgacaaaatatgcagttaaattattgcctgaaacatatttcagaagtctgagagatcgcagacgcggagtttaaggctcacctgaaagtgatgatgagccttcggcgactgaagcctacttcctgactgtcatgaggaagtggactaagaaaggcaactgcaaacggccagtgttggttcttcagaatgaagcactttatccacagcggcggtcctacactagtgaggatgaggcctggaaatccttcctggaaaaccctctcactgcagcgaccaaagcgatgatgagcatcaatggagatgaagacagcgccgctgcgctgggcctgctctatgactactacaaggttccaagagagagaaggtcatcaacagcaaagccagaggtggagcaccctgagccagatcacagcaaaagaaacagcataccaattgtgacagagcagcccctcatctctgctggagaaaacagagtgcaagtactgaaaaatgtgccatttaacattgtccttccccatggcaaccagctgggcattgataagagaggccatctgacagctccagatacgacagtcactgtctccatagcaacgatgcctacccactccatcaagacagaaacccagccacatggcttcgctgtgggaatccccccagcagtgtatcatcctgagcccactgagcgggtggtggttttcgatcggaatctcaatactgaccagttcagctctggtgctcaagccccaaatgctcaaaggcgaactccagactcgaccttctcagagaccttcaaggaaggcgttcaggaggaacaactttgaatataccctagaagcttcaaaatcacttcgacagaagccaggagacagtaccatgacgtacctgaacaaaggccagttctatcccatcaccttgaaggaggtgagcagcagtgaaggaatccatcatcccatcagcaaagttcgaagtgtgatcatggtggtttttgctgaagacaaaagcagagaagatcagttaaggcattggaagtactggcactcccggcagcacaccgctaaacaaagatgcattgacatagctgactataaagaaagcttcaacactatcagtaacatcgaggagattgcgtataacgccatttccttcacatgggacatcaacgatgaagcaaaggttttcatctctgtgaactgcttaagcacagatttctcttcccagaagggagtgaaggggttgcctcttaacattcaagttgatacctatagttacaacaaccgcagcaacaagcctgtgcaccgggcctactgccagatcaaggtcttctgtgacaagggagctgagcggaaaatcagggatgaagaacgaaagcaaagcaaaagaaaagtttctgatgttaaagtgccactgcttccctctcacaagcgaatggatatcacagttttcaaacccttcattgatctcgatactcagcctgtcctcttcattcctgacgtgcactttgccaacttgcagcggggcactcatgtccttcccattgcctctgaagaattggagggtgaaggctctgtcttgaaaagggggccgtacggcacagaagatgactttgctgtccctccttctaccaagctggcccggatagaagaaccaaagagagtgctgctctacgttcgaaaggagtcagaagaagtctttgatgccctgatgctcaaaaccccatctttgaagggcttgatggaagctatctcagacaaatacgatgttccccatgacaagattgggaaaatattcaagaagtgtaaaaaggggatcctggtgaacatggacgacaacattgtgaagcattactccaatgaggacaccttccagctgcagattgaagaagccggggggtcttacaagctcaccctgacggagatctaaaggcctgcgggccacagctcccca

SEQ ID NO: 8915 - DNA, 3563 bp, Homo sapiens
  source 1..3563: mol_type = unassigned DNA
gagaaaagcaaacccaacccgtcggggccgccgctccggacccgcagccgccgccgccgcctcctccccccggatcgggtgtactgtcccaacccgaaagtccagttctgcggcccggcagcggcgagcgggcgcgatgacacaggagtacgacaacaaacggccagtgttggttcttcagaatgaagcactttatccacagcggcggtcctacactagtgaggatgaggcctggaaatccttcctggaaaaccctctcactgcagcgaccaaagcgatgatgagcatcaatggagatgaagacagcgccgctgcgctgggcctgctctatgactactacaaggttccaagagagagaaggtcatcaacagcaaagccagaggtggagcaccctgagccagatcacagcaaaagaaacagcataccaattgtgacagagcagcccctcatctctgctggagaaaacagagtgcaagtactgaaaaatgtgccatttaacattgtccttccccatggcaaccagctgggcattgataagagaggccatctgacagctccagatacgacagtcactgtctccatagcaacgatgcctacccactccatcaagacagaaacccagccacatggcttcgctgtgggaatccccccagcagtgtatcatcctgagcccactgagcgggtggtggttttcgatcggaatctcaatactgaccagttcagctctggtgctcaagccccaaatgctcaaaggcgaactccagactcgaccttctcagagaccttcaaggaaggcgttcaggaggttttcttcccctcggatctcagtctgcggatgcctggcatgaattcagaggactatgtttttgacagtgtttctgggaacaactttgaatataccctagaagcttcaaaatcacttcgacagaagccaggagacagtaccatgacgtacctgaacaaaggccagttctatcccatcaccttgaaggaggtgagcagcagtgaaggaatccatcatcccatcagcaaagttcgaagtgtgatcatggtggtttttgctgaagacaaaagcagagaagatcagttaaggcattggaagtactggcactcccggcagcacaccgctaaacaaagatgcattgacatagctgactataaagaaagcttcaacactatcagtaacatcgaggagattgcgtataacgccatttccttcacatgggacatcaacgatgaagcaaaggttttcatctctgtgaactgcttaagcacagatttctcttcccagaagggagtgaaggggttgcctcttaacattcaagttgatacctatagttacaacaaccgcagcaacaagcctgtgcaccgggcctactgccagatcaaggtcttctgtgacaagggagctgagcggaaaatcagggatgaagaacgaaagcaaagcaaaagaaaagtttctgatgttaaagtgccactgcttccctctcacaagcgaatggatatcacagttttcaaacccttcattgatctcgatactcagcctgtcctcttcattcctgacgtgcactttgccaacttgcagcggggcactcatgtccttcccattgcctctgaagaattggagggtgaaggctctgtcttgaaaagggggccgtacggcacagaagatgactttgctgtccctccttctaccaagctggcccggatagaagaaccaaagagagtgctgctctacgttcgaaaggagtcagaagaagtctttgatgccctgatgctcaaaaccccatctttgaagggcttgatggaagctatctcagacaaatacgatgttccccatgacaagattgggaaaatattcaagaagtgtaaaaaggggatcctggtgaacatggacgacaacattgtgaagcattactccaatgaggacaccttccagctgcagattgaagaagccggggggtcttacaagctcaccctgacggagatctaaaggcctgcgggccacagctccccaggagttcagtgcaggtgtttctagatcttacggtttggcaactgcaggtaaccccagtcagccatgtcgccagcacaggtctatgtcgagggaatgggttccttgcaggttggaggcggggctgcatctggcttggtggtagcatttaatctattgcattggtgtttttcagatgaaagagaaatccatataccattatgtttgaatttcctgatatatacaggatttaaagtgaaaactttattccaagagttaacagagtctctgggaagctttaggacatctgctacgttatttatcaaaatattgggatctctgccttgtgcctacagtgtcgtgggcctgctcgctagcagaagtcagaaaaggcgataggcttggctttaaggatttcgtgcccttgcctgaattcagtacaactccactgcctcacgttagcgggagcgcacctgaagagtacggggggagccctctctcccttaccctctcactctccaccagatgtttactaaacagggcatgttactgaaatcttcctttgcgactttctcggacatatcaactgcctttctcatgaagaattttaatgggttacagtatgaaatcagttaagataaagctgcattgtatataagtgcaatatatttttgaaggtctgtaaatgtgtacatacatgtcttatataaatatataatatataaatatggtgtctgtgtacatatagtgaagatatgcagtaagagctaccttaaagactttccctagacaaaggttaagttattttttgatcgtgtataccaagcagatagaatactgtgcttagtggaacccgctaaaaacctttttctctgtttttccaaacacaggcattctgtagcatagcaaaaccttctcaaatgacagagattctgtttgctgttgagaatgttgttatttggatttctgcactgtttaacaaatgaagtaaaagaaaaacactactgcaatcacgtcttttgttatgctagtatcagtcagatgcacttagagtgaagaaacactgtaattacagcacacagattgcaagtattgcgtaccaagtgatacaactcgaaatgcagttctcatcttcctgttttgagaaatgattattttatcacgcatcagagccttcgtgctttgattatcttgtatgttaacaattctagaaaacattcatgaattcacaaaaatatgttactatggcaggggaacattttgtacacatttaagtatataaaaatactaaaatatgtaattttataacaaagtcacgggtatctttaggttcagggaactagactaggtcattcgtgtaaatggactggtagttacagtcttaggttaaagtattctaatgaagtatgggaactaaattgctggttttctaagataagatatgggatatgggtcatataacttttgtattttttatgaagttgattttgtcttgcgtgttatttttaattgtatcattgaagatgtattttaaaccaaaggaattaaattttatatgtctatttcgtaa

SEQ ID NO: 8916 - DNA, 2060 bp, Homo sapiens
  source 1..2060: mol_type = unassigned DNA
tgtcccaacccgaaagtccagttctgcggcccggcagcggcgagcgggcgcgatgacacaggagtacgacaacaaacggccagtgttggttcttcagaatgaagcactttatccacagcggcggtcctacactagtgaggatgaggcctggaaatccttcctggaaaaccctctcactgcagcgaccaaagcgatgatgagcatcaatggagatgaagacagcgccgctgcgctgggcctgctctatgactactacaaggttccaagagagagaaggtcatcaacagcaaagccagaggtggagcaccctgagccagatcacagcaaaagaaacagcataccaattgtgacagagcagcccctcatctctgctggagaaaacagagtgcaagtactgaaaaatgtgccatttaacattgtccttccccatggcaaccagctgggcattgataagagaggccatctgacagctccagatacgacagtcactgtctccatagcaacgatgcctacccactccatcaagacagaaacccagccacatggcttcgctgtgggaatccccccagcagtgtatcatcctgagcccactgagcgggtggtggttttcgatcggaatctcaatactgaccagttcagctctggtgctcaagccccaaatgctcaaaggcgaactccagactcgaccttctcagagaccttcaaggaaggcgttcaggaggttttcttcccctcggatctcagtctgcggatgcctggcatgaattcagaggactatgtttttgacagtgtttctgggaacaactttgaatataccctagaagcttcaaaatcacttcgacagaagccaggagacagtaccatgacgtacctgaacaaaggccagttctatcccatcaccttgaaggaggtgagcagcagtgaaggaatccatcatcccatcagcaaagttcgaagtgtgatcatggtggtttttgctgaagacaaaagcagagaagatcagttaaggcattggaagtactggcactcccggcagcacaccgctaaacaaagatgcattgacatagctgactataaagaaagcttcaacactatcagtaacatcgaggagattgcgtataacgccatttccttcacatgggacatcaacgatgaagcaaaggttttcatctctgtgaactgcttaagcacagatttctcttcccagaagggagtgaaggggttgcctcttaacattcaagttgatacctatagttacaacaaccgcagcaacaagcctgtgcaccgggcctactgccagatcaaggtcttctgtgacaagggagctgagcggaaaatcagggatgaagaacgaaagcaaagcaaaagaaaaggcaagtgtcctgaccccagctcccagtttctgatgttaaagtgccactgcttccctctcacaagcgaatggatatcacagttttcaaacccttcattgatctcgatactcagcctgtcctcttcattcctgacgtgcactttgccaacttgcagcggggcactcatgtccttcccattgcctctgaagaattggagggtgaaggctctgtcttgaaaagggggccgtacggcacagaagatgactttgctgtccctccttctaccaagctggcccggatagaagaaccaaagagagtgctgctctacgttcgaaaggagtcagaagaagtctttgatgccctgatgctcaaaaccccatctttgaagggcttgatggaagctatctcagacaaatacgatgttccccatgacaagattgggaaaatattcaagaagtgtaaaaaggggatcctggtgaacatggacgacaacattgtgaagcattactccaatgaggacaccttccagctgcagattgaagaagccggggggtcttacaagctcaccctgacggagatctaaaggcctgcgggccacagctccccaggagttcagtgcaggtgtttctagatcttacggtttggcaactgcaggtaaccccagtcagccatgtcgccagcacaggtctatgtcgagggaatgggttc

SEQ ID NO: 8917 - DNA, 780 bp, Homo sapiens
  source 1..780: mol_type = unassigned DNA
cagcccaatgccattaggaaaataaaaattgtcaaagaactacatcagcatcgcgtttgaaagcagttttcttttcttaaagaaacagcataccaattgtgacagagcagcccctcatctctgctggagaaaacagagtgcaagtactgaaaaatgtgccatttaacattgtccttccccatggcaaccagctgggcattgataagagaggccatctgacagctccagatacgacagtcactgtctccatagcaacgatgcctacccactccatcaagacagaaacccagccacatggcttcgctgtgggaatccccccagcagtgtatcatcctgagcccactgagcgggtggtggttttcgatcggaatctcaatactgaccagttcagctctggtgctcaagccccaaatgctcaaaggcgaactccagactcgaccttctcagagaccttcaaggaaggcgttcaggaggttttcttcccctcggatctcagtctgcggatgcctggcatgaattcagaggactatgtttttgacagtgtttctgggaacaactttgaatataccctagaagcttcaaaatcacttcgacagaagccaggagacagtaccatgacgtacctgaacaaaggccagttctatcccatcaccttgaaggaggtgagcagcagtgaaggaatccatcatcccatcagcaaagttcgaagtgtgatcatggtggtttttgctgaagacaaaagcagagaagatcagttaaggcattggaagtactggcact

SEQ ID NO: 8918 - DNA, 572 bp, Homo sapiens
  source 1..572: mol_type = unassigned DNA
agacagccaggcgtggtggatcatgcctataattccagcactttgggaggccaagctctgtcttgaaaagggggccgtacggcacagaagatgactttgctgtccctccttctaccaagctggcccggatagaagaaccaaagagagtgctgctctacgttcgaaaggagtcagaagaagtctttgatgccctgatgctcaaaaccccatctttgaagggcttgatggaagctatctcagacaaatacgatgttccccatgacaagattgggaaaatattcaagaagtgtaaaaaggggatcctggtgaacatggacgacaacattgtgaagcattactccaatgaggacaccttccagctgcagattgaagaagccggggggtcttacaagctcaccctgacggagatctaaaggcctgcgggccacagctccccaggagttcagtgcaggtgtttctagatcttacggtttggcaactgcaggtaaccccagtcagccatgtcgccagcacaggtctatgtcgagggaatgggttccttgcaggttggaggcggggctgcatctggcttg

SEQ ID NO: 8919 - DNA, 1881 bp, Homo sapiens
  source 1..1881: mol_type = unassigned DNA
ataagagaggccatctgacagctccagatacgacagtcactgtctccatagcaacgatgcctacccactccatcaagacagaaacccagccacatggcttcgctgtgggaatccccccagcagtgtatcatcctgagcccactgagcgggtggtggttttcgatcggaatctcaatactgaccagttcagctctggtgctcaagccccaaatgctcaaaggcgaactccagactcgaccttctcagagaccttcaaggaaggcgttcaggaggaacaactttgaatataccctagaagcttcaaaatcacttcgacagaagccaggagacagtaccatgacgtacctgaacaaaggccagttctatcccatcaccttgaaggaggtgagcagcagtgaaggaatccatcatcccatcagcaaagttcgaagtgtgatcatggtggtttttgctgaagacaaaagcagagaagatcagttaaggcattggaagtactggcactcccggcagcacaccgctaaacaaagatgcattgacatagctgactataaagaaagcttcaacactatcagtaacatcgaggagattgcgtataacgccatttccttcacatgggacatcaacgatgaagcaaaggttttcatctctgtgaactgcttaagcacagatttctcttcccagaagggagtgaaggggttgcctcttaacattcaagttgatacctatagttacaacaaccgcagcaacaagcctgtgcaccgggcctactgccagatcaaggtcttctgtgacaagggagctgagcggaaaatcagggatgaagaacgaaagcaaagcaaaagaaaagtttctgatgttaaagtgccactgcttccctctcacaagcgaatggatatcacagttttcaaacccttcattgatctcgatactcagcctgtcctcttcattcctgacgtgcactttgccaacttgcagcggggcactcatgtccttcccattgcctctgaagaattggagggtgaaggctctgtcttgaaaagggggccgtacggcacagaagatgactttgctgtccctccttctaccaagctggcccggatagaagaaccaaagagagtgctgctctacgttcgaaaggagtcagaagaagtctttgatgccctgatgctcaaaaccccatctttgaagggcttgatggaagctatctcagacaaatacgatgttccccatgacaagattgggaaaatattcaagaagtgtaaaaaggggatcctggtgaacatggacgacaacattgtgaagcattactccaatgaggacaccttccagctgcagattgaagaagccggggggtcttacaagctcaccctgacggagatctaaaggcctgcgggccacagctccccaggagttcagtgcaggtgtttctagatcttacggtttggcaactgcaggtaaccccagtcagccatgtcgccagcacaggtctatgtcgagggaatgggttccttgcaggttggaggcggggctgcatctggcttggtggtagcatttaatctattgcattggtgtttttcagatgaaagagaaatccatataccattatgtttgaatttcctgatatatacaggatttaaagtgaaaactttattccaagagttaacagagtctctgggaagctttaggacatctgctacgttatttatcaaaatattgggatctctgccttgtgcctacagtgtcgtgggcctgctcgctagcagaagtcagaaaaggcgataggcttggctttaaggatttcgtgcccttgcctgaattcagtacaactccactgcctcacgttagcgggagcgcacctgaagagtacggggggagccctct

SEQ ID NO: 8920 - DNA, 2069 bp, Homo sapiens
  source 1..2069: mol_type = unassigned DNA
aaaaactgtattctgtggcggctagtggctgctgctttgcatttaacactactatcctgaacacagctgatctctctacaggttatttcagcagaagccctggtctaggagagtctatgaagttccagcttacaccagacatgaccagcatccagaaagacctgaaagaagcttgaatcctctcactagaatccctgcaaaatgactcatgtaattgctctgtggggattatttccaaaccagcagtcacaggaacatgctgcttttagatttgctttgtcgcaactcacagagcccccgaagctgctcccccagattgatattgtgaacatcagcgacagctttgagatgacctatagattctgttcccagttctccaaaggagtctatgccatctttgggttttatgaacgtaggactgtcaacatgctgacctccttttgtggggccctccacgtctgcttcattacgccgagctttcccgttgatacatccaatcagtttgtccttcagctgcgccctgaactgcaggatgccctcatcagcatcattgaccattacaagtggcagaaatttgtctacatttatgatgccgaccggggcttatccgtcctgcagaaagtcctggatacagctgctgagaagaactggcaggtgacagcagtcaacattttgacaaccacagaggagggataccggatgctctttcaggacctggagaagaaaaaggagcggctggtggtggtggactgtgaatcagaacgcctcaatgctatcttgggccagattataaagctagagaagaatggcatcggctaccactacattcttgcaaatctgggcttcatggacattgacttaaacaaattcaaggagagtggcgccaatgtgacaggtttccagctggtgaactacacagacactattccggccaagatcatgcagcagtggaagaatagtgatgctcgagaccacacacgggtggactggaagagacccaagtacacctctgcgctcacctacgatggggtgaaggtgatggctgaggctttccagagcctgcggaggcagagaattgatatatctcgccgggggaatgctggggattgtctggctaacccagctgttccctggggccaagggatcgacatccagagagctctgcagcaggtgcgatttgaaggtttaacaggaaacgtgcagtttaatgagaaaggacgccggaccaactacacgctccacgtgattgaaatgaaacatgacggcatccgaaagattggttactggaatgaagatgataagtttgtccctgcagccaccgatgcccaagctgggggcgataattcaagtgttcagaacagaacatacatcgtcacaacaatcctagaagatccttatgtgatgctcaagaagaacgccaatcagtttgagggcaatgaccgttacgagggctactgtgtagagctggcggcagagattgccaagcacgtgggctactcctaccgtctggagattgtcagtgatggaaaatacggagcccgagaccctgacacgaaggcctggaatggcatggtgggagagctggtctatggaagagcagatgtggctgtggctcccttaactatcactttggtccgggaagaagttatagatttctccaaaccatttatgagtttggggatctccatcatgattaaaaaaccacagaaatccaagccgggtgtcttctccttccttgatcctttggcttatgagatttggatgtgcattgtttttgcctacattggagtgagtgttgtcctcttcctggtcagccgcttcagtccctatgaatggcacagtgaagagtttgaggaaggacgggaccagacaaccagtgaccagtccaatgagtttgggatattcaacagtttgtggttctccctgggagccttcatgcagcaaggatgtgacatttctcccaggtcagtcagctcttctcaatccctttgcctaatgctatggttttgtttgtttgtttgtttgtttgttttttaaatactgaaaagtaaagagatgaattatttcag

SEQ ID NO: 8921 - DNA, 362 bp, Homo sapiens
  source 1..362: mol_type = unassigned DNA
tgacttacagctgaacccacattcccagcagcttcagcctgggggctgggggagcgggcagaccgagctcagaaaggcaggggagggtaaagaggactgtggggttgcccctttcaggaccaagtgccacgtgtcacacacccccacctccacctttctgcacacacagaaaggaggataaggcgcggtagtaggtgccaatttccccaacaatatccagatcgggggattatttccaaaccagcagtcacaggaacatgctgcttttagatttgctttgtcgcaactcacagagcccccgaagctgctcccccagattgatattgtgaacatcagcgacagctttgagatgacctatagat

SEQ ID NO: 8922 - DNA, 586 bp, Homo sapiens
  source 1..586: mol_type = unassigned DNA
aggtcggctgtggaactccaagctagctcgggggattatttccaaaccagcagtcacaggaacatgctgcttttagatttgctttgtcgcaactcacagagcccccgaagctgctcccccagattgatattgtgaacatcagcgacagctttgagatgacctatagattctgttcccagttctccaaaggagtctatgccatctttgggttttatgaacgtaggactgtcaacatgctgacctccttttgtggggccctccacgtctgcttcattacgccgagctttcccgttgatacatccaatcagtttgtccttcagctgcgccctgaactgcaggatgccctcatcagcatcattgaccattacaagtggcagaaatttgtctacatttatgatgccgaccggggcttatccgtcctgcagaaagtcctggatacagctgctgagaagaactggcaggtgacagcagtcaacattttgacaaccacagaggagggataccggatgctctttcaggacctggagaagaaaaaggagcggctggtggtggtggactgtgaatcagaacgcctcaatgctatctt

SEQ ID NO: 8923 - DNA, 5708 bp, Homo sapiens
  source 1..5708: mol_type = unassigned DNA
gtgtgagggggagagcgagagagagcaagggagggagagagaggcaggctgcgaggggagaggagagggagtgggggagccagcgctccagctagcatgaggacgggcttcttttcccgtgctcagttaatctggctgtcagttggtgttaacgctgcagtttaagtgttcggattccaagggaaacagacaaacctcacgaaaggaaggaagcaagcaagcaaggaaggaactgcaggaggaaaagaacaggcagaacagcgagaagaataaagggaaagggggggaaacaccaaatctatgattggacctgggcttctttttcgccaatgcaaaaaggaatatgcagcacatttttgccttcttctgcaccggtttcctaggcgcggtagtaggtgccaatttccccaacaatatccagatcgggggattatttccaaaccagcagtcacaggaacatgctgcttttagatttgctttgtcgcaactcacagagcccccgaagctgctcccccagattgatattgtgaacatcagcgacagctttgagatgacctatagattctgttcccagttctccaaaggagtctatgccatctttgggttttatgaacgtaggactgtcaacatgctgacctccttttgtggggccctccacgtctgcttcattacgccgagctttcccgttgatacatccaatcagtttgtccttcagctgcgccctgaactgcaggatgccctcatcagcatcattgaccattacaagtggcagaaatttgtctacatttatgatgccgaccggggcttatccgtcctgcagaaagtcctggatacagctgctgagaagaactggcaggtgacagcagtcaacattttgacaaccacagaggagggataccggatgctctttcaggacctggagaagaaaaaggagcggctggtggtggtggactgtgaatcagaacgcctcaatgctatcttgggccagattataaagctagagaagaatggcatcggctaccactacattcttgcaaatctgggcttcatggacattgacttaaacaaattcaaggagagtggcgccaatgtgacaggtttccagctggtgaactacacagacactattccggccaagatcatgcagcagtggaagaatagtgatgctcgagaccacacacgggtggactggaagagacccaagtacacctctgcgctcacctacgatggggtgaaggtgatggctgaggctttccagagcctgcggaggcagagaattgatatatctcgccgggggaatgctggggattgtctggctaacccagctgttccctggggccaagggatcgacatccagagagctctgcagcaggtgcgatttgaaggtttaacaggaaacgtgcagtttaatgagaaaggacgccggaccaactacacgctccacgtgattgaaatgaaacatgacggcatccgaaagattggttactggaatgaagatgataagtttgtccctgcagccaccgatgcccaagctgggggcgataattcaagtgttcagaacagaacatacatcgtcacaacaatcctagaagatccttatgtgatgctcaagaagaacgccaatcagtttgagggcaatgaccgttacgagggctactgtgtagagctggcggcagagattgccaagcacgtgggctactcctaccgtctggagattgtcagtgatggaaaatacggagcccgagaccctgacacgaaggcctggaatggcatggtgggagagctggtctatggaagagcagatgtggctgtggctcccttaactatcactttggtccgggaagaagttatagatttctccaaaccatttatgagtttggggatctccatcatgattaaaaaaccacagaaatccaagccgggtgtcttctccttccttgatcctttggcttatgagatttggatgtgcattgtttttgcctacattggagtgagtgttgtcctcttcctggtcagccgcttcagtccctatgaatggcacagtgaagagtttgaggaaggacgggaccagacaaccagtgaccagtccaatgagtttgggatattcaacagtttgtggttctccctgggagccttcatgcagcaaggatgtgacatttctcccaggtccctgtctggtcgcatcgttggtggcgtctggtggttcttcaccttaatcatcatctcctcatatacagccaatctggccgccttcctgaccgtggagaggatggtgtctcccattgagagtgcagaggacctagcgaagcagacagaaattgcctacgggacgctggaagcaggatctactaaggagttcttcaggaggtctaaaattgctgtgtttgagaagatgtggacatacatgaagtcagcagagccatcagtttttgtgcggaccacagaggaggggatgattcgagtgaggaaatccaaaggcaaatatgcctacctcctggagtccaccatgaatgagtacattgagcagcggaaaccctgtgacaccatgaaggtgggaggtaacttggattccaaaggctatggcattgcaacacccaaggggtctgccctgagaaatccagtaaacctggcagtgttaaaactgaacgagcaggggcttttggacaaattgaaaaacaaatggtggtacgacaagggcgagtgcggcagcgggggaggtgattccaaggacaagacaagcgctctgagcctcagcaatgtggcaggcgtgttctacatcctgatcggaggacttggactagccatgctggttgccttaatcgagttctgctacaaatcccgtagtgaatccaagcggatgaagggtttttgtttgatcccacagcaatccatcaacgaagccatacggacatcgaccctcccccgcaacagcggggcaggagccagcagcggcggcagtggagagaatggtcgggtggtcagccatgacttccccaagtccatgcaatcgattccttgcatgagccacagttcagggatgcccttgggagccacgggattgtaactggagcagatggagaccccttggggagcaggctcgggctccccagccccatcccaaacccttcagtgccaaaaacaacaacaaaatgaaacgcaaccaccaccaaccactgcgaccacaagaaggatgattcaacaggttttcctgaagaattgaaaaaccattttgctgtcccttttccttttttgatgttctttcacccttttctgtttgctaagtgaggatgaaaaaataacactgtactgcaataaggggagagtaaccctgtctaatgaaacctgtgtctctgagagtagagtcactggaacactaatgaggaaactgcactgttttattttaattcagttgttagtgtgtcttagtgtgtgcaattttttttcttactaatatccatggtttgcaggttctgttaggccctttccttctccttacttcttatccccaactccctacccacccctcttcagttttcagattggagattcaagatttgttccactttacaagcaagaggaaaaaaaagcaaccttcaaactaattctccatgggggctctccatgttaccctccactccttggcccaaacctctgatggagatagacattgttggagaagtgggctgccttccccaagtggggcactgcttaagcacttattcagtggagaacacaggtgaaaagcaactcaggatgagggtggtggagagggcaggggcagatgtgcagtcagagaaggactcctgaagttactgctgctcagaaaaacagttcctttaatgtggaagagccatttcataggtcataggtggtatggtatatttcttcagagtcaaccttggccctgagaagtatgtcctcctggtgtgctcaggctcaacggcagtctggtggctgaaggcacttggcctcctaaaccaagcagaattttgggaagagataacagccagggagatattgcccatgattctcactttttctttgcctggcatctaagcaggaacccattgtggagtagactctcttcttctatggagcctctgacatggggagcaatgctaagcaagctaagtgtaaaagaaaagtgacagaataattttggaagaggaagcctcatcaaaagctcacacaaaatagagcttcccatggtgtgccctatcctaggtttaagaaaacacgtatgaagtttatgctgatgcaaagaacttgggtttttatgttaatataaagtgttgttttagcatgtggccagatgatgctctgtcatctttagaaagtgagataaccaaggaaataattgaaggagtatagggagatggattaagttgataatgacatttagggcaacttaagacctttgatcccaggttctaactcaaagaggctgaccttcccccagctaagatagcatgaggacgttgtattccaatatacgtatgattggggctacaaagctgaactaaagcaagattggtgaagtggcagggtttatagagagaagcccaggctgagttcagcttttgttggaagtgagaatccctgacatatagctttcttggagatcccaactctcattcttggtgcaactggcttccagctctccagcagtcactctcctaggtgcatgattcagtgcgtgccatgtgtcattagcttttactgataaccatattctggcttgttcccttaccccctacttctatccaattttctctgctaggggttatcattagcaattgacatgctaaaggttttggagcccacctaggggtaggtgcagctttattggcttttctgtggattctctcagtggacccacaccatctctatgtctctccactctcctgccttcagccatagcaaagaatccttccaaaatcaaactcttcacttttttgactcaagtgttgttgttcagtctctcgcgtgtcaatgtggtcatggttcatgaaaccggaccctcaagatggatgattgcttttaactactgccagctgatgtctctcagcccctgccctcatacaagatttttctcagccttcagcctaccactgcagaatccgatgtgacccaccattagggagtctgcatcttggaagagttggaaataaccctttaacatcaacatgcttcaaagactttttgcctttggcctagtaagatgcctctccagctactgagcccacaagtaacatgagcggataaaaagagacttgtttgtgctagaaatgagggtctatgctatgagggggtccaagactctggcgaaatgtgctttttcatcaatggagaaatgaaaggaaaacacaagcaagaaaaaagttaacttgtattatgtatttttactacacttttcttaaaaatagagcattgggaaaactctgaaagagactgacatttttctcaacaggaatccatacttaacagttctggctttcattaaattttgctctttggtacctgggccttttatttaacatctatatttgttttaactctcttggcagatgtgtgaaaggattcttgcttgatcaaacactaagtatttttttggttcttgtttttctttcaaatagccaggtttttttcttttggtatttgcataaaatgaaaatatcaccgaatattaaatcactgtggatccatta

SEQ ID NO: 8924 - DNA, 734 bp, Homo sapiens
  source 1..734: mol_type = unassigned DNA
gaggacgggcttcttttcccgtgctcagttaatctggctgtcagttggtgttaacgctgcagtttaagtgttcggattccaagggaaacagacaaacctcacgaaaggaaggaagcaagcaagcaaggaaggaactgcaggaggaaaagaacaggcagaacagcgagaagaataaagggaaagggggggaaacaccaaatctatgattggacctgggcttctttttcgccaatgcaaaaaggaatatgcagcacatttttgccttcttctgcaccggtttcctaggcgcggtagtaggtgccaatttccccaacaatatccagatcgggggattatttccaaaccagcagtcacaggaacatgctgcttttagatttgctttgtcgcaactcacagagcccccgaagctgctcccccagattgatattgtgaacatcagcgacagctttgagatgacctatagatgtaagtaattgcttctatttctgagatgtctttctgcgctagaccaatgaaaggagggcctgtgggtaggtggtggtgttgcaaaaatgacttcagttgccattcgtctttgtaagagaaagccctccaagaaaaatttctagaggcttctgagtgattccagcagttggcattttagcccctgcaatgcttcatgtaatggatttgctttttcactgtcagctaactttaatgccagcacgatgggtgcttgggttgactgcatcttc

SEQ ID NO: 8925 - DNA, 2761 bp, Homo sapiens
  source 1..2761: mol_type = unassigned DNA
tcttttcccgtgctcagttaatctggctgtcagttggtgttaacgctgcagtttaagtgttcggattccaagggaaacagacaaacctcacgaaaggaaggaagcaagcaagcaaggaaggaactgcaggaggaaaagaacaggcagaacagcgagaagaataaagggaaagggggggaaacaccaaatctatgattggacctgggcttctttttcgccaatgcaaaaaggaatatgcagcacatttttgccttcttctgcaccggtttcctaggcgcggtagtaggtgccaatttccccaacaatatccagatcgggggattatttccaaaccagcagtcacaggaacatgctgcttttagatttgctttgtcgcaactcacagagcccccgaagctgctcccccagattgatattgtgaacatcagcgacagctttgagatgacctatagatgcttatccgtcctgcagaaagtcctggatacagctgctgagaagaactggcaggtgacagcagtcaacattttgacaaccacagaggagggataccggatgctctttcaggacctggagaagaaaaaggagcggctggtggtggtggactgtgaatcagaacgcctcaatgctatcttgggccagattataaagctagagaagaatggcatcggctaccactacattcttgcaaatctgggcttcatggacattgacttaaacaaattcaaggagagtggcgccaatgtgacaggtttccagctggtgaactacacagacactattccggccaagatcatgcagcagtggaagaatagtgatgctcgagaccacacacgggtggactggaagagacccaagtacacctctgcgctcacctacgatggggtgaaggtgatggctgaggctttccagagcctgcggaggcagagaattgatatatctcgccgggggaatgctggggattgtctggctaacccagctgttccctggggccaagggatcgacatccagagagctctgcagcaggtgcgatttgaaggtttaacaggaaacgtgcagtttaatgagaaaggacgccggaccaactacacgctccacgtgattgaaatgaaacatgacggcatccgaaagattggttactggaatgaagatgataagtttgtccctgcagccaccgatgcccaagctgggggcgataattcaagtgttcagaacagaacatacatcgtcacaacaatcctagaagatccttatgtgatgctcaagaagaacgccaatcagtttgagggcaatgaccgttacgagggctactgtgtagagctggcggcagagattgccaagcacgtgggctactcctaccgtctggagattgtcagtgatggaaaatacggagcccgagaccctgacacgaaggcctggaatggcatggtgggagagctggtctatggaagagcagatgtggctgtggctcccttaactatcactttggtccgggaagaagttatagatttctccaaaccatttatgagtttggggatctccatcatgattaaaaaaccacagaaatccaagccgggtgtcttctccttccttgatcctttggcttatgagatttggatgtgcattgtttttgcctacattggagtgagtgttgtcctcttcctggtcagccgcttcagtccctatgaatggcacagtgaagagtttgaggaaggacgggaccagacaaccagtgaccagtccaatgagtttgggatattcaacagtttgtggttctccctgggagccttcatgcagcaaggatgtgacatttctcccaggtccctgtctggtcgcatcgttggtggcgtctggtggttcttcaccttaatcatcatctcctcatatacagccaatctggccgccttcctgaccgtggagaggatggtgtctcccattgagagtgcagaggacctagcgaagcagacagaaattgcctacgggacgctggaagcaggatctactaaggagttcttcaggaggtctaaaattgctgtgtttgagaagatgtggacatacatgaagtcagcagagccatcagtttttgtgcggaccacagaggaggggatgattcgagtgaggaaatccaaaggcaaatatgcctacctcctggagtccaccatgaatgagtacattgagcagcggaaaccctgtgacaccatgaaggtgggaggtaacttggattccaaaggctatggcattgcaacacccaaggggtctgccctgagaaatccagtaaacctggcagtgttaaaactgaacgagcaggggcttttggacaaattgaaaaacaaatggtggtacgacaagggcgagtgcggcagcgggggaggtgattccaaggacaagacaagcgctctgagcctcagcaatgtggcaggcgtgttctacatcctgatcggaggacttggactagccatgctggttgccttaatcgagttctgctacaaatcccgtagtgaatccaagcggatgaagggtttttgtttgatcccacagcaatccatcaacgaagccatacggacatcgaccctcccccgcaacagcggggcaggagccagcagcggcggcagtggagagaatggtcgggtggtcagccatgacttccccaagtccatgcaatcgattccttgcatgagccacagttcagggatgcccttgggagccacgggattgtaactggagcagatggagaccccttggggagcaggctcgggctccccag

SEQ ID NO: 8926 - DNA, 3170 bp, Homo sapiens
  source 1..3170: mol_type = unassigned DNA
taaagggaaagggggggaaacaccaaatctatgattggacctgggcttctttttcgccaatgcaaaaaggaatatgcagcacatttttgccttcttctgcaccggtttcctaggcgcggtagtaggtgccaatttccccaacaatatccagatcgggggattatttccaaaccagcagtcacaggaacatgctgcttttagatttgctttgtcgcaactcacagagcccccgaagctgctcccccagattgatattgtgaacatcagcgacagctttgagatgacctatagattctgttcccagttctccaaaggagtctatgccatctttgggttttatgaacgtaggactgtcaacatgctgacctccttttgtggggccctccacgtctgcttcattacgccgagctttcccgttgatacatccaatcagtttgtccttcagctgcgccctgaactgcaggatgccctcatcagcatcattgaccattacaagtggcagaaatttgtctacatttatgatgccgaccggggcttatccgtcctgcagaaagtcctggatacagctgctgagaagaactggcaggtgacagcagtcaacattttgacaaccacagaggagggataccggatgctctttcaggacctggagaagaaaaaggagcggctggtggtggtggactgtgaatcagaacgcctcaatgctatcttgggccagattataaagctagagaagaatggcatcggctaccactacattcttgcaaatctgggcttcatggacattgacttaaacaaattcaaggagagtggcgccaatgtgacaggtttccagctggtgaactacacagacactattccggccaagatcatgcagcagtggaagaatagtgatgctcgagaccacacacgggtggactggaagagacccaagtacacctctgcgctcacctacgatggggtgaaggtgatggctgaggctttccagagcctgcggaggcagagaattgatatatctcgccgggggaatgctggggattgtctggctaacccagctgttccctggggccaagggatcgacatccagagagctctgcagcaggtgcgatttgaaggtttaacaggaaacgtgcagtttaatgagaaaggacgccggaccaactacacgctccacgtgattgaaatgaaacatgacggcatccgaaagattggttactggaatgaagatgataagtttgtccctgcagccaccgatgcccaagctgggggcgataattcaagtgttcagaacagaacatacatcgtcacaacaatcctagaagatccttatgtgatgctcaagaagaacgccaatcagtttgagggcaatgaccgttacgagggctactgtgtagagctggcggcagagattgccaagcacgtgggctactcctaccgtctggagattgtcagtgatggaaaatacggagcccgagaccctgacacgaaggcctggaatggcatggtgggagagctggtctatggaagagcagatgtggctgtggctcccttaactatcactttggtccgggaagaagttatagatttctccaaaccatttatgagtttggggatctccatcatgattaaaaaaccacagaaatccaagccgggtgtcttctccttccttgatcctttggcttatgagatttggatgtgcattgtttttgcctacattggagtgagtgttgtcctcttcctggtcagccgcttcagtccctatgaatggcacagtgaagagtttgaggaaggacgggaccagacaaccagtgaccagtccaatgagtttgggatattcaacagtttgtggttctccctgggagccttcatgcagcaaggatgtgacatttctcccaggtccctgtctggtcgcatcgttggtggcgtctggtggttcttcaccttaatcatcatctcctcatatacagccaatctggccgccttcctgaccgtggagaggatggtgtctcccattgagagtgcagaggacctagcgaagcagacagaaattgcctacgggacgctggaagcaggatctactaaggagttcttcaggaggtctaaaattgctgtgtttgagaagatgtggacatacatgaagtcagcagagccatcagtttttgtgcggaccacagaggaggggatgattcgagtgaggaaatccaaaggcaaatatgcctacctcctggagtccaccatgaatgagtacattgagcagcggaaaccctgtgacaccatgaaggtgggaggtaacttggattccaaaggctatggcattgcaacacccaaggggtctgccctgagaggtcccgtaaacctagcggttttgaaactcagtgagcaaggcgtcttagacaagctgaaaagcaaatggtggtacgataaaggggaatgtggaagcaaggactccggaagtaaggacaagacaagcgctctgagcctcagcaatgtggcaggcgtgttctacatcctgatcggaggacttggactagccatgctggttgccttaatcgagttctgctacaaatcccgtagtgaatccaagcggatgaagggtttttgtttgatcccacagcaatccatcaacgaagccatacggacatcgaccctcccccgcaacagcggggcaggagccagcagcggcggcagtggagagaatggtcgggtggtcagccatgacttccccaagtccatgcaatcgattccttgcatgagccacagttcagggatgcccttgggagccacgggattgtaactggagcagatggagaccccttggggagcaggctcgggctccccagccccatcccaaacccttcagtgccaaaaacaacaacaaaatgaaacgcaaccaccaccaaccactgcgaccacaagaaggatgattcaacaggttttcctgaagaattgaaaaaccattttgctgtcccttttccttttttgatgttctttcacccttttctgtttgctaagtgaggatgaaaaaataacactgtactgcaataaggggagagtaaccctgtctaatgaaacctgtgtctctgagagtagagtcactggaacactaatgaggaaactgcactgttttattttaattcagttgttagtgtgtcttagtgtgtgcaattttt

SEQ ID NO: 8927 - DNA, 572 bp, Homo sapiens
  source 1..572: mol_type = unassigned DNA
cgcactccaggcaagagcatgtgaaatggaggaaccatcgctttggaggaaaaaaaaaatcaggctggaaagggtggtgggtgtttaaggagttaactctattgcttggtagatggtgcttgattccatttttaatggggattatttccaaaccagcagtcacaggaacatgctgcttttagatttgctttgtcgcaactcacagagcccccgaagctgctcccccagattgatattgtgaacatcagcgacagctttgagatgacctatagatcttgtccggctgaaaggtcttcagtggcaatagcacgcatggagctgtcatcacctataacactgccttcttctggaatacctcctgaaggacttgcctgaggctattttacagctacctttttttataagtagaaagagtgcactgtaaaataacaacatatatagtaaatgtataaaccagttacataactgcttattatcaagtattatgtactgtacatgactgtatgtgttatacttttatatacaaccacagcacagtaggtttgtttaagccagcatcaccacaaacacat

SEQ ID NO: 8928 - DNA, 3069 bp, Homo sapiens
  source 1..3069: mol_type = unassigned DNA
attgcttggtagatggtgcttgattccatttttaatggggattatttccaaaccagcagtcacaggaacatgctgcttttagatttgctttgtcgcaactcacagagcccccgaagctgctcccccagattgatattgtgaacatcagcgacagctttgagatgacctatagattctgttcccagttctccaaaggagtctatgccatctttgggttttatgaacgtaggactgtcaacatgctgacctccttttgtggggccctccacgtctgcttcattacgccgagctttcccgttgatacatccaatcagtttgtccttcagctgcgccctgaactgcaggatgccctcatcagcatcattgaccattacaagtggcagaaatttgtctacatttatgatgccgaccggggcttatccgtcctgcagaaagtcctggatacagctgctgagaagaactggcaggtgacagcagtcaacattttgacaaccacagaggagggataccggatgctctttcaggacctggagaagaaaaaggagcggctggtggtggtggactgtgaatcagaacgcctcaatgctatcttgggccagattataaagctagagaagaatggcatcggctaccactacattcttgcaaatctgggcttcatggacattgacttaaacaaattcaaggagagtggcgccaatgtgacaggtttccagctggtgaactacacagacactattccggccaagatcatgcagcagtggaagaatagtgatgctcgagaccacacacgggtggactggaagagacccaagtacacctctgcgctcacctacgatggggtgaaggtgatggctgaggctttccagagcctgcggaggcagagaattgatatatctcgccgggggaatgctggggattgtctggctaacccagctgttccctggggccaagggatcgacatccagagagctctgcagcaggtgcgatttgaaggtttaacaggaaacgtgcagtttaatgagaaaggacgccggaccaactacacgctccacgtgattgaaatgaaacatgacggcatccgaaagattggttactggaatgaagatgataagtttgtccctgcagccaccgatgcccaagctgggggcgataattcaagtgttcagaacagaacatacatcgtcacaacaatcctagaagatccttatgtgatgctcaagaagaacgccaatcagtttgagggcaatgaccgttacgagggctactgtgtagagctggcggcagagattgccaagcacgtgggctactcctaccgtctggagattgtcagtgatggaaaatacggagcccgagaccctgacacgaaggcctggaatggcatggtgggagagctggtctatggaagagcagatgtggctgtggctcccttaactatcactttggtccgggaagaagttatagatttctccaaaccatttatgagtttggggatctccatcatgattaaaaaaccacagaaatccaagccgggtgtcttctccttccttgatcctttggcttatgagatttggatgtgcattgtttttgcctacattggagtgagtgttgtcctcttcctggtcagccgcttcagtccctatgaatggcacagtgaagagtttgaggaaggacgggaccagacaaccagtgaccagtccaatgagtttgggatattcaacagtttgtggttctccctgggagccttcatgcagcaaggatgtgacatttctcccaggtccctgtctggtcgcatcgttggtggcgtctggtggttcttcaccttaatcatcatctcctcatatacagccaatctggccgccttcctgaccgtggagaggatggtgtctcccattgagagtgcagaggacctagcgaagcagacagaaattgcctacgggacgctggaagcaggatctactaaggagttcttcaggaggtctaaaattgctgtgtttgagaagatgtggacatacatgaagtcagcagagccatcagtttttgtgcggaccacagaggaggggatgattcgagtgaggaaatccaaaggcaaatatgcctacctcctggagtccaccatgaatgagtacattgagcagcggaaaccctgtgacaccatgaaggtgggaggtaacttggattccaaaggctatggcattgcaacacccaaggggtctgccctgagaaatccagtaaacctggcagtgttaaaactgaacgagcaggggcttttggacaaattgaaaaacaaatggtggtacgacaagggcgagtgcggcagcgggggaggtgattccaaggacaagacaagcgctctgagcctcagcaatgtggcaggcgtgttctacatcctgatcggaggacttggactagccatgctggttgccttaatcgagttctgctacaaatcccgtagtgaatccaagcggatgaagggtttttgtttgatcccacagcaatccatcaacgaagccatacggacatcgaccctcccccgcaacagcggggcaggagccagcagcggcggcagtggagagaatggtcgggtggtcagccatgacttccccaagtccatgcaatcgattccttgcatgagccacagttcagggatgcccttgggagccacgggattgtaactggagcagatggagaccccttggggagcaggctcgggctccccagccccatcccaaacccttcagtgccaaaaacaacaacaaaatgaaacgcaaccaccaccaaccactgcgaccacaagaaggatgattcaacaggttttcctgaagaattgaaaaaccattttgctgtcccttttccttttttgatgttctttcacccttttctgtttgctaagtgaggatgaaaaaataacactgtactgcaataaggggagagtaaccctgtctaatgaaacctgtgtctctgagagtagagtcactggaacactaatgaggaaactgcactgttttattttaattcagttgttagtgtgtcttagtgtgtgcaattttttttcttactaatatccat

SEQ ID NO: 8929 - DNA, 2825 bp, Homo sapiens
  source 1..2825: mol_type = unassigned DNA
gtgcaattgatattttgtcgggcatacatgtgctgcagtacccatctctttcagcctctccagctagctggcggcttggagtggccatggagtaacttgctttgtttcctgacacctgttaagctacatcctgaagtgtggggattatttccaaaccagcagtcacaggaacatgctgcttttagatttgctttgtcgcaactcacagagcccccgaagctgctcccccagattgatattgtgaacatcagcgacagctttgagatgacctatagattctgttcccagttctccaaaggagtctatgccatctttgggttttatgaacgtaggactgtcaacatgctgacctccttttgtggggccctccacgtctgcttcattacgccgagctttcccgttgatacatccaatcagtttgtccttcagctgcgccctgaactgcaggatgccctcatcagcatcattgaccattacaagtggcagaaatttgtctacatttatgatgccgaccggggcttatccgtcctgcagaaagtcctggatacagctgctgagaagaactggcaggtgacagcagtcaacattttgacaaccacagaggagggataccggatgctctttcaggacctggagaagaaaaaggagcggctggtggtggtggactgtgaatcagaacgcctcaatgctatcttgggccagattataaagctagagaagaatggcatcggctaccactacattcttgcaaatctgggcttcatggacattgacttaaacaaattcaaggagagtggcgccaatgtgacaggtttccagctggtgaactacacagacactattccggccaagatcatgcagcagtggaagaatagtgatgctcgagaccacacacgggtggactggaagagacccaagtacacctctgcgctcacctacgatggggtgaaggtgatggctgaggctttccagagcctgcggaggcagagaattgatatatctcgccgggggaatgctggggattgtctggctaacccagctgttccctggggccaagggatcgacatccagagagctctgcagcaggtgcgatttgaaggtttaacaggaaacgtgcagtttaatgagaaaggacgccggaccaactacacgctccacgtgattgaaatgaaacatgacggcatccgaaagattggttactggaatgaagatgataagtttgtccctgcagccaccgatgcccaagctgggggcgataattcaagtgttcagaacagaacatacatcgtcacaacaatcctagaagatccttatgtgatgctcaagaagaacgccaatcagtttgagggcaatgaccgttacgagggctactgtgtagagctggcggcagagattgccaagcacgtgggctactcctaccgtctggagattgtcagtgatggaaaatacggagcccgagaccctgacacgaaggcctggaatggcatggtgggagagctggtctatggaagagcagatgtggctgtggctcccttaactatcactttggtccgggaagaagttatagatttctccaaaccatttatgagtttggggatctccatcatgattaaaaaaccacagaaatccaagccgggtgtcttctccttccttgatcctttggcttatgagatttggatgtgcattgtttttgcctacattggagtgagtgttgtcctcttcctggtcagccgcttcagtccctatgaatggcacagtgaagagtttgaggaaggacgggaccagacaaccagtgaccagtccaatgagtttgggatattcaacagtttgtggttctccctgggagccttcatgcagcaaggatgtgacatttctcccaggtccctgtctggtcgcatcgttggtggcgtctggtggttcttcaccttaatcatcatctcctcatatacagccaatctggccgccttcctgaccgtggagaggatggtgtctcccattgagagtgcagaggacctagcgaagcagacagaaattgcctacgggacgctggaagcaggatctactaaggagttcttcaggaggtctaaaattgctgtgtttgagaagatgtggacatacatgaagtcagcagagccatcagtttttgtgcggaccacagaggaggggatgattcgagtgaggaaatccaaaggcaaatatgcctacctcctggagtccaccatgaatgagtacattgagcagcggaaaccctgtgacaccatgaaggtgggaggtaacttggattccaaaggctatggcattgcaacacccaaggggtctgccctgagaggtcccgtaaacctagcggttttgaaactcagtgagcaaggcgtcttagacaagctgaaaagcaaatggtggtacgataaaggggaatgtggaagcaaggactccggaagtaaggacaagacaagcgctctgagcctcagcaatgtggcaggcgtgttctacatcctgatcggaggacttggactagccatgctggttgccttaatcgagttctgctacaaatcccgtagtgaatccaagcggatgaagggtttttgtttgatcccacagcaatccatcaacgaagccatacggacatcgaccctcccccgcaacagcggggcaggagccagcagcggcggcagtggagagaatggtcgggtggtcagccatgacttccccaagtccatgcaatcgattccttgcatgagccacagttcagggatgcccttgggagccacgggattgtaactggagcagatggagaccccttggggagcaggctcgggctccccagc

SEQ ID NO: 8930 - DNA, 5233 bp, Homo sapiens
  source 1..5233: mol_type = unassigned DNA
gtgcaattgatattttgtcgggcatacatgtgctgcagtacccatctctttcagcctctccagctagctggcggcttggagtggccatggagtaacttgctttgtttcctgacacctgttaagctacatcctgaagtgtggggattatttccaaaccagcagtcacaggaacatgctgcttttagatttgctttgtcgcaactcacagagcccccgaagctgctcccccagattgatattgtgaacatcagcgacagctttgagatgacctatagattctgttcccagttctccaaaggagtctatgccatctttgggttttatgaacgtaggactgtcaacatgctgacctccttttgtggggccctccacgtctgcttcattacgccgagctttcccgttgatacatccaatcagtttgtccttcagctgcgccctgaactgcaggatgccctcatcagcatcattgaccattacaagtggcagaaatttgtctacatttatgatgccgaccggggcttatccgtcctgcagaaagtcctggatacagctgctgagaagaactggcaggtgacagcagtcaacattttgacaaccacagaggagggataccggatgctctttcaggacctggagaagaaaaaggagcggctggtggtggtggactgtgaatcagaacgcctcaatgctatcttgggccagattataaagctagagaagaatggcatcggctaccactacattcttgcaaatctgggcttcatggacattgacttaaacaaattcaaggagagtggcgccaatgtgacaggtttccagctggtgaactacacagacactattccggccaagatcatgcagcagtggaagaatagtgatgctcgagaccacacacgggtggactggaagagacccaagtacacctctgcgctcacctacgatggggtgaaggtgatggctgaggctttccagagcctgcggaggcagagaattgatatatctcgccgggggaatgctggggattgtctggctaacccagctgttccctggggccaagggatcgacatccagagagctctgcagcaggtgcgatttgaaggtttaacaggaaacgtgcagtttaatgagaaaggacgccggaccaactacacgctccacgtgattgaaatgaaacatgacggcatccgaaagattggttactggaatgaagatgataagtttgtccctgcagccaccgatgcccaagctgggggcgataattcaagtgttcagaacagaacatacatcgtcacaacaatcctagaagatccttatgtgatgctcaagaagaacgccaatcagtttgagggcaatgaccgttacgagggctactgtgtagagctggcggcagagattgccaagcacgtgggctactcctaccgtctggagattgtcagtgatggaaaatacggagcccgagaccctgacacgaaggcctggaatggcatggtgggagagctggtctatggaagagcagatgtggctgtggctcccttaactatcactttggtccgggaagaagttatagatttctccaaaccatttatgagtttggggatctccatcatgattaaaaaaccacagaaatccaagccgggtgtcttctccttccttgatcctttggcttatgagatttggatgtgcattgtttttgcctacattggagtgagtgttgtcctcttcctggtcagccgcttcagtccctatgaatggcacagtgaagagtttgaggaaggacgggaccagacaaccagtgaccagtccaatgagtttgggatattcaacagtttgtggttctccctgggagccttcatgcagcaaggatgtgacatttctcccaggtccctgtctggtcgcatcgttggtggcgtctggtggttcttcaccttaatcatcatctcctcatatacagccaatctggccgccttcctgaccgtggagaggatggtgtctcccattgagagtgcagaggacctagcgaagcagacagaaattgcctacgggacgctggaagcaggatctactaaggagttcttcaggaggtctaaaattgctgtgtttgagaagatgtggacatacatgaagtcagcagagccatcagtttttgtgcggaccacagaggaggggatgattcgagtgaggaaatccaaaggcaaatatgcctacctcctggagtccaccatgaatgagtacattgagcagcggaaaccctgtgacaccatgaaggtgggaggtaacttggattccaaaggctatggcattgcaacacccaaggggtctgccctgagaaatccagtaaacctggcagtgttaaaactgaacgagcaggggcttttggacaaattgaaaaacaaatggtggtacgacaagggcgagtgcggcagcgggggaggtgattccaaggacaagacaagcgctctgagcctcagcaatgtggcaggcgtgttctacatcctgatcggaggacttggactagccatgctggttgccttaatcgagttctgctacaaatcccgtagtgaatccaagcggatgaagggtttttgtttgatcccacagcaatccatcaacgaagccatacggacatcgaccctcccccgcaacagcggggcaggagccagcagcggcggcagtggagagaatggtcgggtggtcagccatgacttccccaagtccatgcaatcgattccttgcatgagccacagttcagggatgcccttgggagccacgggattgtaactggagcagatggagaccccttggggagcaggctcgggctccccagccccatcccaaacccttcagtgccaaaaacaacaacaaaatgaaacgcaaccaccaccaaccactgcgaccacaagaaggatgattcaacaggttttcctgaagaattgaaaaaccattttgctgtcccttttccttttttgatgttctttcacccttttctgtttgctaagtgaggatgaaaaaataacactgtactgcaataaggggagagtaaccctgtctaatgaaacctgtgtctctgagagtagagtcactggaacactaatgaggaaactgcactgttttattttaattcagttgttagtgtgtcttagtgtgtgcaattttttttcttactaatatccatggtttgcaggttctgttaggccctttccttctccttacttcttatccccaactccctacccacccctcttcagttttcagattggagattcaagatttgttccactttacaagcaagaggaaaaaaaagcaaccttcaaactaattctccatgggggctctccatgttaccctccactccttggcccaaacctctgatggagatagacattgttggagaagtgggctgccttccccaagtggggcactgcttaagcacttattcagtggagaacacaggtgaaaagcaactcaggatgagggtggtggagagggcaggggcagatgtgcagtcagagaaggactcctgaagttactgctgctcagaaaaacagttcctttaatgtggaagagccatttcataggtcataggtggtatggtatatttcttcagagtcaaccttggccctgagaagtatgtcctcctggtgtgctcaggctcaacggcagtctggtggctgaaggcacttggcctcctaaaccaagcagaattttgggaagagataacagccagggagatattgcccatgattctcactttttctttgcctggcatctaagcaggaacccattgtggagtagactctcttcttctatggagcctctgacatggggagcaatgctaagcaagctaagtgtaaaagaaaagtgacagaataattttggaagaggaagcctcatcaaaagctcacacaaaatagagcttcccatggtgtgccctatcctaggtttaagaaaacacgtatgaagtttatgctgatgcaaagaacttgggtttttatgttaatataaagtgttgttttagcatgtggccagatgatgctctgtcatctttagaaagtgagataaccaaggaaataattgaaggagtatagggagatggattaagttgataatgacatttagggcaacttaagacctttgatcccaggttctaactcaaagaggctgaccttcccccagctaagatagcatgaggacgttgtattccaatatacgtatgattggggctacaaagctgaactaaagcaagattggtgaagtggcagggtttatagagagaagcccaggctgagttcagcttttgttggaagtgagaatccctgacatatagctttcttggagatcccaactctcattcttggtgcaactggcttccagctctccagcagtcactctcctaggtgcatgattcagtgcgtgccatgtgtcattagcttttactgataaccatattctggcttgttcccttaccccctacttctatccaattttctctgctaggggttatcattagcaattgacatgctaaaggttttggagcccacctaggggtaggtgcagctttattggcttttctgtggattctctcagtggacccacaccatctctatgtctctccactctcctgccttcagccatagcaaagaatccttccaaaatcaaactcttcacttttttgactcaagtgttgttgttcagtctctcgcgtgtcaatgtggtcatggttcatgaaaccggaccctcaagatggatgattgcttttaactactgccagctgatgtctctcagcccctgccctcatacaagatttttctcagccttcagcctaccactgcagaatccgatgtgacccaccattagggagtctgcatcttggaagagttggaaataaccctttaacatcaacatgcttcaaagactttttgcctttggcctagtaagatgcctctccagctactgagcccacaagtaacatgagcggataaaaagagacttgtttgtgctagaaatgagggtctatgctatgagggggtccaagactctggcgaaatgtgctttttcatcaatggagaaatgaaaggaaaacacaagcaagaaaaaagttaacttgtattatgtatttttactacacttttcttaaaaatagagcattgggaaaactctgaaagagactgacatttttctcaacaggaatccatacttaacagttctggctttcattaaattttgctctttggta

SEQ ID NO: 8931 - DNA, 419 bp, Homo sapiens
  source 1..419: mol_type = unassigned DNA
ctcacagagcccccgaagctgctcccccagattgatattgtgaacatcagcgacagctttgagatgacctatagatcctagtgcagtgattctcagctgggagtgattttgcccctttcccttcctgggggacatgtggcaatgtctggagacacttttaagtgtcacaactcaggactggagaactactattgacatttaggtaaaagcaatggatgtgctaaccatcctgtaatgcacagaacaaacccctacaacaaataattatctgggctaaaatgtcaataatgctgaggttaagaaacctcattctattttttgtactcattaactatccccctcaaaacatctcatgtaccccataaatatatatacctactatgtaccacaaaattaaaaataaaaaagagtataaaatt

SEQ ID NO: 8932 - DNA, 560 bp, Homo sapiens
  source 1..560: mol_type = unassigned DNA
atattttatgttgggctaggggcctgcctggaggacatttacaagtgttcagtggctggtaactgaattagagtgcctggagatatagtctgttcccagttctccaaaggagtctatgccatctttgggttttatgaacgtaggactgtcaacatgctgacctccttttgtggggccctccacgtctgcttcattacgccgagctttcccgttgatacatccaatcagtttgtccttcagctgcgccctgaactgcaggatgccctcatcagcatcattgaccattacaagtggcagaaatttgtctacatttatgatgccgaccggggcttatccgtcctgcagaaagtcctggatacagctgctgagaagaactggcaggtgacagcagtcaacattttgacaaccacagaggagggataccggatgctctttcaggacctggagaagaaaaaggagcggctggtggtggtggactgtgaatcagaacgcctcaatgctatcttgggccagattataaagctagagaagaatggcatcggctaccactacattcttgc

SEQ ID NO: 8933 - DNA, 784 bp, Homo sapiens
  source 1..784: mol_type = unassigned DNA
cgctttggcaaacccagcttgcagccaatgaacccgccttccagattggtgtgaagacagaagtgagcttcgttttaggcgtagcatggccaggcagaagaaaatggggcaaagcgtgctccgggcggtcttctttttagtcctggggcttttgggtcattctcacggaggattccccaacaccatcagcataggtggacttttcatgagaaacacagtgcaggagcacagcgctttccgctttgccgtgcagttatacaacaccaaccagaacaccaccgagaagcccttccatttgaattaccacgtagatcacttggattcctccaatagtttttccgtgacaaatgcttgtcctgctgaaagggactacctgccttggccaggaagcatcagggaaaacaattggacagctctgccgtgctgcaaagatcatgggctgctgcacctaaaatgttcaccaggtggggcccgccaaaactgggcctattgtatctggggcgttacaggtgaactgtaagatgagaacaagatcacaagtcagcactacctcctcccttcttgagttctcaactgagtgagcatcatggagggagaagaaagaaagaagttcagcctgggtgtgtgaagctgtaaagttgcaggttgaacccaaacccattttagagacagaagaaactaccctctggagataaaataaaaagatgaagctgagatgggacaggatcaaagttgatgaaatatcaagagaggttaataaaggaacattaatttattcctcaaa

SEQ ID NO: 8934 - DNA, 936 bp, Homo sapiens
  source 1..936: mol_type = unassigned DNA
cgagagagagcgagcgaataagagagagagtaagagggagagagaagaagaggaagaagaggaggcggcggcagcggaggaggaggaggactagtgtggggtggaaaggaagagtgagcgagagcaagttaaggggagggggtgtaagagccagcgaattctttttctttttctattattattttgacgactcctgagttgcgcccatgctcttgtcagcttcgttttaggcgtagcatggccaggcagaagaaaatggggcaaagcgtgctccgggcggtcttctttttagtcctggggcttttgggtcattctcacggaggattccccaacaccatcagcataggtggacttttcatgagaaacacagtgcaggagcacagcgctttccgctttgccgtgcagttatacaacaccaaccagaacaccaccgagaagcccttccatttgaattaccacgtagatcacttggattcctccaatagtttttccgtgacaaatgcttgtcctgctgaaagggactacctgccttggccaggaagcatcagggaaaacaattggacagctctgccgtgctgcaaagatcatgggctgctgcacctaaaatgttcaccaggtggggcccgccaaaactgggcctattgtatctggggcgttacaggtgaactgtaagatgagaacaagatcacaagtcagcactacctcctcccttcttgagttctcaactgagtgagcatcatggagggagaagaaagaaagaagttcagcctgggtgtgtgaagctgtaaagttgcaggttgaacccaaacccattttagagacagaagaaactaccctctggagataaaataaaaagatgaagctgagatgggacaggatcaaagttgatgaaatatcaagagaggttaataaaggaacattaatttattcctcaaa

SEQ ID NO: 8935 - DNA, 2740 bp, Homo sapiens
  source 1..2740: mol_type = unassigned DNA
tgacgactcctgagttgcgcccatgctcttgtcagcttcgttttaggcgtagcatggccaggcagaagaaaatggggcaaagcgtgctccgggcggtcttctttttagtcctggggcttttgggtcattctcacggaggattccccaacaccatcagcataggtggacttttcatgagaaacacagtgcaggagcacagcgctttccgctttgccgtgcagttatacaacaccaaccagaacaccaccgagaagcccttccatttgaattaccacgtagatcacttggattcctccaatagtttttccgtgacaaatgctttctgctcccagttctcgagaggggtgtatgccatctttggattctatgaccagatgtcaatgaacaccctgacctccttctgtggggccctgcacacatcctttgttacgcctagcttccccactgacgcagatgtgcagtttgtcatccagatgcgcccagccttgaagggcgctattctgagtcttctgggtcattacaagtgggagaagtttgtgtacctctatgacacagaacgaggattttccatcctccaagcgattatggaagcagcagtgcaaaacaactggcaagtaacagcaaggtctgtgggaaacataaaggacgtccaagaattcaggcgcatcattgaagaaatggacaggaggcaggaaaagcgatacttgattgactgcgaagtcgaaaggattaacacaattttggaacaggttgtgatcctagggaaacactcaagaggttatcactacatgctcgctaacctgggttttactgatattttactggaaagagtcatgcatgggggagccaacattacaggtttccagattgtcaacaatgaaaaccctatggttcagcagttcatacagcgctgggtgaggctggatgaaagggaattccctgaagccaagaatgcaccactaaagtatacatctgcattgacacacgacgcaatactggtcatagcagaagctttccgctacctgaggaggcagcgagtagatgtgtcccggagaggaagtgctggagactgcttagcaaatcctgctgtgccctggagtcaaggaattgatattgagagagctctgaaaatggtgcaagtacaaggaatgactggaaatattcaatttgacacttatggacgtaggacaaattataccatcgatgtgtatgaaatgaaagtcagtggctctcgaaaagctggctactggaatgagtatgaaaggtttgtgcctttctcagatcagcaaatcagcaatgacagtgcatcctcagagaatcggaccatagtagtgactaccattctggaatcaccatatgtaatgtacaagaagaaccatgagcaactggaaggaaatgaacgatatgaaggctattgtgtagacctagcctatgaaatagccaaacatgtaaggatcaaatacaaattgtccatcgttggtgacgggaaatatggtgcaagggatccagagactaaaatatggaacggcatggttggggaacttgtctatgggagagctgatatagctgttgctccactcactataacattggtccgtgaagaagtcatagatttttcaaagccattcatgagcctgggcatctccatcatgataaagaagcctcagaaatcaaaaccaggcgtattctcatttctggatcccctggcttatgaaatctggatgtgcattgtctttgcttacattggagtcagcgtagttcttttcctagtcagcaggttcagtccttatgaatggcacttggaagacaacaatgaagaacctcgtgacccacaaagtcctcctgatcctccaaatgaatttggaatatttaacagtctttggttttccttgggtgcctttatgcagcaaggatgtgatatttctccaagatcactctccgggcgcattgttggaggggtttggtggttcttcaccctgatcataatttcttcctatactgccaatctcgctgctttcctgactgtggagaggatggtttctcccatagagagtgctgaagacttagctaaacagactgaaattgcatatgggaccctggactccggttcaacaaaagaatttttcagaagatccaaaattgctgtgtacgagaaaatgtggtcttacatgaaatcagcggagccatctgtgtttaccaaaacaacagcagacggagtggcccgagtgcgaaagtccaagggaaagttcgccttcctgctggagtcaaccatgaatgagtacattgagcagagaaaaccatgtgatacgatgaaagttggtggaaatctggattccaaaggctatggtgtggcaacccctaaaggctcagcattaagaaatgctgttaacctggcagtattaaaactgaatgagcaaggcctcttggacaaattgaaaaacaaatggtggtacgacaaaggagagtgcggcagcgggggcggtgactccaaggacaagaccagcgctctgagcctgagcaatgtggcaggcgttttctatatacttgtcggaggtctggggctggccatgatggtggctttgatagaattctgttacaaatcacgggcagagtccaaacgcatgaaactcacaaagaacacccaaaactttaagcctgctcctgccaccaacactcagaattatgctacatacagagaaggctacaacgtgtatggaacagagagtgttaagatctaggg

SEQ ID NO: 8936 - DNA, 4943 bp, Homo sapiens
  source 1..4943: mol_type = unassigned DNA
tgacgactcctgagttgcgcccatgctcttgtcagcttcgttttaggcgtagcatggccaggcagaagaaaatggggcaaagcgtgctccgggcggtcttctttttagtcctggggcttttgggtcattctcacggaggattccccaacaccatcagcataggtggacttttcatgagaaacacagtgcaggagcacagcgctttccgctttgccgtgcagttatacaacaccaaccagaacaccaccgagaagcccttccatttgaattaccacgtagatcacttggattcctccaatagtttttccgtgacaaatgctttctgctcccagttctcgagaggggtgtatgccatctttggattctatgaccagatgtcaatgaacaccctgacctccttctgtggggccctgcacacatcctttgttacgcctagcttccccactgacgcagatgtgcagtttgtcatccagatgcgcccagccttgaagggcgctattctgagtcttctgggtcattacaagtgggagaagtttgtgtacctctatgacacagaacgaggattttccatcctccaagcgattatggaagcagcagtgcaaaacaactggcaagtaacagcaaggtctgtgggaaacataaaggacgtccaagaattcaggcgcatcattgaagaaatggacaggaggcaggaaaagcgatacttgattgactgcgaagtcgaaaggattaacacaattttggaacaggttgtgatcctagggaaacactcaagaggttatcactacatgctcgctaacctgggttttactgatattttactggaaagagtcatgcatgggggagccaacattacaggtttccagattgtcaacaatgaaaaccctatggttcagcagttcatacagcgctgggtgaggctggatgaaagggaattccctgaagccaagaatgcaccactaaagtatacatctgcattgacacacgacgcaatactggtcatagcagaagctttccgctacctgaggaggcagcgagtagatgtgtcccggagaggaagtgctggagactgcttagcaaatcctgctgtgccctggagtcaaggaattgatattgagagagctctgaaaatggtgcaagtacaaggaatgactggaaatattcaatttgacacttatggacgtaggacaaattataccatcgatgtgtatgaaatgaaagtcagtggctctcgaaaagctggctactggaatgagtatgaaaggtttgtgcctttctcagatcagcaaatcagcaatgacagtgcatcctcagagaatcggaccatagtagtgactaccattctggaatcaccatatgtaatgtacaagaagaaccatgagcaactggaaggaaatgaacgatatgaaggctattgtgtagacctagcctatgaaatagccaaacatgtaaggatcaaatacaaattgtccatcgttggtgacgggaaatatggtgcaagggatccagagactaaaatatggaacggcatggttggggaacttgtctatgggagagctgatatagctgttgctccactcactataacattggtccgtgaagaagtcatagatttttcaaagccattcatgagcctgggcatctccatcatgataaagaagcctcagaaatcaaaaccaggcgtattctcatttctggatcccctggcttatgaaatctggatgtgcattgtctttgcttacattggagtcagcgtagttcttttcctagtcagcaggttcagtccttatgaatggcacttggaagacaacaatgaagaacctcgtgacccacaaagtcctcctgatcctccaaatgaatttggaatatttaacagtctttggttttccttgggtgcctttatgcagcaaggatgtgatatttctccaagatcactctccgggcgcattgttggaggggtttggtggttcttcaccctgatcataatttcttcctatactgccaatctcgctgctttcctgactgtggagaggatggtttctcccatagagagtgctgaagacttagctaaacagactgaaattgcatatgggaccctggactccggttcaacaaaagaatttttcagaagatccaaaattgctgtgtacgagaaaatgtggtcttacatgaaatcagcggagccatctgtgtttaccaaaacaacagcagacggagtggcccgagtgcgaaagtccaagggaaagttcgccttcctgctggagtcaaccatgaatgagtacattgagcagagaaaaccatgtgatacgatgaaagttggtggaaatctggattccaaaggctatggtgtggcaacccctaaaggctcagcattaagaacgcctgtaaaccttgcagtattgaaactcagtgaacaaggcatcttagacaagctgaaaaacaaatggtggtacgataagggggaatgtggagccaaggactccgggagtaaggacaagaccagcgctctgagcctgagcaatgtggcaggcgttttctatatacttgtcggaggtctggggctggccatgatggtggctttgatagaattctgttacaaatcacgggcagagtccaaacgcatgaaactcacaaagaacacccaaaactttaagcctgctcctgccaccaacactcagaattatgctacatacagagaaggctacaacgtgtatggaacagagagtgttaagatctagggatcccttcccactggaggcatgtgatgagaggaaatcaccgaaaacgtggctgcttcaaggatcctgagccagatttcactctccttggtgtcgggcatgacacgaatattgctgatggtgcaatgacctttcaataggaaaaactgatttttttttccttcagtgccttatggaacactctgagactcgcgacaatgcaaaccatcattgaaatctttttgctttgcttgaaaaaaaataattaaaataaaaaccaacaaaaatggacatgcaagattccagtatgcgaaaaaaaatcttattaagtcaattcaacaaaagccattctttgataccactgcagagtatataaacaccatgttctttaatacacacacacacacacacacacacacacacacacatttaaattccaattcagcaaagaggcccatctaagctaaaaaaattaattcttcctgattaaaaagaaaaaatctgtctcccagtgtttgggaagacggactggcatttcttctaggatctgctgaccagatgtttttggtatttcctgttggtggtgatgttctgtgcactctatttcctttcaatgttgctgaaatgtgtatatctttagaatgtaaatgcaacacttaagaaaattcaaacactttggaaaagggactaaacagtgatttctctgtgttcttgaaatggttttgtgaaaatgctttgataacttcccactcaaagaagagatttacagagctttcgaaattgactttgtgtgtagcaagggacggggcactatcaggatacctcttggtgctttcctaaaatggatcccggggctttccaaggagcctggaatttcagctcacagatctgtttttcttgcttcagtgtgcattttaagtcaatagagctgagtatctagcattgaggtgagggaaatgctgcctatactcccagatgtgtttagaatatctcagaaacaacactgtgtttagctcggctttctctgctaagtatgcctttcaagtgtacaccacggagacaggaccgcgttgcaaggcgggacagcaggttcagaccacagttctcagtctgactttactcttgctaggtctgtcctactagctgttgcctgctaccgcccatggctctccatcggactgcatgtgtccttttctagtttgcaaagactaaaatgcattcccaaacctactgctaatctgagggcctcagcatcacttccagatccttgcttggagcagtctctctattgactctctcagatcgctccactgctccatgggctatcaagtaactaactgcatacctgccgttggcatcatcagaacagtccgaagaaatagtctccactcactaattacctcctatataacgacgtatgcttcctgtagttcagtagtttgctctcatcgataacgtgcattgggaagtttccagactgcaaaaactaggagctcgcattcatttcccaagtgtgacccttagatgcttagttgactcgctgcatatttgctcttgtcttcagaaaagaaaggaagaagtatcgttccaacgaaatgtttccagaaaagtgtactataaactttcattccaaaaatggtgtcataagcaaacaactcacttgtcaaatttcaaatggtattgaacaaaaaaagaaagctgttgtgtttttgttttgttttgttttcatgaaactgtgattttcaacttatgaatgctataatgtcccagcgcgggaagctcacgctgtgtgaacatgaagttgtataaaacaaaccaaccaacctacacacaaatgttttcataggcactgtataaagaaaaatgtatgtttattaactcaaatcagtttttcagagaggaaacgtcactgagatgaagaggcgggtaaattggtttgttattttttaaaaaaaacttgcatgtttaaaaaaaagttgattgcttcaaatttctgctactaacttcaagctatgggagtttggcagtagtcacttgaggattttttttccaattcttttctttttgttgttaaagctgtacttcagtgaacagaaaaattgccaagcaaactaatggctataaaagcgtaatttgcatgtgtgggcataaactacagagcctcattgccatgaggtattgtacaaagttttaatacattttgtaaataaaattgtaaagaaagaa

SEQ ID NO: 8937 - DNA, 644 bp, Homo sapiens
  source 1..644: mol_type = unassigned DNA
caaagcgtgctccgggcggtcttctttttagtcctggggcttttgggtcattctcacggaggattccccaacaccatcagcataggtggacttttcatgagaaacacagtgcaggagcacagcgctttccgctttgccgtgcagttatacaacaccaaccagaacaccaccgagaagcccttccatttgaattaccacgtagatcacttggattcctccaatagtttttccgtgacaaatgctttctgctcccagttctcgagaggggtgtatgccatctttggattctatgaccagatgtcaatgaacaccctgacctccttctgtggggccctgcacacatcctttgttacgcctagcttccccactgacgcagatgtgcagtttgtcatccagatgcgcccagccttgaagggcgctattctgagtcttctgggtcattacaagtgggagaagtttgtgtacctctatgacacagaacgaggtaagaagaggcacctgctctgctctttagatattcatgtaattgtgttcaaacttcctcagcttatgtgccctttgcttccaataaataaaatctaattctgttttaaaattgtatttaatattccaaataaatcaaaggttaagattaaaaaataaaa

SEQ ID NO: 8938 - DNA, 506 bp, Homo sapiens
  source 1..506: mol_type = unassigned DNA
ggttgtgatcctagggaaacactcaagaggttatcactacatgctcgctaacctgttccctttgatactgagctctatctggcaaagacatctttgtacatttacatggaacttcccctggtaacaatcctaaagtgagaagacttggatattccatgaatgctttaacgaagacctctcagaggtcaagatgtacatttcagagtggacaatgagctgcagaaaattctagcttgttgaaatcccggaaagaaacagaagatttcaccaggagtacaacccagagatgtgatctactcaggctagaagtggacatcccaatagagcaagactctctctaacatggcgctgtttgtcaacgttagtcccagaattagccatcatgtgtacaatctgtcagtcaagcagcctctcaatctctcatggtcttcttcttctgttctctactttccctttctttgttccgacattttttatgttctaaataaaaaattcaaatgctcaaa

SEQ ID NO: 8939 - DNA, 554 bp, Homo sapiens
  source 1..554: mol_type = unassigned DNA
tactgttgtaatatattataatgttccattgcctttgttttccccaagatctaatcacgttgttcatttctcttaggacaagaccagcgctctgagcctgagcaatgtggcaggcgttttctatatacttgtcggaggtctggggctggccatgatggtggctttgatagaattctgttacaaatcacgggcagagtccaaacgcatgaaactcacaaagaacacccaaaactttaagcctgctcctgccaccaacactcagaattatgctacatacagagaaggctacaacgtgtatggaacagagagtgttaagatctagggatcccttcccactggaggcatgtgatgagaggaaatcaccgaaaacgtggctgcttcaaggatcctgagccagatttcactctccttggtgtcgggcatgacacgaatattgctgatggtgcaatgacctttcaataggaaaaactgatttttttttccttcagtgccttatggaacactctgagactcgcgacaatgcaaaccatcattgaaatctttttgctttgctt

SEQ ID NO: 8940 - DNA, 5173 bp, Homo sapiens
  source 1..5173: mol_type = unassigned DNA
agagatcctgggagcgagagggagagagagggagcaagaaaggaagagagagcgagcgagagagagcgagcgaataagagagagagtaagagggagagagaagaagaggaagaagaggaggcggcggcagcggaggaggaggaggactagtgtggggtggaaaggaagagtgagcgagagcaagttaaggggagggggtgtaagagccagcgaattctttttctttttctattattattttgacgactcctgagttgcgcccatgctcttgtcagcttcgttttaggcgtagcatggccaggcagaagaaaatggggcaaagcgtgctccgggcggtcttctttttagtcctggggcttttgggtcattctcacggaggattccccaacaccatcagcataggtggacttttcatgagaaacacagtgcaggagcacagcgctttccgctttgccgtgcagttatacaacaccaaccagaacaccaccgagaagcccttccatttgaattaccacgtagatcacttggattcctccaatagtttttccgtgacaaatgctttctgctcccagttctcgagaggggtgtatgccatctttggattctatgaccagatgtcaatgaacaccctgacctccttctgtggggccctgcacacatcctttgttacgcctagcttccccactgacgcagatgtgcagtttgtcatccagatgcgcccagccttgaagggcgctattctgagtcttctgggtcattacaagtgggagaagtttgtgtacctctatgacacagaacgaggattttccatcctccaagcgattatggaagcagcagtgcaaaacaactggcaagtaacagcaaggtctgtgggaaacataaaggacgtccaagaattcaggcgcatcattgaagaaatggacaggaggcaggaaaagcgatacttgattgactgcgaagtcgaaaggattaacacaattttggaacaggttgtgatcctagggaaacactcaagaggttatcactacatgctcgctaacctgggttttactgatattttactggaaagagtcatgcatgggggagccaacattacaggtttccagattgtcaacaatgaaaaccctatggttcagcagttcatacagcgctgggtgaggctggatgaaagggaattccctgaagccaagaatgcaccactaaagtatacatctgcattgacacacgacgcaatactggtcatagcagaagctttccgctacctgaggaggcagcgagtagatgtgtcccggagaggaagtgctggagactgcttagcaaatcctgctgtgccctggagtcaaggaattgatattgagagagctctgaaaatggtgcaagtacaaggaatgactggaaatattcaatttgacacttatggacgtaggacaaattataccatcgatgtgtatgaaatgaaagtcagtggctctcgaaaagctggctactggaatgagtatgaaaggtttgtgcctttctcagatcagcaaatcagcaatgacagtgcatcctcagagaatcggaccatagtagtgactaccattctggaatcaccatatgtaatgtacaagaagaaccatgagcaactggaaggaaatgaacgatatgaaggctattgtgtagacctagcctatgaaatagccaaacatgtaaggatcaaatacaaattgtccatcgttggtgacgggaaatatggtgcaagggatccagagactaaaatatggaacggcatggttggggaacttgtctatgggagagctgatatagctgttgctccactcactataacattggtccgtgaagaagtcatagatttttcaaagccattcatgagcctgggcatctccatcatgataaagaagcctcagaaatcaaaaccaggcgtattctcatttctggatcccctggcttatgaaatctggatgtgcattgtctttgcttacattggagtcagcgtagttcttttcctagtcagcaggttcagtccttatgaatggcacttggaagacaacaatgaagaacctcgtgacccacaaagtcctcctgatcctccaaatgaatttggaatatttaacagtctttggttttccttgggtgcctttatgcagcaaggatgtgatatttctccaagatcactctccgggcgcattgttggaggggtttggtggttcttcaccctgatcataatttcttcctatactgccaatctcgctgctttcctgactgtggagaggatggtttctcccatagagagtgctgaagacttagctaaacagactgaaattgcatatgggaccctggactccggttcaacaaaagaatttttcagaagatccaaaattgctgtgtacgagaaaatgtggtcttacatgaaatcagcggagccatctgtgtttaccaaaacaacagcagacggagtggcccgagtgcgaaagtccaagggaaagttcgccttcctgctggagtcaaccatgaatgagtacattgagcagagaaaaccatgtgatacgatgaaagttggtggaaatctggattccaaaggctatggtgtggcaacccctaaaggctcagcattaagaaatgctgttaacctggcagtattaaaactgaatgagcaaggcctcttggacaaattgaaaaacaaatggtggtacgacaaaggagagtgcggcagcgggggcggtgactccaaggacaagaccagcgctctgagcctgagcaatgtggcaggcgttttctatatacttgtcggaggtctggggctggccatgatggtggctttgatagaattctgttacaaatcacgggcagagtccaaacgcatgaaactcacaaagaacacccaaaactttaagcctgctcctgccaccaacactcagaattatgctacatacagagaaggctacaacgtgtatggaacagagagtgttaagatctagggatcccttcccactggaggcatgtgatgagaggaaatcaccgaaaacgtggctgcttcaaggatcctgagccagatttcactctccttggtgtcgggcatgacacgaatattgctgatggtgcaatgacctttcaataggaaaaactgatttttttttccttcagtgccttatggaacactctgagactcgcgacaatgcaaaccatcattgaaatctttttgctttgcttgaaaaaaaataattaaaataaaaaccaacaaaaatggacatgcaagattccagtatgcgaaaaaaaatcttattaagtcaattcaacaaaagccattctttgataccactgcagagtatataaacaccatgttctttaatacacacacacacacacacacacacacacacacacatttaaattccaattcagcaaagaggcccatctaagctaaaaaaattaattcttcctgattaaaaagaaaaaatctgtctcccagtgtttgggaagacggactggcatttcttctaggatctgctgaccagatgtttttggtatttcctgttggtggtgatgttctgtgcactctatttcctttcaatgttgctgaaatgtgtatatctttagaatgtaaatgcaacacttaagaaaattcaaacactttggaaaagggactaaacagtgatttctctgtgttcttgaaatggttttgtgaaaatgctttgataacttcccactcaaagaagagatttacagagctttcgaaattgactttgtgtgtagcaagggacggggcactatcaggatacctcttggtgctttcctaaaatggatcccggggctttccaaggagcctggaatttcagctcacagatctgtttttcttgcttcagtgtgcattttaagtcaatagagctgagtatctagcattgaggtgagggaaatgctgcctatactcccagatgtgtttagaatatctcagaaacaacactgtgtttagctcggctttctctgctaagtatgcctttcaagtgtacaccacggagacaggaccgcgttgcaaggcgggacagcaggttcagaccacagttctcagtctgactttactcttgctaggtctgtcctactagctgttgcctgctaccgcccatggctctccatcggactgcatgtgtccttttctagtttgcaaagactaaaatgcattcccaaacctactgctaatctgagggcctcagcatcacttccagatccttgcttggagcagtctctctattgactctctcagatcgctccactgctccatgggctatcaagtaactaactgcatacctgccgttggcatcatcagaacagtccgaagaaatagtctccactcactaattacctcctatataacgacgtatgcttcctgtagttcagtagtttgctctcatcgataacgtgcattgggaagtttccagactgcaaaaactaggagctcgcattcatttcccaagtgtgacccttagatgcttagttgactcgctgcatatttgctcttgtcttcagaaaagaaaggaagaagtatcgttccaacgaaatgtttccagaaaagtgtactataaactttcattccaaaaatggtgtcataagcaaacaactcacttgtcaaatttcaaatggtattgaacaaaaaaagaaagctgttgtgtttttgttttgttttgttttcatgaaactgtgattttcaacttatgaatgctataatgtcccagcgcgggaagctcacgctgtgtgaacatgaagttgtataaaacaaaccaaccaacctacacacaaatgttttcataggcactgtataaagaaaaatgtatgtttattaactcaaatcagtttttcagagaggaaacgtcactgagatgaagaggcgggtaaattggtttgttattttttaaaaaaaacttgcatgtttaaaaaaaagttgattgcttcaaatttctgctactaacttcaagctatgggagtttggcagtagtcacttgaggattttttttccaattcttttctttttgttgttaaagctgtacttcagtgaacagaaaaattgccaagcaaactaatggctataaaagcgtaatttgcatgtgtgggcataaactacagagcctcattgccatgaggtattgtacaaagttttaatacattttgtaaataaaattgt

SEQ ID NO: 8941 - DNA, 2991 bp, Homo sapiens
  source 1..2991: mol_type = unassigned DNA
agcggaggaggaggaggactagtgtggggtggaaaggaagagtgagcgagagcaagttaaggggagggggtgtaagagccagcgaattctttttctttttctattattattttgacgactcctgagttgcgcccatgctcttgtcagcttcgttttaggcgtagcatggccaggcagaagaaaatggggcaaagcgtgctccgggcggtcttctttttagtcctggggcttttgggtcattctcacggaggattccccaacaccatcagcataggtggacttttcatgagaaacacagtgcaggagcacagcgctttccgctttgccgtgcagttatacaacaccaaccagaacaccaccgagaagcccttccatttgaattaccacgtagatcacttggattcctccaatagtttttccgtgacaaatgctttctgctcccagttctcgagaggggtgtatgccatctttggattctatgaccagatgtcaatgaacaccctgacctccttctgtggggccctgcacacatcctttgttacgcctagcttccccactgacgcagatgtgcagtttgtcatccagatgcgcccagccttgaagggcgctattctgagtcttctgggtcattacaagtgggagaagtttgtgtacctctatgacacagaacgaggattttccatcctccaagcgattatggaagcagcagtgcaaaacaactggcaagtaacagcaaggtctgtgggaaacataaaggacgtccaagaattcaggcgcatcattgaagaaatggacaggaggcaggaaaagcgatacttgattgactgcgaagtcgaaaggattaacacaattttggaacaggttgtgatcctagggaaacactcaagaggttatcactacatgctcgctaacctgggttttactgatattttactggaaagagtcatgcatgggggagccaacattacaggtttccagattgtcaacaatgaaaaccctatggttcagcagttcatacagcgctgggtgaggctggatgaaagggaattccctgaagccaagaatgcaccactaaagtatacatctgcattgacacacgacgcaatactggtcatagcagaagctttccgctacctgaggaggcagcgagtagatgtgtcccggagaggaagtgctggagactgcttagcaaatcctgctgtgccctggagtcaaggaattgatattgagagagctctgaaaatggtgcaagtacaaggaatgactggaaatattcaatttgacacttatggacgtaggacaaattataccatcgatgtgtatgaaatgaaagtcagtggctctcgaaaagctggctactggaatgagtatgaaaggtttgtgcctttctcagatcagcaaatcagcaatgacagtgcatcctcagagaatcggaccatagtagtgactaccattctggaatcaccatatgtaatgtacaagaagaaccatgagcaactggaaggaaatgaacgatatgaaggctattgtgtagacctagcctatgaaatagccaaacatgtaaggatcaaatacaaattgtccatcgttggtgacgggaaatatggtgcaagggatccagagactaaaatatggaacggcatggttggggaacttgtctatgggagagctgatatagctgttgctccactcactataacattggtccgtgaagaagtcatagatttttcaaagccattcatgagcctgggcatctccatcatgataaagaagcctcagaaatcaaaaccaggcgtattctcatttctggatcccctggcttatgaaatctggatgtgcattgtctttgcttacattggagtcagcgtagttcttttcctagtcagcaggttcagtccttatgaatggcacttggaagacaacaatgaagaacctcgtgacccacaaagtcctcctgatcctccaaatgaatttggaatatttaacagtctttggttttccttgggtgcctttatgcagcaaggatgtgatatttctccaagatcactctccgggcgcattgttggaggggtttggtggttcttcaccctgatcataatttcttcctatactgccaatctcgctgctttcctgactgtggagaggatggtttctcccatagagagtgctgaagacttagctaaacagactgaaattgcatatgggaccctggactccggttcaacaaaagaatttttcagaagatccaaaattgctgtgtacgagaaaatgtggtcttacatgaaatcagcggagccatctgtgtttaccaaaacaacagcagacggagtggcccgagtgcgaaagtccaagggaaagttcgccttcctgctggagtcaaccatgaatgagtacattgagcagagaaaaccatgtgatacgatgaaagttggtggaaatctggattccaaaggctatggtgtggcaacccctaaaggctcagcattaagaaatgctgttaacctggcagtattaaaactgaatgagcaaggcctcttggacaaattgaaaaacaaatggtggtacgacaaaggagagtgcggcagcgggggcggtgactccaagaacgcctgtaaaccttgcagtattgaaactcagtgaacaaggcatcttagacaagctgaaaaacaaatggtggtacgataagggggaatgtggagccaaggactccgggagtaaggacaagaccagcgctctgagcctgagcaatgtggcaggcgttttctatatacttgtcggaggtctggggctggccatgatggtggctttgatagaattctgttacaaatcacgggcagagtccaaacgcatgaaactcacaaagaacacccaaaactttaagcctgctcctgccaccaacactcagaattatgctacatacagagaaggctacaacgtgtatggaacagagagtgttaagatctagggatcccttcccactggaggcatgtg

SEQ ID NO: 8942 - DNA, 5834 bp, Homo sapiens
  source 1..5834: mol_type = unassigned DNA
actgcaccgggaccagcgcctccccgcttcgcgctgccctcggcctcgccccgggcccgggtggatgagccgcgcgcccgggggacatggaagcgctgacgctgtggcttctcccctggatatgccagtgcgtgtcggtgcgggccgactccatcatccacatcggtgccatcttcgaggagaacgcggccaaggacgacagggtgttccagttggcggtatccgacctgagcctcaacgatgacatcctgcagagcgagaagatcacctactccatcaaggtcatcgaggccaacaacccattccaggctgtgcaggaagcctgtgacctcatgacccaggggattttggccttggtcacgtccactggctgtgcatctgccaatgccctgcagtccctcacggatgccatgcacatcccacacctctttgtccagcgcaacccgggagggtcgccacgcaccgcatgccacctgaaccccagccccgatggtgaggcctacacactggcttcgagaccacccgtccgcctcaatgatgtcatgctcaggctggtgacggagctgcgctggcagaagttcgtcatgttctacgacagcgagtatgatatccgtgggcttcaaagctttctggaccaggcctcgcggctgggccttgacgtctctttacaaaaggtggacaagaacattagccacgtattcaccagcctcttcaccacgatgaagacagaggagctgaatcgctaccgggacacgcttcgccgcgccatcctgctgctcagcccacagggagcccactccttcatcaacgaggccgtggagaccaacctggcttccaaggacagccactgggtctttgtgaatgaggaaatcagtgacccggagatcctggatctggtccatagtgcccttggaaggatgaccgtggtccggcaaatctttccgtctgcaaaggacaatcagaaatgcacgaggaacaaccaccgcatctcctccctgctctgcgacccccaggaaggctacctccagatgctgcagatctccaacctctatctgtatgacagtgttctgatgctggccaacgcctttcacaggaagctggaggaccggaagtggcatagcatggcgagcctcaactgcatacggaaatccactaagccatggaatggtgggaggtccatgctggataccatcaaaaagggccacatcactggcctcactggggtgatggagtttcgggaggacagttcgaatccctatgtccagtttgaaatccttggcactacctatagtgagacttttggcaaagacatgcgcaagttggcgacatgggactcagagaagggcttgaatggcagcttgcaagagaggcccatgggcagccgcctccaaggattgactcttaaagtggtgactgtcttggaagagcctttcgtgatggtggctgagaacatcctaggacagcccaagcgctacaaagggttctccatagatgtcctggatgcactggccaaggctctgggctttaaatatgagatttaccaagcccctgatggcaggtacggtcaccagctccataacacctcctggaacgggatgatcggggagctcatcagcaagagagcagacttggccatctctgccatcaccatcaccccagagagggagagcgttgtggacttcagcaagcggtacatggactattcagtggggattctaattaagaagcccgaggagaaaatcagcatcttctccctctttgctccatttgatttcgctgtgtgggcctgcattgcagcagccatccctgtggttggtgtgctgatatttgtgttgaacaggatacaggctgtgagggctcagagtgctgcccagcccaggccgtcagcttctgccactctgcacagcgccatctggattgtctatggagccttcgtacagcaaggtggcgaatcttccgtgaactccatggccatgcgcatcgtgatgggcagctggtggctcttcacgctcattgtgtgctcctcctacacagccaaccttgctgccttcctcacagtgtccaggatggacaaccccataaggactttccaggacctgtccaaacaagtggaaatgtcttatggcactgtccgggattctgctgtatatgagtacttccgagccaagggcaccaaccccctggagcaggacagcacgtttgctgaactctggcggaccatcagcaagaacggaggggctgacaactgcgtgtccagtccttcagaaggcatcaggaaggcaaagaaggggaactacgccttcctgtgggatgtggccgtggtggaatacgcagccctgacggatgacgactgctcggtgactgtcatcggcaacagcatcagcagcaagggttacgggattgccctgcagcatggcagcccctacagggacctcttctcccagaggatcctggagctgcaggacacaggggacctggatgtgctgaagcagaagtggtggccgcacatgggccgctgtgacctcaccagccatgccagcgcccaggccgacggcaaatccctcaagctgcacagcttcgccggggtcttctgcatcctggccattggcctgctcctggcctgcctggtggctgccctggagttgtggtggaacagcaaccggtgccaccaggagacccccaaggaggacaaagaagtgaacttggagcaggtccaccggcgcatgaacagcctcatggatgaagacattgctcacaagcagatttccccagcgtcgattgagctctcggccctggagatggggggcctggctcccacccagaccttggagccgacacgggagtaccagaacacccagctctcggtcagcacctttctgccagagcagagcagccatggcaccagccggacactctcatcagggcccagcagcaacctgccgctgccgctgagcagctcggcgaccatgccctccatgcagtgcaaacacaggtcacccaacggggggctgttccggcagagcccggtgaagacccccatccccatgtccttccagcccgtgcctggaggcgtccttccagaggctctggacacctcccacgggacctccatctgactgcgccgcctgccctcctgcccaccctcccacccacccgaccagcagagctttttaatacaagaaaacaacaacacaaaccacacacactcgcacacacacacatacacagagactctttcatttttcttgtacatatgtgtaaataatgacagaatggagtggggtaaaagtgtattttgaatattcccaattttcgaagtcagtaaaaaaacacaaaaactgtatgaatgactttgtaaattttgttctatatgaataaaaaggcaaattacttgtgatcattctgaagtgccaaaggagcccccccattcctgggcctttctgagggcaggaggggcgaccagataaggagcccctctctgctgggggagaagggaagacgaggaaccccacatgccactcgctgccttgtcccacagcttgctgccccatttctttgctcctggcacctcgtcccttttagtccctcagcttgataaagagtgagtttggagcccgcattgggctggcccactgggttgctgtgctgtagggtgatcggctgttctgggtagcctggggctgaggaggtgccctggactcagggctatcctgtcctgtcttggatcttgcgggacgagttagtcaccgctgtgtgtgttgcagtgtgcctctgccccatgggcccgagagaagctgacaattacccatagtgaggtaattgagggctttgatactgagctgttctcatatcatactgttggccttgtttttcattttcttttcaaaattagaagaatcaaaaagtgatagaatattgggggaaggagggcagactccatcgtttcctcagggagactgggcggaggtggggttggtctggaagaaggtccatgggggcagggagttgcgaggtggggttagttgcatggaccaggtgaggtggtggaacaaaaggccaggtagaggaagaatattcccttgggtttggacccatggtcccaggtgagagaaggaagtgaggccatagatgcagggagtagaagctttgtggtgtcaggcaaacggactctgttagtaagagttgggggaggtgcccaggtgggtggaccagtactccaggtgatggggcatgctgagaaatagagaaaagagaccatgtttatttgggtaggaggaagccttgccttgcgccttaggtgagaagcataagtgtaactcccatccaccagggaagttgcttgtagccccaaaagtaaaggcctatctctgggtcataaatcctgcaggcagtccaacaaacagggctggctccagcacaaactctcccttccacctttacgaccctctccagaccagacctggagtcctcttcaagcagcaatccaacccagagcaggggccctccccactcaggcatctgataacctctgagatttccaggcctatccctgtgcaggtacagctgcagggaagcccagttttctaagcctaggaccacctaacagcgccccctccttcagttgccctttctgaggcaactaaactacagaatcagggaaagaaccattaggagtggaactgggggaatctgagttgtgtcacttcagttcctctcctaaagacaaaggttagtctgatctccagacccgtcagaatggaatacacagcccacatctgtcactgaaggaggtggagctcccacagccagcagtaatcagggagctgagagcctggttctgtgatcatggagaaatacaaagtcctattgattgcttcttctatagccttgtagagtttctagagagatgtatttatgagggtgataactagcccaggattgatttctttcctaaagtccctagtgacatgattgagcagtaaagaacggccaaatcacacagtcagctaaaagcactgtggggaagagagtgtttataattatgttatttattgctggatgctgagaatggtctgatattcgtgctacctaggcaatccattgacatttctccaatcagagcatgtggaccttggagccaggcatgctcagagaagcctaggtgggctaccatgaccccgaggaagagcaggctttgttttccatcagcacgttgggggccctgccctgaatggtcaatttttcacatatatatctctctatttttttaatcaaactctggtctcactgccttatctcacaccaactctgtttcctcattgccccctgagatggcctgtcttctggggtatagcttggatgtcttcttggatggttctgcttagaatgagtgtcaaggaggaaagagagggagatggaggatgtgtttgtgcgcctgtgtgtgtgtgtttgtgtgtgtgtgtgtgtgtgagagagagagagagagagagagagaccagcatcttcaagagaagtattctgcttatacaaaatccttaacacctcatggtgttattcttcaccatgtttatatatatatatatatatttttttttttttttagaattttctacccttggcatgaggggaaatgattgatattcaagcaagttctctaggaaaaaaaaaaacttcccaactcagatttctgtgtcagctcagaatgtatctttttttcatgctttgctctttggatttataactctgtttagactattccatacattttaggtatattttgtgccttcagacactgcaaataataatcagcatttggattaaagttgtttaataat

SEQ ID NO: 8943 - DNA, 787 bp, Homo sapiens
  source 1..787: mol_type = unassigned DNA
tgggcagcgccagagagcccttccctaccctgccccgcccatgtgcctccaccctgacctggagagaccacctgtagggacaaagaagtgaacttggagcaggtccaccggcgcatgaacagcctcatggatgaagacattgctcacaagcagatttccccagcgtcgattgagctctcggccctggagatggggggcctggctcccacccagaccttggagccgacacgggagtaccagaacacccagctctcggtcagcacctttctgccagagcagagcagccatggcaccagccggacactctcatcagggcccagcagcaacctgccgctgccgctgagcagctcggcgaccatgccctccatgcagtgcaaacacaggtcacccaacggggggctgttccggcagagcccggtgaagacccccatccccatgtccttccagcccgtgcctggaggcgtccttccagaggctctggacacctcccacgggacctccatctgactgcgccgcctgccctcctgcccaccctcccacccacccgaccagcagagctttttaatacaagaaaacaacaacacaaaccacacacactcgcacacacacacatacacagagactctttcatttttcttgtacatatgtgtaaataatgacagaatggagtggggtaaaagtgtattttgaatattcccaattttcgaagtcagtaaaaaaacacaaaaactgtatgaatgactttgtaaattttgttctatatgaataaaaaggcaaattacttgtg

SEQ ID NO: 8944 - DNA, 3243 bp, Homo sapiens
  source 1..3243: mol_type = unassigned DNA
ggggagcggcccgggactgcaccgggaccagcgcctccccgcttcgcgctgccctcggcctcgccccgggcccgggtggatgagccgcgcgcccgggggacatggaagcgctgacgctgtggcttctcccctggatatgccagtgcgtgtcggtgcgggccgactccatcatccacatcggtgccatcttcgaggagaacgcggccaaggacgacagggtgttccagttggcggtatccgacctgagcctcaacgatgacatcctgcagagcgagaagatcacctactccatcaaggtcatcgaggccaacaacccattccaggctgtgcaggaagcctgtgacctcatgacccaggggattttggccttggtcacgtccactggctgtgcatctgccaatgccctgcagtccctcacggatgccatgcacatcccacacctctttgtccagcgcaacccgggagggtcgccacgcaccgcatgccacctgaaccccagccccgatggtgaggcctacacactggcttcgagaccacccgtccgcctcaatgatgtcatgctcaggctggtgacggagctgcgctggcagaagttcgtcatgttctacgacagcgagtatgatatccgtgggcttcaaagctttctggaccaggcctcgcggctgggccttgacgtctctttacaaaaggtggacaagaacattagccacgtattcaccagcctcttcaccacgatgaagacagaggagctgaatcgctaccgggacacgcttcgccgcgccatcctgctgctcagcccacagggagcccactccttcatcaacgaggccgtggagaccaacctggcttccaaggacagccactgggtctttgtgaatgaggaaatcagtgacccggagatcctggatctggtccatagtgcccttggaaggatgaccgtggtccggcaaatctttccgtctgcaaaggacaatcagaaatgcacgaggaacaaccaccgcatctcctccctgctctgcgacccccaggaaggctacctccagatgctgcagatctccaacctctatctgtatgacagtgttctgatgctggccaacgcctttcacaggaagctggaggaccggaagtggcatagcatggcgagcctcaactgcatacggaaatccactaagccatggaatggtgggaggtccatgctggataccatcaaaaagggccacatcactggcctcactggggtgatggagtttcgggaggacagttcgaatccctatgtccagtttgaaatccttggcactacctatagtgagacttttggcaaagacatgcgcaagttggcgacatgggactcagagaagggcttgaatggcagcttgcaagagaggcccatgggcagccgcctccaaggattgactcttaaagtggtgactgtcttggaagagcctttcgtgatggtggctgagaacatcctaggacagcccaagcgctacaaagggttctccatagatgtcctggatgcactggccaaggctctgggctttaaatatgagatttaccaagcccctgatggcaggtacggtcaccagctccataacacctcctggaacgggatgatcggggagctcatcagcaagagagcagacttggccatctctgccatcaccatcaccccagagagggagagcgttgtggacttcagcaagcggtacatggactattcagtggggattctaattaagaagcccgaggagaaaatcagcatcttctccctctttgctccatttgatttcgctgtgtgggcctgcattgcagcagccatccctgtggttggtgtgctgatatttgtgttgaacaggatacaggctgtgagggctcagagtgctgcccagcccaggccgtcagcttctgccactctgcacagcgccatctggattgtctatggagccttcgtacagcaaggtggcgaatcttccgtgaactccatggccatgcgcatcgtgatgggcagctggtggctcttcacgctcattgtgtgctcctcctacacagccaaccttgctgccttcctcacagtgtccaggatggacaaccccataaggactttccaggacctgtccaaacaagtggaaatgtcttatggcactgtccgggattctgctgtatatgagtacttccgagccaagggcaccaaccccctggagcaggacagcacgtttgctgaactctggcggaccatcagcaagaacggaggggctgacaactgcgtgtccagtccttcagaaggcatcaggaaggatcctggagctgcaggacacaggggacctggatgtgctgaagcagaagtggtggccgcacatgggccgctgtgacctcaccagccatgccagcgcccaggccgacggcaaatccctcaagctgcacagcttcgccggggtcttctgcatcctggccattggcctgctcctggcctgcctggtggctgccctggagttgtggtggaacagcaaccggtgccaccaggagacccccaaggaggacaaagaagtgaacttggagcaggtccaccggcgcatgaacagcctcatggatgaagacattgctcacaagcagatttccccagcgtcgattgagctctcggccctggagatggggggcctggctcccacccagaccttggagccgacacgggagtaccagaacacccagctctcggtcagcacctttctgccagagcagagcagccatggcaccagccggacactctcatcagggcccagcagcaacctgccgctgccgctgagcagctcggcgaccatgccctccatgcagtgcaaacacaggtcacccaacggggggctgttccggcagagcccggtgaagacccccatccccatgtccttccagcccgtgcctggaggcgtccttccagaggctctggacacctcccacgggacctccatctgactgcgccgcctgccctcctgcccaccctcccacccacccgaccagcagagctttttaatacaagaaaacaacaacacaaaccacacacactcgcacacacacacatacacagagactctttcatttttcttgtacatatgtgtaaataatgacagaatggagtggggtaaaagtgtattttgaatattcccaattttcgaagtcagtaaaaaaacacaaaaactgtatgaatgactttgtaaattttgttctatatgaataaaaaggcaaattacttgt

SEQ ID NO: 8945 - DNA, 6117 bp, Homo sapiens
  source 1..6117: mol_type = unassigned DNA
agtcccggttgaagattccatgggaaatgagagcactattttgtttctcccttgtattgcagatagggggaggaggtggttattagagagaagctcttcctctcttggtttccccctctctccgcctgacagcaccgctctctcgcaggctcgctccttctcctaggtgatccatttctaggcaacgtggggctggtgctgaagctgccaggctcgctccttgcttcctgcatcccgccaggcgaaacgctccaaaagcatcctgcagcctgcggcggcttccctcctctggcccggccccgctgctcgcgcccggcgcaacccccccgccaccgcgccccagcaaaccggctccccgggcccgcctcgccaagctgcgttccgcgcctcacgcagaaagggaattttctctgcattactatctgcattaccttgaagttcactttttctacccctcttggagagggcttttttcccccctccctggtggaatctggctgctccgtttggaatctcctaatctttcctttccacttagattctggcagcgaagaccagtgattctctgcgggctgtaggggcgggggcgggggtcttttttggtccgagagggtgcggggaagggggcacatccggcgtgaggggggtgttggaagttgcagcggagctgggaccggagacccgcggcccccgcgcagcgatgggtctgatctgagccccagcctctccccctgcccaagagcagtagaggctggatatatttttcaaaagccaaactgcaaacaactctggcgatgccaaaattcccctccaagtgacacggctttgcgaaggaggtttcctcaggctgggctctttctgtcattcccttctgcctttctcggcgacgataaaaggctttgctctggcaataggaatttagaaaaaaagaaaaagctgcgctaaactccaccgtgacctcaaactctttggactgtttgaaaaaaaaaaaattggaagaaaatccatcctccaagagaatcggcataggaggagatggaagttttcccctttctcttggttttgtccgtctggtggtctcgaacctgggactcggcgaatgcggattcgatcattcacatcggagcaatttttgatgaatctgccaaaaaggatgatgaggtatttcgcactgcggttggtgaccttaaccagaatgaggagatcttacagactgagaaaatcacattttcagtgacgtttgttgatggcaacaaccctttccaagcagttcaagaagcctgtgaacttatgaatcaaggcatcttggccctggtcagctccattggctgcacgtcagcaggatccctccagtctttggcagacgccatgcatatcccccacctcttcattcagcgctcaacagctgggaccccaaggagtggctgtggactcacccggagcaacaggaatgatgactacactctctcagttcgcccacctgtctacttgcatgatgttatcctaagagtggtcacagagtatgcctggcagaaattcattatattctatgatagtgaatacgatatccgtggaatacaggagttcttggacaaagtctctcagcagggaatggatgttgcacttcagaaggtagaaaacaacatcaataaaatgattaccactctctttgacaccatgagaatagaagaactgaatcgctatcgagacactcttaggcgagcgatccttgttatgaatcctgctacagccaaatccttcattactgaggttgtggagactaatttggttgcttttgactgtcactggatcattataaatgaggaaataaacgatgtggacgtacaggaacttgtaagaaggtcaattggaaggttaacgattattcggcagacatttccagttccccagaacataagtcagcggtgtttccgtggcaaccatcgaatatcttcaacattgtgtgatccaaaggatccatttgctcagaatatggagatttccaacctttacatatatgacacggtgcttctgcttgctaatgcttttcataagaagctggaggaccgaaagtggcacagcatggcaagtctgtcatgtatcagaaagaactcaaagccctggcagggtgggcgctccatgttggagaccatcaagaagggtggagttagtgggttgactggagagctagaatttggagaaaatggaggcaatcccaatgtccactttgaaatccttggaaccaactatggagaagagcttggcagaggtgttcgaaaacttggttgctggaatcctgtcacaggtctgaatgggtcactgactgacaagaaattggagaataacatgcgtggagtggttctacgtgtagtaactgttctggaagaaccttttgtgatggtctctgaaaatgtcttgggtaagccgaagaaataccagggcttctccattgatgttttggatgccttatctaactacctgggttttaactacgaaatttacgtagcaccggatcacaaatacggaagcccacaagaagatgggacatggaatggcttggtaggagaacttgtctttaagagagccgacatagggatttctgctttaaccatcactccagatcgtgaaaatgtggtggactttacgacacgttacatggactactcagtgggggtactacttcgaagggctgaaaagacagtggatatgtttgcctgtcttgcaccatttgatctctctctatgggcttgcattgctggcacagtccttctggtgggtctactggtctacctcttgaactggcttaatcccccacgattacaaatgggatcaatgacgtctactactctctacaactccatgtggtttgtgtatggatcttttgtacaacaaggcggggaagtcccgtacacgactctggctacccgaatgatgatgggggcttggtggctatttgctttgattgttatctcatcttacacggcaaacctcgctgctttcctcactattacacgcattgaaagttccatccagtctctccaggacctttccaagcaaacagaaatcccttatggcacagtcctagactctgcggtatatgagcatgtccgcatgaaaggactgaatccttttgagagggacagcatgtattcccaaatgtggcggatgatcaaccgaagcaatggatcggagaacaatgttctggagtcccaggcaggcattcaaaaggtaaaatatggaaattatgctttcgtatgggatgcagctgtattggaatatgtggctatcaatgacccagattgttccttttacaccattggaaatactgttgctgatcggggatatggaattgcattacaacatggcagtccttaccgagatgttttttcacaaaggatcctggagcttcagcagaatggtgacatggacatcctgaagcacaaatggtggcctaagaatggccagtgtgacctgtactcgtcagtggacacaaagcagaaaggaggcgccctggacataaagagctttgcaggggtcttttgtatcctggctgctggaattgtcctctcctgcttcatagccatgctggagacgtggtggaacaagaggaaaggctcccgggttccatcaaaagaggatgacaaggaaattgacctggagcacctccatagacgtgtaaatagcttgtgcacagatgacgacagcccccataaacagttttccacctcgtcaattgatttgacccctctggacattgacactttgccaacacgacaagcactggagcaaatcagtgatttcaggaacactcatattaccacaacaacctttatcccagagcagatccagactcttagccgcacactgtcagctaaagctgcttctggtttcacttttggcaacgtgcctgagcaccgaactggcccttttaggcacagggcacctaatgggggctttttcaggagtcctataaaaacaatgtcatctattccttatcaaccaactcctaccctggggctcaatctgggtaatgatccagaccgaggcacctccatatgagcatcaaacaaatctcttcactgtttcttttttaggactccctttgcaaggagcaactgtaatattgtgggactaacatggatgtaacgtttaaaaaaaagatcaggattattagtaacaattctagttttttcctcccaccttctccctctcctctctcctctatgattttctctctttccccctcccttcctgtacattttcctccactttttttcattactcaacttgttccccaagaaggtagtgtactaggatcctattagtctgcttttcatatactgtacatcaagtataggaaatgtgcactgagtatactaaaagtatatgcaggattaattttacataaaggcctcttctgtaacatttctctattttttgaaatacaattgcaataacttcagtctttttacattcttctgctgcatccatacaatgctccactgctgttgagtgtcctttaactgtggaccaaaggcaacccctgcagtgtttataaaacaattttaagaccattcaggccacataagatgagaatgcaattttgtaggattacaaaaaagccattaatatgccagtcaagactacagttaaaactactcttgcactgcaacagtgcatatgacctttatgtgattgtacagtattaaaagttttttcttatgtacagtaaactttatcatatggcagaagcctctattgtgttaaataaattagtatttcatatatatacatatatatgcacctatataatgtgtatatatataaaaaggcagccattgctattgcaattcatttaataaagctttagtttaaacaaaagtattgtatacaggaactatgtatagtgcaggggttcttttcagttagaaaaggcaggttgctttaatgttattctgactcgcattgtttgccaacagaaaatattttatacttttgttattaaagcatccagggcaatttaatatttgttcctagatgtaactcatttgaataggttttgcatttgttattcagcagtgtataaagctaaccttgataattttacttttaattaattatctaaatgaaaaatgctattagctgaaccacatccacaacagcacatagagctctagaagagttgaaacatagatcattgaaggttaaaaatcctcttccaaagcagcaagtcaatcaatacaataatgatatttggggaggggtgggagcccttaagaactattgatgtggccttaaattactgtcatttattatcctaaagaagaaaacataataaccataatgggctctcaactcaactcccttttttatttagttctatttggaggagttatgtattttttacattagtgccaagtatatagaaggatgacagcaaaaacagtgcctctttgtgcacaatccttttaaagtagcattcttacttgttagaaatgtagaatgaactttgtttgtaatccttaaattaaaatgtggtaagtaggaagcaagaacttattctgtgtttttacgcagccatacacttactttaatctaactcattctgtggctaggattgatataggaatcaacctatgtgatttgctttaggagaaattaaaaggtatattcttaagatatattatattttgatgctaattctgttctggggagcatcttgtattgtcactgttttgtactaaatcttcaaatattgtctactgtgtaaggcagaaaaatttcttatcatgcaaaaaccattttgtttccagggtaacaagtaactaagtgcatgcacaacttgttttcccttgtaacattcatgatctcatttacaactctgattttaaaacaaaaaaatctttacaacaagctatatagggacataccagatgttgcagtgattttagctatcaacaaactgttaaccatgtacaatatttaaaataggcttattttgatgtatcgcctattatacaaacacacaaaacatttttggaggcctcagttatgagtgacagagctttctgtgtataatttgtctaaataatttgtctaataaaaatgttttctaaa

SEQ ID NO: 8946 - DNA, 1491 bp, Homo sapiens
  source 1..1491: mol_type = unassigned DNA
attcccttctgcctttctcggcgacgataaaaggctttgctctggcaataggaatttagaaaaaaagaaaaagctgcgctaaactccaccgtgacctcaaactctttggactgtttgaaaaaaaaaaaattggaagaaaatccatcctccaagagaatcggcataggaggagatggaagttttcccctttctcttggttttgtccgtctggtggtctcgaacctgggactcggcgaatgcggattcgatcattcacatcggagcaatttttgatgaatctgccaaaaaggatgatgaggtatttcgcactgcggttggtgaccttaaccagaatgaggagatcttacagactgagaaaatcacattttcagtgacgtttgttgatggcaacaaccctttccaagcagttcaagaagcctgtgaacttatgaatcaaggcatcttggccctggtcagctccattggctgcacgtcagcaggatccctccagtctttggcagacgccatgcatatcccccacctcttcattcagcgctcaacagctgggaccccaaggagtggctgtggactcacccggagcaacaggaatgatgactacactctctcagttcgcccacctgtctacttgcatgatgttatcctaagagtggtcacagagtatgcctggcagaaattcattatattctatgatagtgaatacgatatccgtggaatacaggagttcttggacaaagtctctcagcagggaatggatgttgcacttcagaaggtagaaaacaacatcaataaaatgattaccactctctttgacaccatgagaatagaagaactgaatcgctatcgagacactcttaggcgagcgatccttgttatgaatcctgctacagccaaatccttcattactgaggttgtggagactaatttggttgcttttgactgtcactggatcattataaatgaggaaataaacgatgtggacgtacaggaacttgtaagaaggtcaattggaaggttaacgattattcggcagacatttccagttccccagaacataagtcagcggtgtttccgtggcaaccatcgaatatcttcaacattgtgtgatccaaaggatccatttgctcagaatatggaggtatattataaatgacaggatatttcttccagggtgctttgttgggcaattgcaaggagagctttatgagttgcattggattcagaattatacgtgttatttctgaacaattctcctccagcaatttcataagtctaatggggagaaagtgctaagaatttgcgtctttgttctttttgatctcattatagaaaaatttctacttgcttaataaaaaaatataataagtaaaggttattttcttctaaacaagtaggtccataacatttcccacaggagaatttgtaattggtactcctttttccaaactctaaattattaaactaataaatgtgcttgacttttctggcctaaga

SEQ ID NO: 8947 - DNA, 2739 bp, Homo sapiens
  source 1..2739: mol_type = unassigned DNA
atggaagttttcccctttctcttggttttgtccgtctggtggtctcgaacctgggactcggcgaatgcggattcgatcattcacatcggagcaatttttgatgaatctgccaaaaaggatgatgaggtatttcgcactgcggttggtgaccttaaccagaatgaggagatcttacagactgagaaaatcacattttcagtgacgtttgttgatggcaacaaccctttccaagcagttcaagaagatatccgtggaatacaggagttcttggacaaagtctctcagcagggaatggatgttgcacttcagaaggtagaaaacaacatcaataaaatgattaccactctctttgacaccatgagaatagaagaactgaatcgctatcgagacactcttaggcgagcgatccttgttatgaatcctgctacagccaaatccttcattactgaggttgtggagactaatttggttgcttttgactgtcactggatcattataaatgaggaaataaacgatgtggacgtacaggaacttgtaagaaggtcaattggaaggttaacgattattcggcagacatttccagttccccagaacataagtcagcggtgtttccgtggcaaccatcgaatatcttcaacattgtgtgatccaaaggatccatttgctcagaatatggagatttccaacctttacatatatgacacggtgcttctgcttgctaatgcttttcataagaagctggaggaccgaaagtggcacagcatggcaagtctgtcatgtatcagaaagaactcaaagccctggcagggtgggcgctccatgttggagaccatcaagaagggtggagttagtgggttgactggagagctagaatttggagaaaatggaggcaatcccaatgtccactttgaaatccttggaaccaactatggagaagagcttggcagaggtgttcgaaaacttggttgctggaatcctgtcacaggtctgaatgggtcactgactgacaagaaattggagaataacatgcgtggagtggttctacgtgtagtaactgttctggaagaaccttttgtgatggtctctgaaaatgtcttgggtaagccgaagaaataccagggcttctccattgatgttttggatgccttatctaactacctgggttttaactacgaaatttacgtagcaccggatcacaaatacggaagcccacaagaagatgggacatggaatggcttggtaggagaacttgtctttaagagagccgacatagggatttctgctttaaccatcactccagatcgtgaaaatgtggtggactttacgacacgttacatggactactcagtgggggtactacttcgaagggctgaaaagacagtggatatgtttgcctgtcttgcaccatttgatctctctctatgggcttgcattgctggcacagtccttctggtgggtctactggtctacctcttgaactggcttaatcccccacgattacaaatgggatcaatgacgtctactactctctacaactccatgtggtttgtgtatggatcttttgtacaacaaggcggggaagtcccgtacacgactctggctacccgaatgatgatgggggcttggtggctatttgctttgattgttatctcatcttacacggcaaacctcgctgctttcctcactattacacgcattgaaagttccatccagtctctccaggacctttccaagcaaacagaaatcccttatggcacagtcctagactctgcggtatatgagcatgtccgcatgaaaggactgaatccttttgagagggacagcatgtattcccaaatgtggcggatgatcaaccgaagcaatggatcggagaacaatgttctggagtcccaggcaggcattcaaaaggtaaaatatggaaattatgctttcgtatgggatgcagctgtattggaatatgtggctatcaatgacccagattgttccttttacaccattggaaatactgttgctgatcggggatatggaattgcattacaacatggcagtccttaccgagatgttttttcacaaaggatcctggagcttcagcagaatggtgacatggacatcctgaagcacaaatggtggcctaagaatggccagtgtgacctgtactcgtcagtggacacaaagcagaaaggaggcgccctggacataaagagctttgcaggggtcttttgtatcctggctgctggaattgtcctctcctgcttcatagccatgctggagacgtggtggaacaagaggaaaggctcccgggttccatcaaaagaggatgacaaggaaattgacctggagcacctccatagacgtgtaaatagcttgtgcacagatgacgacagcccccataaacagttttccacctcgtcaattgatttgacccctctggacattgacactttgccaacacgacaagcactggagcaaatcagtgatttcaggaacactcatattaccacaacaacctttatcccagagcagatccagactcttagccgcacactgtcagctaaagctgcttctggtttcacttttggcaacgtgcctgagcaccgaactggcccttttaggcacagggcacctaatgggggctttttcaggagtcctataaaaacaatgtcatctattccttatcaaccaactcctaccctggggctcaatctgggtaatgatccagaccgaggcacctccatatga

SEQ ID NO: 8948 - DNA, 853 bp, Homo sapiens
  source 1..853: mol_type = unassigned DNA
aacgaggatgccactcagagagaccagagggacaaacaccacagccagtcctgccacagccctgccacaaaaaacctgtgaacttatgaatcaaggcatcttggccctggtcagctccattggctgcacgtcagcaggatccctccagtctttggcagacgccatgcatatcccccacctcttcattcagcgctcaacagctgggaccccaaggagtggctgtggactcacccggagcaacaggaatgatgactacactctctcagttcgcccacctgtctacttgcatgatgttatcctaagagtggtcacagagtatgcctggcagaaattcattatattctatgatagtgaatacgatatccgtggaatacaggagttcttggacaaagtctctcagcagggaatggatgttgcacttcagaaggtagaaaacaacatcaataaaatgattaccactctctttgacaccatgagaatagaagaactgaatcgctatcgagacactcttaggcgagcgatccttgttatgaatcctgctacagccaaatccttcattactgaggaaacttcattatgcagtttaaagacaaattatacacattttactttttgagttcagcaaatgacttagagaatcttattgaactactacattttttcataatataaaatatttccaattttaaagaagttgggtctttccttcaagaaacacaaatctggaagatgggagtgagtacacagaggatgtaatataaattaggatgttaaaattgcaatagaggcggttgaagcatctatggtcatttttgttggaggagatcagagaaaacctcactgagcaggtata

SEQ ID NO: 8949 - DNA, 768 bp, Homo sapiens
  source 1..768: mol_type = unassigned DNA
aacgaggatgccactcagagagaccagagggacaaacaccacagccagtcctgccacagccctgccacaaaaaacctgtgaacttatgaatcaaggcatcttggccctggtcagctccattggctgcacgtcagcaggatccctccagtctttggcagacgccatgcatatcccccacctcttcattcagcgctcaacagctgggaccccaaggagtggctgtggactcacccggagcaacaggaatgatgactacactctctcagttcgcccacctgtctacttgcatgatgttatcctaagagtggtcacagagtatgcctggcagaaattcattatattctatgatagtgaatacgatatccgtggaatacaggagttcttggacaaagtctctcagcagggaatggatgttgcacttcagaaggtagaaaacaacatcaataaaatgattaccactctctttgacaccatgagaatagaagaactgaatcgctatcgagacactcttaggcgagcgatccttgttatgaatcctgctacagccaaatccttcattactgagatgtcgttttagaaaaacacttagggaggaaagaatgtgagtgatttttgttttcatgccagagcacagacacttacgtgacaattggagtaaataaagtaaaaggagcaaatgaaagttgagtgggattcacatagcctgcagtcttcatgatttccacatggaaagagagaattggagctagcatttaaacactaacatac

SEQ ID NO: 8950 - DNA, 579 bp, Homo sapiens
  source 1..579: mol_type = unassigned DNA
acatggccttgtaataccctgcagtggaggatgggaaatgtagtctagctgagtgtcccagcagaaggagagaatggattttgatgatcatctagcagtttctaccacatgaacccttgactttgcttaaaaattgaggttgtggagactaatttggttgcttttgactgtcactggatcattataaatgaggaaataaacgatgtggacgtacaggaacttgtaagaaggtcaattggaaggttaacgattattcggcagacatttccagttccccagaacataagtcagcggtgtttccgtggcaaccatcgaatatcttcaacattgtgtgatccaaaggatccatttgctcagaatatggagatttccaacctttacatatatgacacggtgcttctgcttgctaatgcttttcataagaagctggaggaccgaaagtggcacagcatggcaagtctgtcatgtatcagaaagaactcaaagccctggcagggtgggcgctccatgttggagaccatcaagaagggtggagttagtgggttgactggagagctagaatttggagaaaatggaggc

SEQ ID NO: 8951 - DNA, 443 bp, Homo sapiens
  source 1..443: mol_type = unassigned DNA
ggtggagttagtgggttgactggagagctagaatttggagaaaatggaggcaatcccaatgtccactttgaaatccttggaaccaactatggagaagagcttggcagaggtgttcgaaaaaatgaaagaatcagaccacagggctctactgggaaaatctggccccaggtaaacttcattttcaagtaatttgaccattcatatacattcatcttctgtacacttgcaaagtttgccaaactaaagcacagcagaacaacaacaaaatgttctttccctgaaacagagagagcccaggctaagccagagataacaaggagttgagactaccaaaagaatgctgacttctaaaggttgggctaagagaagagcttttatgtttaggtagaaacaggatgctgattttaaaaaaacttcttcattcattaaacattttccagatg

SEQ ID NO: 8952 - DNA, 3664 bp, Homo sapiens
  source 1..3664: mol_type = unassigned DNA
atggtgacatggacatcctgaagcacaaatggtggcctaagaatggccagtgtgacctgtactcgtcagtggacacaaagcagaaaggaggcgccctggacataaagagctttgcaggggtcttttgtatcctggctgctggaattgtcctctcctgcttcatagccatgctggagacgtggtggaacaagaggaaaggctcccgggttccatcaaaagaggcttcatccctgcagaatgaaactacaatatctgaaagaaggaatgcttggccattaaggccatgtttgaaacttggcagcaatacctggagaagccaggcatccagtcatagcctgcaccaatcatcacaaatgggaggacccctggatgacccataacctctaccagcacaagaactgctgatctgttttccaccttattgatttcaggacccattagatcctgtattcaaaactggtgagctaatgtattatctcctaaattaaaaactcctatccagttcaaggaagctgacctcaccagattgtgacacacagaaatccttgctgtaatccactcatagaagagtaacgacaggactgctgctttcagccacaggtcatggatcttgcctgcgccagcccattagccttagaaggatgcttctatgcagtggacttcttgcctagatgtcctggtcaagagcactcacactgaggtccaagtctataccacagtagctttgtcctcagcttctatctgtgcacgattttaaactctgggtcttaggacttctcatagccagagatctagggagacatgaaggaccaaggagaatggcagaacttaaccagaaaaagacagacggctcttctaatgcttattgaatcactggtaactgtggttaaacatctttggaggttttatcacagaattctctccatatttctagaacaacattatttcatacttaccaaaattggctactttcctccacaccaagggacattacctttttccccaatggccatcaaatgtctacattttgcatggattcctggctaatgtagagcctccagtttgaatccacacttagtacatgtgtcattgtaaacaaagatcacttggatcttaggattacaccctggaattgcagtgcctgtatatactacccagcgctaagataagtttgttttccttatacccacttccacattcatttataatacctcttcaatgcaaaatgtattttacaagtaaaatagggaagcatcatatgaaatatcccagcccctcatgaactcaatcagtttttattgaggaccactatgtgccaagcactgtattacattttgggaatacaatgatgaatgagtcagaatcctttccctaagaagtttgcattccagtggggaatccagatgattaaacagcatgaagagtgctagaacaggctaacaatggccataagtattccctcatctctgttccttaagcacccagggagctcccagttgcccaagctgatgcacagatgatctattatgccaaagcaacctaaaagattaaagccaacaagcagcagtccaggaggagcctctacaagtagtgatcccatgggttcttttactaatatattatttctaaataatctgactttcaaacaagttaggtgttcacttactgagcaccttcttcattatgtcatcaaactgataaccctcaagttgtagctgctcacaggtgaaaatcaggctataaagtcaaaagacagagcttcaagtttgggtcttggtgcttaccatgactgtgggcaaatcacctactttctggtctttggtgtcattctttgcaaaataaaagtaaaaacattatatactgtacctacctcacagggttgttgtgagaatcaagtgaaaagtatgtgaaagaactttgtaaactttgttatttttaatcaccccatttccatgggttcttcatcttctctacgtaatacaatactataattcacctgaaggatgtactcttacccactctgttcctacctctcacccttacacaagtgaattgtacaaagaagatgaagtacatgccttcctggatatctagtttcagatggaaattctgatacctcacagaatgacaaagaagtagtccggaggaccaaaaccggggctctactgccatagagacattccaccattaacataccactggacctggatatcagccagccctcttgatggacagttgtccacagagaacccattcttggccccagagaactactgcagtggttcagggaatcatctgggttctttctggctgccaggggagtcaccagccattccaggaaagcgcatgcttccgaaaataaagcaagaagattggttaaaggagacactgaccccattaaacaaaatacaagccttccctgactgcctgacctgtgataattgggctgccaagggagatacctagacacttatttaaagcaaggatttggtgacacatttcttcatttagcagtttatccctgatgccaacctgactcttacttctctgatttttgatttgtcgactccctgtctgtctaacagacctatgataagatgtgtttctggctttaaaatcccatatgctccccttacatacacacaaacacacaaacatccacacaatgaggaatgccagcatttttcctatctatcttacccacttgaccaagcttagcctggccttccatttctgattatttcatatggattctgattggctgatccaatttgagttcagtctcactggaccagtcgtaatgtattccaggctgaaactctgactccctttcagtcctgtgtagaagcttagagtgcccatgaagccacgataccgatacccagcaatcctttaaacaaagggaggtctttcaacttagaatacacatgcttatccaaaactaaggccgtattagcatgtatctccaggaataacataaagtttctataaaagttctcctgagcgaatagaatggtgactatgtacaaaagatctgatagaattggcatccaagaaactttgtaataaggtcttaagcctaaaatagaaaatttcaactacaattcattcttcagcttcctagagcaaggaaggcagatcacagggaaaaatcgattcattgtttatatcagtttccaaaatattttcaaatggaatggaaaataattcacaatttccttcttgctataagtcagaatggctgacttcacacaccaattcagtgaactaagaaattccaagactttttcctatggctataatattaaaagttaattttaatacctaaaaaacattagcaattaaaaacagtgtcttatattgtagtttacaaccaccacttgctgtgggaagggagccagagagactcagagtacccgccacccaaggtcaaaggcactgagccaaaggatccagcaaagagcaggcccaagccaggaagaaaagctgttgctgaaatgtcagaccaagcatatgaaacaagatgatctccaggtcatggtagctgagaaaggagaatagacagatccaagctgggaaccaaattaagatgttggaacaggtaccagagtgaataagactgggcaggggatggagtcacctacggccacacgtttgtcgtaca

SEQ ID NO: 8953 - DNA, 4844 bp, Homo sapiens
  source 1..4844: mol_type = unassigned DNA
ttcttgcagcctgtgaacttatgaatcaaggcatcttggccctggtcagctccattggctgcacgtcagcaggatccctccagtctttggcagacgccatgcatatcccccacctcttcattcagcgctcaacagctgggaccccaaggagtggctgtggactcacccggagcaacaggaatgatgactacactctctcagttcgcccacctgtctacttgcatgatgttatcctaagagtggtcacagagtatgcctggcagaaattcattatattctatgatagtgaatacgatatccgtggaatacaggagttcttggacaaagtctctcagcagggaatggatgttgcacttcagaaggtagaaaacaacatcaataaaatgattaccactctctttgacaccatgagaatagaagaactgaatcgctatcgagacactcttaggcgagcgatccttgttatgaatcctgctacagccaaatccttcattactgaggttgtggagactaatttggttgcttttgactgtcactggatcattataaatgaggaaataaacgatgtggacgtacaggaacttgtaagaaggtcaattggaaggttaacgattattcggcagacatttccagttccccagaacataagtcagcggtgtttccgtggcaaccatcgaatatcttcaacattgtgtgatccaaaggatccatttgctcagaatatggagatttccaacctttacatatatgacacggtgcttctgcttgctaatgcttttcataagaagctggaggaccgaaagtggcacagcatggcaagtctgtcatgtatcagaaagaactcaaagccctggcagggtgggcgctccatgttggagaccatcaagaagggtggagttagtgggttgactggagagctagaatttggagaaaatggaggcaatcccaatgtccactttgaaatccttggaaccaactatggagaagagcttggcagaggtgttcgaaaacttggttgctggaatcctgtcacaggtctgaatgggtcactgactgacaagaaattggagaataacatgcgtggagtggttctacgtgtagtaactgttctggaagaaccttttgtgatggtctctgaaaatgtcttgggtaagccgaagaaataccagggcttctccattgatgttttggatgccttatctaactacctgggttttaactacgaaatttacgtagcaccggatcacaaatacggaagcccacaagaagatgggacatggaatggcttggtaggagaacttgtctttaagagagccgacatagggatttctgctttaaccatcactccagatcgtgaaaatgtggtggactttacgacacgttacatggactactcagtgggggtactacttcgaagggctgaaaagacagtggatatgtttgcctgtcttgcaccatttgatctctctctatgggcttgcattgctggcacagtccttctggtgggtctactggtctacctcttgaactggcttaatcccccacgattacaaatgggatcaatgacgtctactactctctacaactccatgtggtttgtgtatggatcttttgtacaacaaggcggggaagtcccgtacacgactctggctacccgaatgatgatgggggcttggtggctatttgctttgattgttatctcatcttacacggcaaacctcgctgctttcctcactattacacgcattgaaagttccatccagtctctccaggacctttccaagcaaacagaaatcccttatggcacagtcctagactctgcggtatatgagcatgtccgcatgaaaggactgaatccttttgagagggacagcatgtattcccaaatgtggcggatgatcaaccgaagcaatggatcggagaacaatgttctggagtcccaggcaggcattcaaaaggtaaaatatggaaattatgctttcgtatgggatgcagctgtattggaatatgtggctatcaatgacccagattgttccttttacaccattggaaatactgttgctgatcggggatatggaattgcattacaacatggcagtccttaccgagatgttttttcacaaaggatcctggagcttcagcagaatggtgacatggacatcctgaagcacaaatggtggcctaagaatggccagtgtgacctgtactcgtcagtggacacaaagcagaaaggaggcgccctggacataaagagctttgcaggggtcttttgtatcctggctgctggaattgtcctctcctgcttcatagccatgctggagacgtggtggaacaagaggaaaggctcccgggttccatcaaaagaggatgacaaggaaattgacctggagcacctccatagacgtgtaaatagcttgtgcacagatgacgacagcccccataaacagttttccacctcgtcaattgatttgacccctctggacattgacactttgccaacacgacaagcactggagcaaatcagtgatttcaggaacactcatattaccacaacaacctttatcccagagcagatccagactcttagccgcacactgtcagctaaagctgcttctggtttcacttttggcaacgtgcctgagcaccgaactggcccttttaggcacagggcacctaatgggggctttttcaggagtcctataaaaacaatgtcatctattccttatcaaccaactcctaccctggggctcaatctgggtaatgatccagaccgaggcacctccatatgagcatcaaacaaatctcttcactgtttcttttttaggactccctttgcaaggagcaactgtaatattgtgggactaacatggatgtaacgtttaaaaaaaagatcaggattattagtaacaattctagttttttcctcccaccttctccctctcctctctcctctatgattttctctctttccccctcccttcctgtacattttcctccactttttttcattactcaacttgttccccaagaaggtagtgtactaggatcctattagtctgcttttcatatactgtacatcaagtataggaaatgtgcactgagtatactaaaagtatatgcaggattaattttacataaaggcctcttctgtaacatttctctattttttgaaatacaattgcaataacttcagtctttttacattcttctgctgcatccatacaatgctccactgctgttgagtgtcctttaactgtggaccaaaggcaacccctgcagtgtttataaaacaattttaagaccattcaggccacataagatgagaatgcaattttgtaggattacaaaaaagccattaatatgccagtcaagactacagttaaaactactcttgcactgcaacagtgcatatgacctttatgtgattgtacagtattaaaagttttttcttatgtacagtaaactttatcatatggcagaagcctctattgtgttaaataaattagtatttcatatatatacatatatatgcacctatataatgtgtatatatataaaaaggcagccattgctattgcaattcatttaataaagctttagtttaaacaaaagtattgtatacaggaactatgtatagtgcaggggttcttttcagttagaaaaggcaggttgctttaatgttattctgactcgcattgtttgccaacagaaaatattttatacttttgttattaaagcatccagggcaatttaatatttgttcctagatgtaactcatttgaataggttttgcatttgttattcagcagtgtataaagctaaccttgataattttacttttaattaattatctaaatgaaaaatgctattagctgaaccacatccacaacagcacatagagctctagaagagttgaaacatagatcattgaaggttaaaaatcctcttccaaagcagcaagtcaatcaatacaataatgatatttggggaggggtgggagcccttaagaactattgatgtggccttaaattactgtcatttattatcctaaagaagaaaacataataaccataatgggctctcaactcaactcccttttttatttagttctatttggaggagttatgtattttttacattagtgccaagtatatagaaggatgacagcaaaaacagtgcctctttgtgcacaatccttttaaagtagcattcttacttgttagaaatgtagaatgaactttgtttgtaatccttaaattaaaatgtggtaagtaggaagcaagaacttattctgtgtttttacgcagccatacacttactttaatctaactcattctgtggctaggattgatataggaatcaacctatgtgatttgctttaggagaaattaaaaggtatattcttaagatatattatattttgatgctaattctgttctggggagcatcttgtattgtcactgttttgtactaaatcttcaaatattgtctactgtgtaaggcagaaaaatttcttatcatgcaaaaaccattttgtttccagggtaacaagtaactaagtgcatgcacaacttgttttcccttgtaacattcatgatctcatttacaactctgattttaaaacaaaaaaatctttacaacaagctatatagggacataccagatgttgcagtgattttagctatcaacaaactgttaaccatgtacaatatttaaaataggcttattttgatgtatcgcctattatacaaacacacaaaacatttttggaggcctcagttatgagtgacagagctttctgtgtataatttgtctaaataatttgtctaataaaaatgttttct

SEQ ID NO: 8954 - DNA, 3428 bp, Homo sapiens
  source 1..3428: mol_type = unassigned DNA
cagctctcggctctgcagcggagcataggcgaccaccaccgaaagaggccaccatgagctgcctggggatcttcatccccaagaagcaccgggcgcgcttcgacgaggtggtgtctcagggcctcctgggcaagctgtgccgcgcacgccgggcccagggcgcgcagcgactgcgccggagccgcagcgaggagcggccggagcgcctcctggtgtccacgcgcgccagcgccccgccgcgccgccccgatgagccgcccccgcgcagggcctccttgctggtgggcggcctcgccggccccgggggcgcgcgcaggactgtccgagtctacaaaggcaacaagagcttcggcttcacacttcgcggccacgggcctgtctggatcgagtctgtcctgcctgggagcccagctgacaatgctgccctcaagtcaggtgaccggatcctcttcctcaatggactggacatgaggaactgctcccacgacaaggtggtgtccatgctgcagggcagtggtgccatgcccacgctggtggtggaggaagggctcgtcccatttgccagtgactccgattctctggactcacccaacccgtcgtcggcgctcacctccctgcagtgggtggcggagatcctgccgtccagcatccgggtccaagggaggaccttcagccagcagctggagcacctactcacacctcctgagcgctatggggtctgccgggccctcgagagcttcttccagcacaggaacatcgacaccctcatcgttgacgtctaccctgtgctggacacccctgccaagcaggtcctgtggcagttcatctaccagctgctgacctatgaggagcaggagctctgtcaggagaaaatcgcatgcttcctgggctacacggccatgacagagccggagcctgagctggacctggagtccgagcccacgcctgagccccagccgcggagctccctgcgggcttcctccatgtgccgccgcagcctccggtcccagggcctggaggccggcctcagctgcggtcccagcgagtgccctgagatgcctcttcccctgatcccaggcgagcgccaggcaggcgacggcacgtccctccctgagacccccaaccccaagatgatgtcagccgtctatgcagagcttgagtctcgactgaacagcagcttcaaagggaagatggggaccgtgtccaaatcccgggcttcccctccaggccccagcccagcagtcaccacagggcccaggaccctgtccggcgtctcatggcccagcgagcgactcttgccctccccctgctaccacccgctgtgttcggggggtctggcctcccccagcagctctgagtcccacccctacgccagcctggacagcagcagggcaccctccccacagccaggccccgggcccatctgccccgacagccccccaagcccggaccccacccgcccgcccagccgcaggaagctcttcaccttctcccaccctgtgcgaagccgcgatactgaccgcttcctggacgtgctgagcgagcagctgggcccccgggtcaccatcgtggatgatttcctgaccccggagaacgactacgaggagatgagcttccatgatgaccagggcagcttcgtaaccaatgagcggagcagcgccagcgactgcatcagcagcagtgaagaaggcagctccctgacctactcctccatctctgaccacatccccccacccccgctcagccccccaccaccgccacccctgcctttccatgacgctaagcccagctcccgcagctctgatggttcccggggccctgctcaggcgctggccaagcccctcacccaactcagccacccagtccctccaccacccccaccgcccctgcccccacccgtgccctgtgcaccccccatgctgtcccggggcctgggccaccggcgcagtgagaccagccacatgagcgtcaagcgcttgcggtgggaacaggtggagaactcagaaggcaccatctggggtcagctcggggaagactctgactacgataagctgagtgacatggtgaaatacctcgacctggagctccacttcggcacccagaaacctgctaaaccggtgccggggccggagcccttccggaagaaggaggtggtggagatcctgtcccataagaaggcctacaacacctccatcctcttggcacacctgaagctgagccccgcggagctgcgccaggtgctgatgagcatggagccccggcgcctggagcccgcacatctcgcgcagctgctgctcttcgcgcccgacgccgacgaggagcagcgctaccaggccttccgcgaggcgcccggccgcctcagcgagccggaccagttcgtcctgcagatgctgtcagttcccgaatacaagacacgcctgcgcagcctccacttccaggccaccctccaggagaagacagaggagatccgaggcagccttgaatgcttgcgccaggcctccctggagctcaaaaacagtcggaagctcgccaagatcctggagtttgtgttggccatgggcaactatctcaacgatggacagcccaaaaccaacaagactacgggcttcaagatcaactttctgacagagctgaactccaccaagacagtggatgggaagtccaccttcctgcacatccttgccaaatcgctgagccagcacttccctgaactcctgggctttgctcaggacctgcccaccgtgcccctggctgccaaagtgaaccaacgggccctgaccagtgacctggctgacctccatggcactatcagcgagatacaggatgcctgccagagcatttccccctctagcgaggacaagtttgcaatggtcatgtcgtccttcctggagacggcccagccagcacttcgggcgctcgacgggctgcagcgcgaggccatggaggagctgggcaaggcgctggccttctttggggaggattccaaggccaccacctctgaggctttcttcggcatctttgcagagttcatgagcaaattcgagcgagcgctgagtgacctgcaggccggggagggcctgcgcagctccgggatggtttcacccctggcctggtgacagtggccacaccgcgtcctctgcggcctgagcagggagatggaggccgagagggcagcccagacactgccgaggtccggggccactgtgccccgggctctgagcacaccgccagcctctcctgcagctacctcagccgccgagctgtggtcgggccctcctctgccagcccttgttcctacccccaggcccagagccagatgctgtaggagcaggtgctgagtgtgcctgcacatggaggaccgtgctctgtcggcttcttgggcccacttcccacttcgctcccaggctgtcaggggggcctggagggtg

SEQ ID NO: 8955 - DNA, 3215 bp, Homo sapiens
  source 1..3215: mol_type = unassigned DNA
ggagtcgcggcgcgctcgctccattcctgggctcggctaccccctgcccttcggcacctgccgcgccgcggtccccggctccagatggggaaggaccagggcttctctcggcactttcggatcttcatccccaagaagcaccgggcgcgcttcgacgaggtggtgtctcagggcctcctgggcaagctgtgccgcgcacgccgggcccagggcgcgcagcgactgcgccggagccgcagcgaggagcggccggagcgcctcctggtgtccacgcgcgccagcgccccgccgcgccgccccgatgagccgcccccgcgcagggcctccttgctggtgggcggcctcgccggccccgggggcgcgcgcaggactgtccgagtctacaaaggcaacaagagcttcggcttcacacttcgcggccacgggcctgtctggatcgagtctgtcctgcctgggagcccagctgacaatgctgccctcaagtcaggtgaccggatcctcttcctcaatggactggacatgaggaactgctcccacgacaaggtggtgtccatgctgcagggcagtggtgccatgcccacgctggtggtggaggaagggctcgtcccatttgccagtgactccgattctctggactcacccaacccgtcgtcggcgctcacctccctgcagtgggtggcggagatcctgccgtccagcatccgggtccaagggaggaccttcagccagcagctggagcacctactcacacctcctgagcgctatggggtctgccgggccctcgagagcttcttccagcacaggaacatcgacaccctcatcgttgacgtctaccctgtgctggacacccctgccaagcaggtcctgtggcagttcatctaccagctgctgacctatgaggagcaggagctctgtcaggagaaaatcgcatgcttcctgggctacacggccatgacagagccggagcctgagctggacctggagtccgagcccacgcctgagccccagccgcggagctccctgcgggcttcctccatgtgccgccgcagcctccggtcccagggcctggaggccggcctcagctgcggtcccagcgagtgccctgagatgcctcttcccctgatcccaggcgagcgccaggcaggcgacggcacgtccctccctgagacccccaaccccaagatgatgtcagccgtctatgcagagcttgagtctcgactgaacagcagcttcaaagggaagatggggaccgtgtccaaatcccgggcttcccctccaggccccagcccagcagtcaccacagggcccaggaccctgtccggcgtctcatggcccagcgagcgactcttgccctccccctgctaccacccgctgtgttcggggggtctggcctcccccagcagctctgagtcccacccctacgccagcctggacagcagcagggcaccctccccacagccaggccccgggcccatctgccccgacagccccccaagcccggaccccacccgcccgcccagccgcaggaagctcttcaccttctcccaccctgtgcgaagccgcgatactgaccgcttcctggacgtgctgagcgagcagctgggcccccgggtcaccatcgtggatgatttcctgaccccggagaacgactacgaggagatgagcttccatgatgaccagggcagcttcgtaaccaatgagcggagcagcgccagcgactgcatcagcagcagtgaagaaggcagctccctgacctactcctccatctctgaccacatccccccacccccgctcagccccccaccaccgccacccctgcctttccatgacgctaagcccagctcccgcagctctgatggttcccggggccctgctcaggcgctggccaagcccctcacccaactcagccacccagtccctccaccacccccaccgcccctgcccccacccgtgccctgtgcaccccccatgctgtcccggggcctgggccaccggcgcagtgagaccagccacatgagcgtcaagcgcttgcggtgggaacaggtggagaactcagaaggcaccatctggggtcagctcggggaagactctgactacgataagctgagtgacatggtgaaatacctcgacctggagctccacttcggcacccagaaacctgctaaaccggtgccggggccggagcccttccggaagaaggaggtggtggagatcctgtcccataagaaggcctacaacacctccatcctcttggcacacctgaagctgagccccgcggagctgcgccaggtgctgatgagcatggagccccggcgcctggagcccgcacatctcgcgcagctgctgctcttcgcgcccgacgccgacgaggagcagcgctaccaggccttccgcgaggcgcccggccgcctcagcgagccggaccagttcgtcctgcagatgctgtcagttcccgaatacaagacacgcctgcgcagcctccacttccaggccaccctccaggagaagacagaggagatccgaggcagccttgaatgcttgcgccaggcctccctggagctcaaaaacagtcggaagctcgccaagatcctggagtttgtgttggccatgggcaactatctcaacgatggacagcccaaaaccaacaagactacgggcttcaagatcaactttctgacagagctgaactccaccaagacagtggatgggaagtccaccttcctgcacatccttgccaaatcgctgagccagcacttccctgaactcctgggctttgctcaggacctgcccaccgtgcccctggctgccaaagtgaaccaacgggccctgaccagtgacctggctgacctccatggcactatcagcgagatacaggatgcctgccagagcatttccccctctagcgaggacaagtttgcaatggtcatgtcgtccttcctggagacggcccagccagcacttcgggcgctcgacgggctgcagcgcgaggccatggaggagctgggcaaggcgctggccttctttggggaggattccaaggccaccacctctgaggctttcttcggcatctttgcagagttcatgagcaaattcgagcgagcgctgagtgacctgcaggccggggagggcctgcgcagctccgggatggtttcacccctggcctggtgacagtggccacaccgcgtcctctgcggcctgagcagggagatggaggc

SEQ ID NO: 8956 - DNA, 3636 bp, Homo sapiens
  source 1..3636: mol_type = unassigned DNA
atggccaccactgccacgccggccacgaaccagggctggccagaggactttggcttccggctaggtggctctggcccctgcttcgtcctggaggtggccaaggggagcagcgcgcatgccggaggactgcggccaggagaccagatcctggaggtggaggggctggcggtgggcggtctgagccgcgagcgcctcgtgcgcctggcacggcgctgcccacgtgtgccgcccagtctgggcgtgctcccggctcccgacggtggccccggcccaggatccggccccgcggccccgaccacagtcttgcgggccccgcggtgcggccgcggcctagctctgggccgtgagctgcttcgcctggccggccgcaagcgcccggacgcggtgcaccgagagcgcaggcgcaaggcccaagagttcagccgcaaggtggatgaaatcttgggggaccagccaactgccaaggagcaggtgttcgctgcactgaagcagtttgcagctgagcagcgggtggatgatctggtgtggactctcaccctggcgctgccccgagaggcctgcgggccactcctggacaacctcaggatcttcatccccaagaagcaccgggcgcgcttcgacgaggtggtgtctcagggcctcctgggcaagctgtgccgcgcacgccgggcccagggcgcgcagcgactgcgccggagccgcagcgaggagcggccggagcgcctcctggtgtccacgcgcgccagcgccccgccgcgccgccccgatgagccgcccccgcgcagggcctccttgctggtgggcggcctcgccggccccgggggcgcgcgcaggactgtccgagtctacaaaggcaacaagagcttcggcttcacacttcgcggccacgggcctgtctggatcgagtctgtcctgcctgggagcccagctgacaatgctgccctcaagtcaggtgaccggatcctcttcctcaatggactggacatgaggaactgctcccacgacaaggtggtgtccatgctgcagggcagtggtgccatgcccacgctggtggtggaggaagggctcgtcccatttgccagtgactccgattctctggactcacccaacccgtcgtcggcgctcacctccctgcagtgggtggcggagatcctgccgtccagcatccgggtccaagggaggaccttcagccagcagctggagcacctactcacacctcctgagcgctatggggtctgccgggccctcgagagcttcttccagcacaggaacatcgacaccctcatcgttgacgtctaccctgtgctggacacccctgccaagcaggtcctgtggcagttcatctaccagctgctgacctatgaggagcaggagctctgtcaggagaaaatcgcatgcttcctgggctacacggccatgacagcagagccggagcctgagctggacctggagtccgagcccacgcctgagccccagccgcggagctccctgcgggcttcctccatgtgccgccgcagcctccggtcccagggcctggaggccggcctcagctgcggtcccagcgagtgccctgagatgcctcttcccctgatcccaggcgagcgccaggcaggcgacggcacgtccctccctgagacccccaaccccaagatgatgtcagccgtctatgcagagcttgagtctcgactgaacagcagcttcaaagggaagatggggaccgtgtccaaatcccgggcttcccctccaggccccagcccagcagtcaccacagggcccaggaccctgtccggcgtctcatggcccagcgagcgactcttgccctccccctgctaccacccgctgtgttcggggggtctggcctcccccagcagctctgagtcccacccctacgccagcctggacagcagcagggcaccctccccacagccaggccccgggcccatctgccccgacagccccccaagcccggaccccacccgcccgcccagccgcaggaagctcttcaccttctcccaccctgtgcgaagccgcgatactgaccgcttcctggacgtgctgagcgagcagctgggcccccgggtcaccatcgtggatgatttcctgaccccggagaacgactacgaggagatgagcttccatgatgaccagggcagcttcgtaaccaatgagcggagcagcgccagcgactgcatcagcagcagtgaagaaggcagctccctgacctactcctccatctctgaccacatccccccacccccgctcagccccccaccaccgccacccctgcctttccatgacgctaagcccagctcccgcagctctgatggttcccggggccctgctcaggcgctggccaagcccctcacccaactcagccacccagtccctccaccacccccaccgcccctgcccccacccgtgccctgtgcaccccccatgctgtcccggggcctgggccaccggcgcagtgagaccagccacatgagcgtcaagcgcttgcggtgggaacaggtggagaactcagaaggcaccatctggggtcagctcggggaagactctgactacgataagctgagtgacatggtgaaatacctcgacctggagctccacttcggcacccagaaacctgctaaaccggtgccggggccggagcccttccggaagaaggaggtggtggagatcctgtcccataagaaggcctacaacacctccatcctcttggcacacctgaagctgagccccgcggagctgcgccaggtgctgatgagcatggagccccggcgcctggagcccgcacatctcgcgcagctgctgctcttcgcgcccgacgccgacgaggagcagcgctaccaggccttccgcgaggcgcccggccgcctcagcgagccggaccagttcgtcctgcagatgctgtcagttcccgaatacaagacacgcctgcgcagcctccacttccaggccaccctccaggagaagacagaggagatccgaggcagccttgaatgcttgcgccaggcctccctggagctcaaaaacagtcggaagctcgccaagatcctggagtttgtgttggccatgggcaactatctcaacgatggacagcccaaaaccaacaagactacgggcttcaagatcaactttctgacagagctgaactccaccaagacagtggatgggaagtccaccttcctgcacatccttgccaaatcgctgagccagcacttccctgaactcctgggctttgctcaggacctgcccaccgtgcccctggctgccaaagtgaaccaacgggccctgaccagtgacctggctgacctccatggcactatcagcgagatacaggatgcctgccagagcatttccccctctagcgaggacaagtttgcaatggtcatgtcgtccttcctggagacggcccagccagcacttcgggcgctcgacgggctgcagcgcgaggccatggaggagctgggcaaggcgctggccttctttggggaggattccaaggccaccacctctgaggctttcttcggcatctttgcagagttcatgagcaaattcgagcgagcgctgagtgacctgcaggccggggagggcctgcgcagctccgggatggtttcacccctggcctggtga

SEQ ID NO: 8957 - DNA, 3179 bp, Homo sapiens
  source 1..3179: mol_type = unassigned DNA
tgtatctcggcatgaattaagaagctaggaagatggagcacggcacactcctcgcccagcccgggctctggaccagggacaccagctgggcactcctctatttcctctgctatatcctccctcagaccgccccgcaagtactcaggatcggagggatttttgaaacagtggaaaatgagcctgttaatgttgaagaattagctttcaagtttgcagtcaccagcattaacagaaaccgaaccctgatgcctaacaccacattaacctatgacatccagagaattaacctttttgatagttttgaagcctcgcggagagcatgtgaccagctggctcttggtgtggctgctctctttggcccttcccatagctcctccgtcagtgctgtgcagtctatttgcaatgctctcgaagttccacacatacagacccgctggaaacacccctcggtggacaacaaagatttgttttacatcaacctttacccagattatgcagctatcagcagggcgatcctggatctggtcctctattacaactggaaaacagtgacagtggtgtatgaagacagcacaggtctaattcgtctacaagagctcatcaaagctccctccagatataatattaaaatcaaaatccgccagctgccctctgggaataaagatgccaagcctttactcaaggagatgaagaaaggcaaggagttctatgtgatatttgattgttcacatgaaacagccgctgaaatccttaagcagattctgttcatgggcatgatgaccgagtactatcactactttttcacaaccctggacttatttgctttggatctggaactctataggtacagtggcgtaaacatgaccgggtttcggctgcttaacattgacaaccctcacgtgtcatccatcattgagaagtggtccatggagagactgcaggccccacccaggcccgagactggccttttggatggcatgatgacaactgaagcggctctgatgtacgatgctgtgtacatggtggccattgcctcgcaccgggcatcccagctgaccgtcagctccctgcagtgccatagacataagccatggcgcctcggacccagatttatgaacctgatcaaagaggcccggtgggatggcttgactgggcatatcacctttaataaaaccaatggcttgaggaaggattttgatctggacattattagtctcaaagaggaaggaactgaaaaggctgctggcgaagtgtctaaacacttgtataaagtgtggaagaagattgggatttggaattccaacagtgggcttaacatgacggacagcaacaaagacaagtccagcaatatcactgattcattggccaacagaacactcattgtcaccaccattctggaagaaccctatgttatgtacaggaaatctgataagcctctatatggaaatgacagatttgaaggatattgcctagacctgttgaaagaattgtcaaacatcctgggtttcatttatgatgttaaactagttcccgatggcaaatatggggcccagaatgacaaaggggagtggaacgggatggttaaagaactcatagatcacagggctgacctggcagtggctcctcttaccatcacctacgtgcgggagaaagtcattgacttctccaaacccttcatgaccctaggcatcagcattctctaccggaagcccaatggtaccaatccaggcgttttctccttcctcaaccccctgtctccagatatttggatgtatgtgctcttagcctgcttgggagtcagctgtgtactctttgtgattgcaaggtttacaccctacgagtggtataacccccacccatgcaaccctgactcagacgtggtggaaaacaattttactttactaaatagtttctggtttggagttggagctctcatgcagcaaggatcagagctgatgcccaaagctctatcgaccagaatagttggagggatatggtggtttttcaccctaatcatcatttcatcctacacggccaatctggctgccttcttgacagtagagagaatggaatcccccatagattcggcagatgatctggcaaagcaaaccaagatagaatatggggcggttagagatggatcaacaatgaccttcttcaagaaatcaaaaatctccacctatgagaagatgtgggctttcatgagcagcaggcagcagaccgccctggtaagaaacagtgatgaggggatccagagagtgctcaccacagactacgcgctgctgatggagtccaccagcattgagtatgtgacgcagagaaactgcaacctcactcagatcgggggcctcattgactccaaaggttacggagtgggaacacctattggttctccttaccgggataaaattactattgctattcttcaactccaagaagaagggaagctgcatatgatgaaagagaagtggtggcgtgggaatggctgccccgaggaagacaacaaagaagccagtgccctgggagtggaaaatattggaggcatcttcattgttctggctgccggactggtcctttctgtatttgtagctattggagaattcatatacaaatcacggaagaataatgatattgaacagaaaggaaagtcatcaagaattagattttattttaggaacaaagtaaggtttcatgggagaaaaaaacaaagccttggtgtagagaagtgtctctctttcaacgctatcatggaagaactgggaatctcactgaagaatcagaaaaaaataaagaaaaagtcaagaactaaggggaaatcttccttcacaagtatccttacttgtcatcagagacgaactcagagaaaagagactgtggcgtgatccaaggaaacgcctgtaggaagaaaaaggatgcattccctacagatttttggagaaaggatttctgaggagtgtgtgatgtgtttccatatatctatatccataactctgattatgaatacagatataagaaatacaaaagtttaaaaagctcacatagatatgacttgggaagtgacaccagttcttttaaaataaatttgtatgctcaattattttgcattttttctttttccccaataaattgttgtgtgtgctttctaaataataataaaacaacagggtttttttccagaa

SEQ ID NO: 8958 - DNA, 3140 bp, Homo sapiens
  source 1..3140: mol_type = unassigned DNA
agcgcgcagcgtgcttggaaccggagcatccagagaggatgaggcggggacccggcccaagttgggtgcatctctcgggcgtccggcagcggctgtatctcggcatgaattaagaagctaggaagatggagcacggcacactcctcgcccagcccgggctctggaccagggacaccagctgggcactcctctatttcctctgctatatcctccctcagaccgccccgcaagtactcaggatcggagggatttttgaaacagtggaaaatgagcctgttaatgttgaagaattagctttcaagtttgcagtcaccagcattaacagaaaccgaaccctgatgcctaacaccacattaacctatgacatccagagaattaacctttttgatagttttgaagcctcgcggagagcatgtgaccagctggctcttggtgtggctgctctctttggcccttcccatagctcctccgtcagtgctgtgcagtctatttgcaatgctctcgaagttccacacatacagacccgctggaaacacccctcggtggacaacaaagatttgttttacatcaacctttacccagattatgcagctatcagcagggcgatcctggatctggtcctctattacaactggaaaacagtgacagtggtgtatgaagacagcacaggtctaattcgtctacaagagctcatcaaagctccctccagatataatattaaaatcaaaatccgccagctgccctctgggaataaagatgccaagcctttactcaaggagatgaagaaaggcaaggagttctatgtgatatttgattgttcacatgaaacagccgctgaaatccttaagcagattctgttcatgggcatgatgaccgagtactatcactactttttcacaaccctggacttatttgctttggatctggaactctataggtacagtggcgtaaacatgaccgggtttcggctgcttaacattgacaaccctcacgtgtcatccatcattgagaagtggtccatggagagactgcaggccccacccaggcccgagactggccttttggatggcatgatgacaactgaagcggctctgatgtacgatgctgtgtacatggtggccattgcctcgcaccgggcatcccagctgaccgtcagctccctgcagtgccatagacataagccatggcgcctcggacccagatttatgaacctgatcaaagaggcccggtgggatggcttgactgggcatatcacctttaataaaaccaatggcttgaggaaggattttgatctggacattattagtctcaaagaggaaggaactgaaaagattgggatttggaattccaacagtgggcttaacatgacggacagcaacaaagacaagtccagcaatatcactgattcattggccaacagaacactcattgtcaccaccattctggaagaaccctatgttatgtacaggaaatctgataagcctctatatggaaatgacagatttgaaggatattgcctagacctgttgaaagaattgtcaaacatcctgggtttcatttatgatgttaaactagttcccgatggcaaatatggggcccagaatgacaaaggggagtggaacgggatggttaaagaactcatagatcacagggctgacctggcagtggctcctcttaccatcacctacgtgcgggagaaagtcattgacttctccaaacccttcatgaccctaggcatcagcattctctaccggaagcccaatggtaccaatccaggcgttttctccttcctcaaccccctgtctccagatatttggatgtatgtgctcttagcctgcttgggagtcagctgtgtactctttgtgattgcaaggtttacaccctacgagtggtataacccccacccatgcaaccctgactcagacgtggtggaaaacaattttactttactaaatagtttctggtttggagttggagctctcatgcagcaaggatcagagctgatgcccaaagctctatcgaccagaatagttggagggatatggtggtttttcaccctaatcatcatttcatcctacacggccaatctggctgccttcttgacagtagagagaatggaatcccccatagattcggcagatgatctggcaaagcaaaccaagatagaatatggggcggttagagatggatcaacaatgaccttcttcaagaaatcaaaaatctccacctatgagaagatgtgggctttcatgagcagcaggcagcagaccgccctggtaagaaacagtgatgaggggatccagagagtgctcaccacagactacgcgctgctgatggagtccaccagcattgagtatgtgacgcagagaaactgcaacctcactcagatcgggggcctcattgactccaaaggttacggagtgggaacacctattggttctccttaccgggataaaattactattgctattcttcaactccaagaagaagggaagctgcatatgatgaaagagaagtggtggcgtgggaatggctgccccgaggaagacaacaaagaagccagtgccctgggagtggaaaatattggaggcatcttcattgttctggctgccggactggtcctttctgtatttgtagctattggagaattcatatacaaatcacggaagaataatgatattgaacagtgtctctctttcaacgctatcatggaagaactgggaatctcactgaagaatcagaaaaaaataaagaaaaagtcaagaactaaggggaaatcttccttcacaagtatccttacttgtcatcagagacgaactcagagaaaagagactgtggcgtgatccaaggaaacgcctgtaggaagaaaaaggatgcattccctacagatttttggagaaaggatttctgaggagtgtgtgatgtgtttccatatatctatatccataactctgattatgaatacagatataagaaatacaaaagtttaaaaagctcacatagatatgacttgggaagtgacaccagttcttttaaaataaatttgtatgctcaattattttgcattttttctttttccccaataaattgttgtgtgtgctttctaaataataataaaacaacagggtttttttccagaa

SEQ ID NO: 8959 - DNA, 3234 bp, Homo sapiens
  source 1..3234: mol_type = unassigned DNA
agccagctccgcggtcccacgcgggttccctcgagctcgctccgtggggagcgcgcagcgtgcttggaaccggagcatccagagaggatgaggcggggacccggcccaagttgggtgcatctctcgggcgtccggcagcggctgtatctcggcatgaattaagaagctaggaagatggagcacggcacactcctcgcccagcccgggctctggaccagggacaccagctgggcactcctctatttcctctgctatatcctccctcagaccgccccgcaagtactcaggatcggagggatttttgaaacagtggaaaatgagcctgttaatgttgaagaattagctttcaagtttgcagtcaccagcattaacagaaaccgaaccctgatgcctaacaccacattaacctatgacatccagagaattaacctttttgatagttttgaagcctcgcggagagcatgtgaccagctggctcttggtgtggctgctctctttggcccttcccatagctcctccgtcagtgctgtgcagtctatttgcaatgctctcgaagttccacacatacagacccgctggaaacacccctcggtggacaacaaagatttgttttacatcaacctttacccagattatgcagctatcagcagggcgatcctggatctggtcctctattacaactggaaaacagtgacagtggtgtatgaagacagcacaggtctaattcgtctacaagagctcatcaaagctccctccagatataatattaaaatcaaaatccgccagctgccctctgggaataaagatgccaagcctttactcaaggagatgaagaaaggcaaggagttctatgtgatatttgattgttcacatgaaacagccgctgaaatccttaagcagattctgttcatgggcatgatgaccgagtactatcactactttttcacaaccctggacttatttgctttggatctggaactctataggtacagtggcgtaaacatgaccgggtttcggctgcttaacattgacaaccctcacgtgtcatccatcattgagaagtggtccatggagagactgcaggccccacccaggcccgagactggccttttggatggcatgatgacaactgaagcggctctgatgtacgatgctgtgtacatggtggccattgcctcgcaccgggcatcccagctgaccgtcagctccctgcagtgccatagacataagccatggcgcctcggacccagatttatgaacctgatcaaagaggcccggtgggatggcttgactgggcatatcacctttaataaaaccaatggcttgaggaaggattttgatctggacattattagtctcaaagaggaaggaactgaaaaggctgctggcgaagtgtctaaacacttgtataaagtgtggaagaagattgggatttggaattccaacagtgggcttaacatgacggacagcaacaaagacaagtccagcaatatcactgattcattggccaacagaacactcattgtcaccaccattctggaagaaccctatgttatgtacaggaaatctgataagcctctatatggaaatgacagatttgaaggatattgcctagacctgttgaaagaattgtcaaacatcctgggtttcatttatgatgttaaactagttcccgatggcaaatatggggcccagaatgacaaaggggagtggaacgggatggttaaagaactcatagatcacagggctgacctggcagtggctcctcttaccatcacctacgtgcgggagaaagtcattgacttctccaaacccttcatgaccctaggcatcagcattctctaccggaagcccaatggtaccaatccaggcgttttctccttcctcaaccccctgtctccagatatttggatgtatgtgctcttagcctgcttgggagtcagctgtgtactctttgtgattgcaaggtttacaccctacgagtggtataacccccacccatgcaaccctgactcagacgtggtggaaaacaattttactttactaaatagtttctggtttggagttggagctctcatgcagcaaggatcagagctgatgcccaaagctctatcgaccagaatagttggagggatatggtggtttttcaccctaatcatcatttcatcctacacggccaatctggctgccttcttgacagtagagagaatggaatcccccatagattcggcagatgatctggcaaagcaaaccaagatagaatatggggcggttagagatggatcaacaatgaccttcttcaagaaatcaaaaatctccacctatgagaagatgtgggctttcatgagcagcaggcagcagaccgccctggtaagaaacagtgatgaggggatccagagagtgctcaccacagactacgcgctgctgatggagtccaccagcattgagtatgtgacgcagagaaactgcaacctcactcagatcgggggcctcattgactccaaaggttacggagtgggaacacctattggttctccttaccgggataaaattactattgctattcttcaactccaagaagaagggaagctgcatatgatgaaagagaagtggtggcgtgggaatggctgccccgaggaagacaacaaagaagccagtgccctgggagtggaaaatattggaggcatcttcattgttctggctgccggactggtcctttctgtatttgtagctattggagaattcatatacaaatcacggaagaataatgatattgaacagtgtctctctttcaacgctatcatggaagaactgggaatctcactgaagaatcagaaaaaaataaagaaaaagtcaagaactaaggggaaatcttccttcacaagtatccttacttgtcatcagagacgaactcagagaaaagagactgtggcgtgatccaaggaaacgcctgtaggaagaaaaaggatgcattccctacagatttttggagaaaggatttctgaggagtgtgtgatgtgtttccatatatctatatccataactctgattatgaatacagatataagaaatacaaaagtttaaaaagctcacatagatatgacttgggaagtgacaccagttcttttaaaataaatttgtatgctcaattattttgcattttttctttttccccaataaattgttgtgtgtgctttctaaataataataaaacaacagggtttttttccagaa

SEQ ID NO: 8960 - DNA, 3624 bp, Homo sapiens
  source 1..3624: mol_type = unassigned DNA
agaagccggaacgtggctccgctcccagttaacctgctggagctcatcaggcttgctcagagcccctgcaccaactcaccctgtaccctctctccttcttcgttagtcttctttcccccttttccctcctctgtctgtgcctatcccccgacttttgcatctgaccaaaggacgaatgagggagacgttcctgcagatcggggcagcaactttcctcagctggtctctgggctccgggagccagagagcgctgatcctccgcggtctgcggcccatggaagaggaggaggaggagccgtgatgggctagcgacagcactgaggagccccgagagagctcagccttgccagccagctccgcggtcccacgcgggttccctcgagctcgctccgtggggagcgcgcagcgtgcttggaaccggagcatccagagaggatgaggcggggacccggcccaagttgggtgcatctctcgggcgtccggcagcggctgtatctcggcatgaattaagaagctaggaagatggagcacggcacactcctcgcccagcccgggctctggaccagggacaccagctgggcactcctctatttcctctgctatatcctccctcagaccgccccgcaagtactcaggatcggagggatttttgaaacagtggaaaatgagcctgttaatgttgaagaattagctttcaagtttgcagtcaccagcattaacagaaaccgaaccctgatgcctaacaccacattaacctatgacatccagagaattaacctttttgatagttttgaagcctcgcggagagcatgtgaccagctggctcttggtgtggctgctctctttggcccttcccatagctcctccgtcagtgctgtgcagtctatttgcaatgctctcgaagttccacacatacagacccgctggaaacacccctcggtggacaacaaagatttgttttacatcaacctttacccagattatgcagctatcagcagggcgatcctggatctggtcctctattacaactggaaaacagtgacagtggtgtatgaagacagcacaggtctaattcgtctacaagagctcatcaaagctccctccagatataatattaaaatcaaaatccgccagctgccctctgggaataaagatgccaagcctttactcaaggagatgaagaaaggcaaggagttctatgtgatatttgattgttcacatgaaacagccgctgaaatccttaagcagattctgttcatgggcatgatgaccgagtactatcactactttttcacaaccctggacttatttgctttggatctggaactctataggtacagtggcgtaaacatgaccgggtttcggctgcttaacattgacaaccctcacgtgtcatccatcattgagaagtggtccatggagagactgcaggccccacccaggcccgagactggccttttggatggcatgatgacaactgaagcggctctgatgtacgatgctgtgtacatggtggccattgcctcgcaccgggcatcccagctgaccgtcagctccctgcagtgccatagacataagccatggcgcctcggacccagatttatgaacctgatcaaagaggcccggtgggatggcttgactgggcatatcacctttaataaaaccaatggcttgaggaaggattttgatctggacattattagtctcaaagaggaaggaactgaaaagattgggatttggaattccaacagtgggcttaacatgacggacagcaacaaagacaagtccagcaatatcactgattcattggccaacagaacactcattgtcaccaccattctggaagaaccctatgttatgtacaggaaatctgataagcctctatatggaaatgacagatttgaaggatattgcctagacctgttgaaagaattgtcaaacatcctgggtttcatttatgatgttaaactagttcccgatggcaaatatggggcccagaatgacaaaggggagtggaacgggatggttaaagaactcatagatcacagggctgacctggcagtggctcctcttaccatcacctacgtgcgggagaaagtcattgacttctccaaacccttcatgaccctaggcatcagcattctctaccggaagcccaatggtaccaatccaggcgttttctccttcctcaaccccctgtctccagatatttggatgtatgtgctcttagcctgcttgggagtcagctgtgtactctttgtgattgcaaggtttacaccctacgagtggtataacccccacccatgcaaccctgactcagacgtggtggaaaacaattttactttactaaatagtttctggtttggagttggagctctcatgcagcaaggatcagagctgatgcccaaagctctatcgaccagaatagttggagggatatggtggtttttcaccctaatcatcatttcatcctacacggccaatctggctgccttcttgacagtagagagaatggaatcccccatagattcggcagatgatctggcaaagcaaaccaagatagaatatggggcggttagagatggatcaacaatgaccttcttcaagaaatcaaaaatctccacctatgagaagatgtgggctttcatgagcagcaggcagcagaccgccctggtaagaaacagtgatgaggggatccagagagtgctcaccacagactacgcgctgctgatggagtccaccagcattgagtatgtgacgcagagaaactgcaacctcactcagatcgggggcctcattgactccaaaggttacggagtgggaacacctattggttctccttaccgggataaaattactattgctattcttcaactccaagaagaagggaagctgcatatgatgaaagagaagtggtggcgtgggaatggctgccccgaggaagacaacaaagaagccagtgccctgggagtggaaaatattggaggcatcttcattgttctggctgccggactggtcctttctgtatttgtagctattggagaattcatatacaaatcacggaagaataatgatattgaacagaaaggaaagtcatcaagaattagattttattttaggaacaaagtaaggtttcatgggagaaaaaaacaaagccttggtgtagagaagtgtctctctttcaacgctatcatggaagaactgggaatctcactgaagaatcagaaaaaaataaagaaaaagtcaagaactaaggggaaatcttccttcacaagtatccttacttgtcatcagagacgaactcagagaaaagagactgtggcgtgatccaaggaaacgcctgtaggaagaaaaaggatgcattccctacagatttttggagaaaggatttctgaggagtgtgtgatgtgtttccatatatctatatccataactctgattatgaatacagatataagaaatacaaaagtttaaaaagctcacatagatatgacttgggaagtgacaccagttcttttaaaataaatttgtatgctcaattattttgcattttttctttttccccaataaattgttgtgtgtgctttctaaataataataaaacaacagggtttttttccagaa

SEQ ID NO: 8961 - DNA, 2712 bp, Homo sapiens
  source 1..2712: mol_type = unassigned DNA
tgtatctcggcatgaattaagaagctaggaagatggagcacggcacactcctcgcccagcccgggctctggaccagggacaccagctgggcactcctctatttcctctgctatatcctccctcagaccgccccgcaagtactcaggatcggagggatttttgaaacagtggaaaatgagcctgttaatgttgaagaattagctttcaagtttgcagtcaccagcattaacagaaaccgaaccctgatgcctaacaccacattaacctatgacatccagagaattaacctttttgatagttttgaagcctcgcggagagcatgtgaccagctggctcttggtgtggctgctctctttggcccttcccatagctcctccgtcagtgctgtgcagtctatttgcaatgctctcgaagttccacacatacagacccgctggaaacacccctcggtggacaacaaagatttgttttacatcaacctttacccagattatgcagctatcagcagggcgatcctggatctggtcctctattacaactggaaaacagtgacagtggtgtatgaagacagcacaggtctaattcgtctacaagagctcatcaaagctccctccagatataatattaaaatcaaaatccgccagctgccctctgggaataaagatgccaagcctttactcaaggagatgaagaaaggcaaggagttctatgtgatatttgattgttcacatgaaacagccgctgaaatccttaagcagattctgttcatgggcatgatgaccgagtactatcactactttttcacaaccctggacttatttgctttggatctggaactctataggtacagtggcgtaaacatgaccgggtttcggctgcttaacattgacaaccctcacgtgtcatccatcattgagaagtggtccatggagagactgcaggccccacccaggcccgagactggccttttggatggcatgatgacaactgaagcggctctgatgtacgatgctgtgtacatggtggccattgcctcgcaccgggcatcccagctgaccgtcagctccctgcagtgccatagacataagccatggcgcctcggacccagatttatgaacctgatcaaagaggcccggtgggatggcttgactgggcatatcacctttaataaaaccaatggcttgaggaaggattttgatctggacattattagtctcaaagaggaaggaactgaaaaggctgctggcgaagtgtctaaacacttgtataaagtgtggaagaagattgggatttggaattccaacagtgggcttaacatgacggacagcaacaaagacaagtccagcaatatcactgattcattggccaacagaacactcattgtcaccaccattctggaagaaccctatgttatgtacaggaaatctgataagcctctatatggaaatgacagatttgaaggatattgcctagacctgttgaaagaattgtcaaacatcctgggtttcatttatgatgttaaactagttcccgatggcaaatatggggcccagaatgacaaaggggagtggaacgggatggttaaagaactcatagatcacagggctgacctggcagtggctcctcttaccatcacctacgtgcgggagaaagtcattgacttctccaaacccttcatgaccctaggcatcagcattctctaccggaagcccaatggtaccaatccaggcgttttctccttcctcaaccccctgtctccagatatttggatgtatgtgctcttagcctgcttgggagtcagctgtgtactctttgtgattgcaaggtttacaccctacgagtggtataacccccacccatgcaaccctgactcagacgtggtggaaaacaattttactttactaaatagtttctggtttggagttggagctctcatgcagcaaggatcagagctgatgcccaaagctctatcgaccagaatagttggagggatatggtggtttttcaccctaatcatcatttcatcctacacggccaatctggctgccttcttgacagtagagagaatggaatcccccatagattcggcagatgatctggcaaagcaaaccaagatagaatatggggcggttagagatggatcaacaatgaccttcttcaagaaatcaaaaatctccacctatgagaagatgtgggctttcatgagcagcaggcagcagaccgccctggtaagaaacagtgatgaggggatccagagagtgctcaccacagactacgcgctgctgatggagtccaccagcattgagtatgtgacgcagagaaactgcaacctcactcagatcgggggcctcattgactccaaaggttacggagtgggaacacctattggttctccttaccgggataaaattactattgctattcttcaactccaagaagaagggaagctgcatatgatgaaagagaagtggtggcgtgggaatggctgccccgaggaagacaacaaagaagccagtgccctgggagtggaaaatattggaggcatcttcattgttctggctgccggactggtcctttctgtatttgtagctattggagaattcatatacaaatcacggaagaataatgatattgaacagcattactgaagtgtccgtatgccttgataatcctatcaatgtttggatcatctcagtgggggaaatgacttaa

SEQ ID NO: 8962 - DNA, 3472 bp, Homo sapiens
  source 1..3472: mol_type = unassigned DNA
ctttcccccttttccctcctctgtctgtgcctatcccccgacttttgcatctgaccaaaggacgaatgagggagacgttcctgcagatcggggcagcaactttcctcagctggtctctgggctccgggagccagagagcgctgatcctccgcggtctgcggcccatggaagaggaggaggaggagccgtgatgggctagcgacagcactgaggagccccgagagagctcagccttgccagccagctccgcggtcccacgcgggttccctcgagctcgctccgtggggagcgcgcagcgtgcttggaaccggagcatccagagaggatgaggcggggacccggcccaagttgggtgcatctctcgggcgtccggcagcggctgtatctcggcatgaattaagaagctaggaagatggagcacggcacactcctcgcccagcccgggctctggaccagggacaccagctgggcactcctctatttcctctgctatatcctccctcagaccgccccgcaagtactcaggatcggagggatttttgaaacagtggaaaatgagcctgttaatgttgaagaattagctttcaagtttgcagtcaccagcattaacagaaaccgaaccctgatgcctaacaccacattaacctatgacatccagagaattaacctttttgatagttttgaagcctcgcggagagcatgtgaccagctggctcttggtgtggctgctctctttggcccttcccatagctcctccgtcagtgctgtgcagtctatttgcaatgctctcgaagttccacacatacagacccgctggaaacacccctcggtggacaacaaagatttgttttacatcaacctttacccagattatgcagctatcagcagggcgatcctggatctggtcctctattacaactggaaaacagtgacagtggtgtatgaagacagcacaggtctaattcgtctacaagagctcatcaaagctccctccagatataatattaaaatcaaaatccgccagctgccctctgggaataaagatgccaagcctttactcaaggagatgaagaaaggcaaggagttctatgtgatatttgattgttcacatgaaacagccgctgaaatccttaagcagattctgttcatgggcatgatgaccgagtactatcactactttttcacaaccctggacttatttgctttggatctggaactctataggtacagtggcgtaaacatgaccgggtttcggctgcttaacattgacaaccctcacgtgtcatccatcattgagaagtggtccatggagagactgcaggccccacccaggcccgagactggccttttggatggcatgatgacaactgaagcggctctgatgtacgatgctgtgtacatggtggccattgcctcgcaccgggcatcccagctgaccgtcagctccctgcagtgccatagacataagccatggcgcctcggacccagatttatgaacctgatcaaagaggcccggtgggatggcttgactgggcatatcacctttaataaaaccaatggcttgaggaaggattttgatctggacattattagtctcaaagaggaaggaactgaaaaggctgctggcgaagtgtctaaacacttgtataaagtgtggaagaagattgggatttggaattccaacagtgggcttaacatgacggacagcaacaaagacaagtccagcaatatcactgattcattggccaacagaacactcattgtcaccaccattctggaagaaccctatgttatgtacaggaaatctgataagcctctatatggaaatgacagatttgaaggatattgcctagacctgttgaaagaattgtcaaacatcctgggtttcatttatgatgttaaactagttcccgatggcaaatatggggcccagaatgacaaaggggagtggaacgggatggttaaagaactcatagatcacagggctgacctggcagtggctcctcttaccatcacctacgtgcgggagaaagtcattgacttctccaaacccttcatgaccctaggcatcagcattctctaccggaagcccaatggtaccaatccaggcgttttctccttcctcaaccccctgtctccagatatttggatgtatgtgctcttagcctgcttgggagtcagctgtgtactctttgtgattgcaaggtttacaccctacgagtggtataacccccacccatgcaaccctgactcagacgtggtggaaaacaattttactttactaaatagtttctggtttggagttggagctctcatgcagcaaggatcagagctgatgcccaaagctctatcgaccagaatagttggagggatatggtggtttttcaccctaatcatcatttcatcctacacggccaatctggctgccttcttgacagtagagagaatggaatcccccatagattcggcagatgatctggcaaagcaaaccaagatagaatatggggcggttagagatggatcaacaatgaccttcttcaagaaatcaaaaatctccacctatgagaagatgtgggctttcatgagcagcaggcagcagaccgccctggtaagaaacagtgatgaggggatccagagagtgctcaccacagactacgcgctgctgatggagtccaccagcattgagtatgtgacgcagagaaactgcaacctcactcagatcgggggcctcattgactccaaaggttacggagtgggaacacctattggttctccttaccgggataaaattactattgctattcttcaactccaagaagaagggaagctgcatatgatgaaagagaagtggtggcgtgggaatggctgccccgaggaagacaacaaagaagccagtgccctgggagtggaaaatattggaggcatcttcattgttctggctgccggactggtcctttctgtatttgtagctattggagaattcatatacaaatcacggaagaataatgatattgaacaggctttttgtttcttttatggactgcaatgtaagcaaacccatccaaccaactccacttctggaactactttatctacggatttagaatgtggtaaattaattcgagaggagagagggattcgaaaacagtcctcagttcatactgtgtaatcagtttaaaaaaaaaaaaaaagatgtgcccagtagaaaatgtttttgctaattggtgttgttgatatttgtatttgctaagcataaatagccacaattctctattcctttaggatagcaaaactcatgtattctagacattgaaatgaatacactggaaagatacttgcactgtatgttgaagcaggggcatattaggggtataaagacttctagaaatgtgtatttacaggaatcttctctgtcccactcatcatcttagttctatcttcatgcattaaaaataagtaactcttccttcat

SEQ ID NO: 8963 - DNA, 3427 bp, Homo sapiens
  source 1..3427: mol_type = unassigned DNA
ctttcccccttttccctcctctgtctgtgcctatcccccgacttttgcatctgaccaaaggacgaatgagggagacgttcctgcagatcggggcagcaactttcctcagctggtctctgggctccgggagccagagagcgctgatcctccgcggtctgcggcccatggaagaggaggaggaggagccgtgatgggctagcgacagcactgaggagccccgagagagctcagccttgccagccagctccgcggtcccacgcgggttccctcgagctcgctccgtggggagcgcgcagcgtgcttggaaccggagcatccagagaggatgaggcggggacccggcccaagttgggtgcatctctcgggcgtccggcagcggctgtatctcggcatgaattaagaagctaggaagatggagcacggcacactcctcgcccagcccgggctctggaccagggacaccagctgggcactcctctatttcctctgctatatcctccctcagaccgccccgcaagtactcaggatcggagggatttttgaaacagtggaaaatgagcctgttaatgttgaagaattagctttcaagtttgcagtcaccagcattaacagaaaccgaaccctgatgcctaacaccacattaacctatgacatccagagaattaacctttttgatagttttgaagcctcgcggagagcatgtgaccagctggctcttggtgtggctgctctctttggcccttcccatagctcctccgtcagtgctgtgcagtctatttgcaatgctctcgaagttccacacatacagacccgctggaaacacccctcggtggacaacaaagatttgttttacatcaacctttacccagattatgcagctatcagcagggcgatcctggatctggtcctctattacaactggaaaacagtgacagtggtgtatgaagacagcacaggtctaattcgtctacaagagctcatcaaagctccctccagatataatattaaaatcaaaatccgccagctgccctctgggaataaagatgccaagcctttactcaaggagatgaagaaaggcaaggagttctatgtgatatttgattgttcacatgaaacagccgctgaaatccttaagcagattctgttcatgggcatgatgaccgagtactatcactactttttcacaaccctggacttatttgctttggatctggaactctataggtacagtggcgtaaacatgaccgggtttcggctgcttaacattgacaaccctcacgtgtcatccatcattgagaagtggtccatggagagactgcaggccccacccaggcccgagactggccttttggatggcatgatgacaactgaagcggctctgatgtacgatgctgtgtacatggtggccattgcctcgcaccgggcatcccagctgaccgtcagctccctgcagtgccatagacataagccatggcgcctcggacccagatttatgaacctgatcaaagaggcccggtgggatggcttgactgggcatatcacctttaataaaaccaatggcttgaggaaggattttgatctggacattattagtctcaaagaggaaggaactgaaaagattgggatttggaattccaacagtgggcttaacatgacggacagcaacaaagacaagtccagcaatatcactgattcattggccaacagaacactcattgtcaccaccattctggaagaaccctatgttatgtacaggaaatctgataagcctctatatggaaatgacagatttgaaggatattgcctagacctgttgaaagaattgtcaaacatcctgggtttcatttatgatgttaaactagttcccgatggcaaatatggggcccagaatgacaaaggggagtggaacgggatggttaaagaactcatagatcacagggctgacctggcagtggctcctcttaccatcacctacgtgcgggagaaagtcattgacttctccaaacccttcatgaccctaggcatcagcattctctaccggaagcccaatggtaccaatccaggcgttttctccttcctcaaccccctgtctccagatatttggatgtatgtgctcttagcctgcttgggagtcagctgtgtactctttgtgattgcaaggtttacaccctacgagtggtataacccccacccatgcaaccctgactcagacgtggtggaaaacaattttactttactaaatagtttctggtttggagttggagctctcatgcagcaaggatcagagctgatgcccaaagctctatcgaccagaatagttggagggatatggtggtttttcaccctaatcatcatttcatcctacacggccaatctggctgccttcttgacagtagagagaatggaatcccccatagattcggcagatgatctggcaaagcaaaccaagatagaatatggggcggttagagatggatcaacaatgaccttcttcaagaaatcaaaaatctccacctatgagaagatgtgggctttcatgagcagcaggcagcagaccgccctggtaagaaacagtgatgaggggatccagagagtgctcaccacagactacgcgctgctgatggagtccaccagcattgagtatgtgacgcagagaaactgcaacctcactcagatcgggggcctcattgactccaaaggttacggagtgggaacacctattggttctccttaccgggataaaattactattgctattcttcaactccaagaagaagggaagctgcatatgatgaaagagaagtggtggcgtgggaatggctgccccgaggaagacaacaaagaagccagtgccctgggagtggaaaatattggaggcatcttcattgttctggctgccggactggtcctttctgtatttgtagctattggagaattcatatacaaatcacggaagaataatgatattgaacaggctttttgtttcttttatggactgcaatgtaagcaaacccatccaaccaactccacttctggaactactttatctacggatttagaatgtggtaaattaattcgagaggagagagggattcgaaaacagtcctcagttcatactgtgtaatcagtttaaaaaaaaaaaaaaagatgtgcccagtagaaaatgtttttgctaattggtgttgttgatatttgtatttgctaagcataaatagccacaattctctattcctttaggatagcaaaactcatgtattctagacattgaaatgaatacactggaaagatacttgcactgtatgttgaagcaggggcatattaggggtataaagacttctagaaatgtgtatttacaggaatcttctctgtcccactcatcatcttagttctatcttcatgcattaaaaataagtaactcttccttcat

SEQ ID NO: 8964 - DNA, 1775 bp, Homo sapiens
  source 1..1775: mol_type = unassigned DNA
caaagattcagagaagccggaacgtggctccgctcccagttaacctgctggagctcatcaggcttgctcagagcccctgcaccaactcaccctgtaccctctctccttcttcgttagtcttctttcccccttttccctcctctgtctgtgcctatcccccgacttttgcatctgaccaaaggacgaatgagggagacgttcctgcagatcggggcagcaactttcctcagctggtctctgggctccgggagccagagagcgctgatcctccgcggtctgcggcccatggaagaggaggaggaggagccgtgatgggctagcgacagcactgaggagccccgagagagctcagccttgccagccagctccgcggtcccacgcgggttccctcgagctcgctccgtggggagcgcgcagcgtgcttggaaccggagcatccagagaggatgaggcggggacccggcccaagttgggtgcatctctcgggcgtccggcagcggctgtatctcggcatgaattaagaagctaggaagatggagcacggcacactcctcgcccagcccgggctctggaccagggacaccagctgggcactcctctatttcctctgctatatcctccctcagaccgccccgcaagtactcaggatcggagggatttttgaaacagtggaaaatgagcctgttaatgttgaagaattagctttcaagtttgcagtcaccagcattaacagaaaccgaaccctgatgcctaacaccacattaacctatgacatccagagaattaacctttttgatagttttgaagcctcgcggagagcatgtgaccagctggctcttggtgtggctgctctctttggcccttcccatagctcctccgtcagtgctgtgcagtctatttgcaatgctctcgaagttccacacatacagacccgctggaaacacccctcggtggacaacaaagatttgttttacatcaacctttacccagattatgcagctatcagcagggcgatcctggatctggtcctctattacaactggaaaacagtgacagtggtgtatgaagacagcacaggtctaattcgtctacaagagctcatcaaagctccctccagatataatattaaaatcaaaatccgccagctgccctctgggaataaagatgccaagcctttactcaaggagatgaagaaaggcaaggagttctatgtgatatttgattgttcacatgaaacagccgctgaaatccttaagcagattctgttcatgggcatgatgaccgagtactatcactactttttcacaaccctggacttatttgctttggatctggaactctataggtacagtggcgtaaacatgaccgggtttcggctgcttaacattgacaaccctcacgtgtcatccatcattgagaagtggtccatggagagactgcaggccccacccaggcccgagactggccttttggatggcatgatgacaactgaagcggctctgatgtacgatgctgtgtacatggtggccattgcctcgcaccgggcatcccagctgaccgtcagctccctgcagtgccatagacataagccatggcgcctcggacccagatttatgaacctgatcaaagaggcccggtgggatggcttgactgggcatatcacctttaataaaaccaatggcttgaggaaggattttgatctggacattattagtctcaaagaggaaggaactgaaaaggtaacctccttaacaataaataaataaaataacaaa

SEQ ID NO: 8965 - DNA, 4789 bp, Homo sapiens
  source 1..4789: mol_type = unassigned DNA
ggagagcagctatctcagtctttctcacttaatcttggcttcacgtcagaagctgtgcagcagtgcagtagaatagggcctggcaaaacctttgctagcaaagcgccttttgtgccgggctgtggctcgctatcgacatctcgtccgttaccaaggctgggtttcctactgatttccctcctcctctgctttcacaggctcgcgcggccggacattgtgggtgtgcgtgctggatttctcccggatgctctccgactaacatggatgtcccaccattccttgcagtggaaggttgttccttggcgcagtgagtgaagaacatgcagcgattgctaatgggtttgggaagcggagactccttcctctctctatgaccatgccgtgatcgtgtctgcggtcaccactcgacgcatcctcatttctacccgaacccaggagccgaacgctagatcggggaagtgggtgccgtgcgtgtgggcacagaaacaccatgaagattattttcccgattctaagtaatccagtcttcaggcgcaccgttaaactcctgctctgtttactgtggattggatattctcaaggaaccacacatgtattaagatttggtggtatttttgaatatgtggaatctggcccaatgggagctgaggaacttgcattcagatttgctgtgaacacaattaacagaaacagaacattgctacccaatactacccttacctatgatacccagaagataaacctttatgatagttttgaagcatccaagaaagcctgtgatcagctgtctcttggggtggctgccatcttcgggccttcacacagctcatcagcaaacgcagtgcagtccatctgcaatgctctgggagttccccacatacagacccgctggaagcaccaggtgtcagacaacaaagattccttctatgtcagtctctacccagacttctcttcactcagccgtgccattttagacctggtgcagtttttcaagtggaaaaccgtcacggttgtgtatgatgacagcactggtctcattcgtttgcaagagctcatcaaagctccatcaaggtataatcttcgactcaaaattcgtcagttacctgctgatacaaaggatgcaaaacccttactaaaagaaatgaaaagaggcaaggagtttcatgtaatctttgattgtagccatgaaatggcagcaggcattttaaaacaggcattagctatgggaatgatgacagaatactatcattatatctttaccactctggacctctttgctcttgatgttgagccctaccgatacagtggtgttaacatgacagggttcagaatattaaatacagaaaatacccaagtctcctccatcattgaaaagtggtcgatggaacgattgcaggcacctccgaaacccgattcaggtttgctggatggatttatgacgactgatgctgctctaatgtatgatgctgtgcatgtggtgtctgtggccgttcaacagtttccccagatgacagtcagttccttgcagtgtaatcgacataaaccctggcgcttcgggacccgctttatgagtctaattaaagaggcacattgggaaggcctcacaggcagaataactttcaacaaaaccaatggcttgagaacagattttgatttggatgtgatcagtctgaaggaagaaggtctagaaaagattggaacgtgggatccagccagtggcctgaatatgacagaaagtcaaaagggaaagccagcgaacatcacagattccttatccaatcgttctttgattgttaccaccattttggaagagccttatgtcctttttaagaagtctgacaaacctctctatggtaatgatcgatttgaaggctattgcattgatctcctcagagagttatctacaatccttggctttacatatgaaattagacttgtggaagatgggaaatatggagcccaggatgatgccaatggacaatggaatggaatggttcgtgaactaattgatcataaagctgaccttgcagttgctccactggctattacctatgttcgagagaaggtcatcgacttttccaagccctttatgacacttggaataagtattttgtaccgcaagcccaatggtacaaacccaggcgtcttctccttcctgaatcctctctcccctgatatctggatgtatattctgctggcttacttgggtgtcagttgtgtgctctttgtcatagccaggtttagtccttatgagtggtataatccacacccttgcaaccctgactcagacgtggtggaaaacaattttaccttgctaaatagtttctggtttggagttggagctctcatgcagcaaggttctgagctcatgcccaaagcactgtccaccaggatagtgggaggcatttggtggtttttcacacttatcatcatttcttcgtatactgctaacttagccgcctttctgacagtggaacgcatggaatcccctattgactctgctgatgatttagctaaacaaaccaagatagaatatggagcagtagaggatggtgcaaccatgacttttttcaagaaatcaaaaatctccacgtatgacaaaatgtgggcctttatgagtagcagaaggcagtcagtgctggtcaaaagtaatgaagaaggaatccagcgagtcctcacctctgattatgctttcctaatggagtcaacaaccatcgagtttgttacccagcggaactgtaacctgacacagattggcggccttatagactctaaaggttatggcgttggcactcccatgggttctccatatcgagacaaaattaccatagcaattcttcagctgcaagaggaaggcaaactgcatatgatgaaggagaaatggtggaggggcaatggttgcccagaagaggagagcaaagaggccagtgccctgggggttcagaatattggtggcatcttcattgttctggcagccggcttggtgctttcagtttttgtggcagtgggagaatttttatacaaatccaaaaaaaacgctcaattggaaaagaggtccttctgtagtgccatggtagaagaattgaggatgtccctgaagtgccagcgtcggttaaaacataagccacaggccccagttattgtgaaaacagaagaagttatcaacatgcacacatttaacgacagaaggttgccaggtaaagaaaccatggcataaagctgggaggccaaacacccaagcacaaactgtcgtctttttccaaacaatttagccagaatgtttcctgtggaaatatgcaacctgtgcaaaataaaatgagttacctcatgccgctgtgtctatgaactagagactctgtgatctaagcagttgcaatgatcagacttgatttacaagcatcatggatcaaccaagttacacggggttacactgttaatcatgggttcctcccttcttctgagtgaatgttaacatgcgcattttgtggctgatttcaaatgcagtccagtgagaaattacaggttccttttgaagctcaactgttgccaggagatggaatatcaatgcccaacagggcaaccaataaaagtgtcactaagaatataaatatttggaatcagcaaaaactgtagtgttacaggaaacagtacagtcttctgaacacccagatcatagaggtgatgatgttactagcccccaactactcagtataattattgtctgaatgcaaagtatgtgtttataggatgtgaaaaaatgtaatgcaaaacaaatttgaatcccatggcagttggaatataaagcagatgttcatcacttattttccttttttcttttcttatttttttttttgacagtctgtgtcactgattgagatagaaatgccaattatcaaggaaataatgttttcttaagttccctaaggcagaagatttaacatgcaattctaccagatcccttcctattcccccaacaccttttctctaacccccatatcccaaataataataataataataataataataataataataataataaaagcagttggttcagtgattctgaattaaaaggataatgttttgcaatgttcaagttgtaaaaactggccgagtattggctgtgtggaagactaaagctttcattctaacattcagacatagcaatccaaacccttgttcctgctgtaaatgaacttgatggagcatgggcagatttcagtgatacgagaaaggggactggtcatctatagaaaaatctgtgagagaacttggaagtggactgcgtttatcaatacagtcacaatgttaaatgaacaaaattcttgaacagttttttttcaaaaaatgttcaggtttatttgtggaaatgcaagatttctatgaaaatagtttttgtatggaaatttttgtaatactttttatcaacaaaacaagaacatgtgttcctgtcaggggtgtgatgtcaagcatgaatggtagtgcgtgtgcaccaccaacgtttggtgaaaactatttttatcaagaaaaaaggaatcatagaagagaaatattttcaagttagataatataaaagctaggtgcactaccaccactgcttaccatgccacacccctggtttccacgaggctgacaacatactgtaatgaacaattgtgtgtaaaatggtaaaagacacagacctcttgacaacattgtgataacagttgagtgcacacagtttgctgtttgaatccaatgcacaaaattaaaaaaaatcattaaaactatgttcattttactttca

SEQ ID NO: 8966 - DNA, 4876 bp, Homo sapiens
  source 1..4876: mol_type = unassigned DNA
ggagagcagctatctcagtctttctcacttaatcttggcttcacgtcagaagctgtgcagcagtgcagtagaatagggcctggcaaaacctttgctagcaaagcgccttttgtgccgggctgtggctcgctatcgacatctcgtccgttaccaaggctgggtttcctactgatttccctcctcctctgctttcacaggctcgcgcggccggacattgtgggtgtgcgtgctggatttctcccggatgctctccgactaacatggatgtcccaccattccttgcagtggaaggttgttccttggcgcagtgagtgaagaacatgcagcgattgctaatgggtttgggaagcggagactccttcctctctctatgaccatgccgtgatcgtgtctgcggtcaccactcgacgcatcctcatttctacccgaacccaggagccgaacgctagatcggggaagtgggtgccgtgcgtgtgggcacagaaacaccatgaagattattttcccgattctaagtaatccagtcttcaggcgcaccgttaaactcctgctctgtttactgtggattggatattctcaaggaaccacacatgtattaagatttggtggtatttttgaatatgtggaatctggcccaatgggagctgaggaacttgcattcagatttgctgtgaacacaattaacagaaacagaacattgctacccaatactacccttacctatgatacccagaagataaacctttatgatagttttgaagcatccaagaaagcctgtgatcagctgtctcttggggtggctgccatcttcgggccttcacacagctcatcagcaaacgcagtgcagtccatctgcaatgctctgggagttccccacatacagacccgctggaagcaccaggtgtcagacaacaaagattccttctatgtcagtctctacccagacttctcttcactcagccgtgccattttagacctggtgcagtttttcaagtggaaaaccgtcacggttgtgtatgatgacagcactggtctcattcgtttgcaagagctcatcaaagctccatcaaggtataatcttcgactcaaaattcgtcagttacctgctgatacaaaggatgcaaaacccttactaaaagaaatgaaaagaggcaaggagtttcatgtaatctttgattgtagccatgaaatggcagcaggcattttaaaacaggcattagctatgggaatgatgacagaatactatcattatatctttaccactctggacctctttgctcttgatgttgagccctaccgatacagtggtgttaacatgacagggttcagaatattaaatacagaaaatacccaagtctcctccatcattgaaaagtggtcgatggaacgattgcaggcacctccgaaacccgattcaggtttgctggatggatttatgacgactgatgctgctctaatgtatgatgctgtgcatgtggtgtctgtggccgttcaacagtttccccagatgacagtcagttccttgcagtgtaatcgacataaaccctggcgcttcgggacccgctttatgagtctaattaaagaggcacattgggaaggcctcacaggcagaataactttcaacaaaaccaatggcttgagaacagattttgatttggatgtgatcagtctgaaggaagaaggtctagaaaagattggaacgtgggatccagccagtggcctgaatatgacagaaagtcaaaagggaaagccagcgaacatcacagattccttatccaatcgttctttgattgttaccaccattttggaagagccttatgtcctttttaagaagtctgacaaacctctctatggtaatgatcgatttgaaggctattgcattgatctcctcagagagttatctacaatccttggctttacatatgaaattagacttgtggaagatgggaaatatggagcccaggatgatgccaatggacaatggaatggaatggttcgtgaactaattgatcataaagctgaccttgcagttgctccactggctattacctatgttcgagagaaggtcatcgacttttccaagccctttatgacacttggaataagtattttgtaccgcaagcccaatggtacaaacccaggcgtcttctccttcctgaatcctctctcccctgatatctggatgtatattctgctggcttacttgggtgtcagttgtgtgctctttgtcatagccaggtttagtccttatgagtggtataatccacacccttgcaaccctgactcagacgtggtggaaaacaattttaccttgctaaatagtttctggtttggagttggagctctcatgcagcaaggttctgagctcatgcccaaagcactgtccaccaggatagtgggaggcatttggtggtttttcacacttatcatcatttcttcgtatactgctaacttagccgcctttctgacagtggaacgcatggaatcccctattgactctgctgatgatttagctaaacaaaccaagatagaatatggagcagtagaggatggtgcaaccatgacttttttcaagaaatcaaaaatctccacgtatgacaaaatgtgggcctttatgagtagcagaaggcagtcagtgctggtcaaaagtaatgaagaaggaatccagcgagtcctcacctctgattatgctttcctaatggagtcaacaaccatcgagtttgttacccagcggaactgtaacctgacacagattggcggccttatagactctaaaggttatggcgttggcactcccatgggttctccatatcgagacaaaattaccatagcaattcttcagctgcaagaggaaggcaaactgcatatgatgaaggagaaatggtggaggggcaatggttgcccagaagaggagagcaaagaggccagtgccctgggggttcagaatattggtggcatcttcattgttctggcagccggcttggtgctttcagtttttgtggcagtgggagaatttttatacaaatccaaaaaaaacgctcaattggaaaaggaatcttctatttggttagtgccaccataccatccagacactgtttagtaatcttttgaaacttactaaaagaggtttttaataatgaggtccttctgtagtgccatggtagaagaattgaggatgtccctgaagtgccagcgtcggttaaaacataagccacaggccccagttattgtgaaaacagaagaagttatcaacatgcacacatttaacgacagaaggttgccaggtaaagaaaccatggcataaagctgggaggccaaacacccaagcacaaactgtcgtctttttccaaacaatttagccagaatgtttcctgtggaaatatgcaacctgtgcaaaataaaatgagttacctcatgccgctgtgtctatgaactagagactctgtgatctaagcagttgcaatgatcagacttgatttacaagcatcatggatcaaccaagttacacggggttacactgttaatcatgggttcctcccttcttctgagtgaatgttaacatgcgcattttgtggctgatttcaaatgcagtccagtgagaaattacaggttccttttgaagctcaactgttgccaggagatggaatatcaatgcccaacagggcaaccaataaaagtgtcactaagaatataaatatttggaatcagcaaaaactgtagtgttacaggaaacagtacagtcttctgaacacccagatcatagaggtgatgatgttactagcccccaactactcagtataattattgtctgaatgcaaagtatgtgtttataggatgtgaaaaaatgtaatgcaaaacaaatttgaatcccatggcagttggaatataaagcagatgttcatcacttattttccttttttcttttcttatttttttttttgacagtctgtgtcactgattgagatagaaatgccaattatcaaggaaataatgttttcttaagttccctaaggcagaagatttaacatgcaattctaccagatcccttcctattcccccaacaccttttctctaacccccatatcccaaataataataataataataataataataataataataataataaaagcagttggttcagtgattctgaattaaaaggataatgttttgcaatgttcaagttgtaaaaactggccgagtattggctgtgtggaagactaaagctttcattctaacattcagacatagcaatccaaacccttgttcctgctgtaaatgaacttgatggagcatgggcagatttcagtgatacgagaaaggggactggtcatctatagaaaaatctgtgagagaacttggaagtggactgcgtttatcaatacagtcacaatgttaaatgaacaaaattcttgaacagttttttttcaaaaaatgttcaggtttatttgtggaaatgcaagatttctatgaaaatagtttttgtatggaaatttttgtaatactttttatcaacaaaacaagaacatgtgttcctgtcaggggtgtgatgtcaagcatgaatggtagtgcgtgtgcaccaccaacgtttggtgaaaactatttttatcaagaaaaaaggaatcatagaagagaaatattttcaagttagataatataaaagctaggtgcactaccaccactgcttaccatgccacacccctggtttccacgaggctgacaacatactgtaatgaacaattgtgtgtaaaatggtaaaagacacagacctcttgacaacattgtgataacagttgagtgcacacagtttgctgtttgaatccaatgcacaaaattaaaaaaaatcattaaaactatgttcattttactttca

SEQ ID NO: 8967 - DNA, 4921 bp, Homo sapiens
  source 1..4921: mol_type = unassigned DNA
ggagagcagctatctcagtctttctcacttaatcttggcttcacgtcagaagctgtgcagcagtgcagtagaatagggcctggcaaaacctttgctagcaaagcgccttttgtgccgggctgtggctcgctatcgacatctcgtccgttaccaaggctgggtttcctactgatttccctcctcctctgctttcacaggctcgcgcggccggacattgtgggtgtgcgtgctggatttctcccggatgctctccgactaacatggatgtcccaccattccttgcagtggaaggttgttccttggcgcagtgagtgaagaacatgcagcgattgctaatgggtttgggaagcggagactccttcctctctctatgaccatgccgtgatcgtgtctgcggtcaccactcgacgcatcctcatttctacccgaacccaggagccgaacgctagatcggggaagtgggtgccgtgcgtgtgggcacagaaacaccatgaagattattttcccgattctaagtaatccagtcttcaggcgcaccgttaaactcctgctctgtttactgtggattggatattctcaaggaaccacacatgtattaagatttggtggtatttttgaatatgtggaatctggcccaatgggagctgaggaacttgcattcagatttgctgtgaacacaattaacagaaacagaacattgctacccaatactacccttacctatgatacccagaagataaacctttatgatagttttgaagcatccaagaaagcctgtgatcagctgtctcttggggtggctgccatcttcgggccttcacacagctcatcagcaaacgcagtgcagtccatctgcaatgctctgggagttccccacatacagacccgctggaagcaccaggtgtcagacaacaaagattccttctatgtcagtctctacccagacttctcttcactcagccgtgccattttagacctggtgcagtttttcaagtggaaaaccgtcacggttgtgtatgatgacagcactggtctcattcgtttgcaagagctcatcaaagctccatcaaggtataatcttcgactcaaaattcgtcagttacctgctgatacaaaggatgcaaaacccttactaaaagaaatgaaaagaggcaaggagtttcatgtaatctttgattgtagccatgaaatggcagcaggcattttaaaacaggcattagctatgggaatgatgacagaatactatcattatatctttaccactctggacctctttgctcttgatgttgagccctaccgatacagtggtgttaacatgacagggttcagaatattaaatacagaaaatacccaagtctcctccatcattgaaaagtggtcgatggaacgattgcaggcacctccgaaacccgattcaggtttgctggatggatttatgacgactgatgctgctctaatgtatgatgctgtgcatgtggtgtctgtggccgttcaacagtttccccagatgacagtcagttccttgcagtgtaatcgacataaaccctggcgcttcgggacccgctttatgagtctaattaaagaggcacattgggaaggcctcacaggcagaataactttcaacaaaaccaatggcttgagaacagattttgatttggatgtgatcagtctgaaggaagaaggtctagaaaagattggaacgtgggatccagccagtggcctgaatatgacagaaagtcaaaagggaaagccagcgaacatcacagattccttatccaatcgttctttgattgttaccaccattttggaagagccttatgtcctttttaagaagtctgacaaacctctctatggtaatgatcgatttgaaggctattgcattgatctcctcagagagttatctacaatccttggctttacatatgaaattagacttgtggaagatgggaaatatggagcccaggatgatgccaatggacaatggaatggaatggttcgtgaactaattgatcataaagctgaccttgcagttgctccactggctattacctatgttcgagagaaggtcatcgacttttccaagccctttatgacacttggaataagtattttgtaccgcaagcccaatggtacaaacccaggcgtcttctccttcctgaatcctctctcccctgatatctggatgtatattctgctggcttacttgggtgtcagttgtgtgctctttgtcatagccaggtttagtccttatgagtggtataatccacacccttgcaaccctgactcagacgtggtggaaaacaattttaccttgctaaatagtttctggtttggagttggagctctcatgcagcaaggttctgagctcatgcccaaagcactgtccaccaggatagtgggaggcatttggtggtttttcacacttatcatcatttcttcgtatactgctaacttagccgcctttctgacagtggaacgcatggaatcccctattgactctgctgatgatttagctaaacaaaccaagatagaatatggagcagtagaggatggtgcaaccatgacttttttcaagaaatcaaaaatctccacgtatgacaaaatgtgggcctttatgagtagcagaaggcagtcagtgctggtcaaaagtaatgaagaaggaatccagcgagtcctcacctctgattatgctttcctaatggagtcaacaaccatcgagtttgttacccagcggaactgtaacctgacacagattggcggccttatagactctaaaggttatggcgttggcactcccatgggttctccatatcgagacaaaattaccatagcaattcttcagctgcaagaggaaggcaaactgcatatgatgaaggagaaatggtggaggggcaatggttgcccagaagaggagagcaaagaggccagtgccctgggggttcagaatattggtggcatcttcattgttctggcagccggcttggtgctttcagtttttgtggcagtgggagaatttttatacaaatccaaaaaaaacgctcaattggaaaagagagccaagactaagttacctcaagactatgtattcctccctattttggagtcagtttccatttctacagtgttgtcatcatcaccatcttcatcatcattatcatcatgttcttaataagtacatctaataaggtccttctgtagtgccatggtagaagaattgaggatgtccctgaagtgccagcgtcggttaaaacataagccacaggccccagttattgtgaaaacagaagaagttatcaacatgcacacatttaacgacagaaggttgccaggtaaagaaaccatggcataaagctgggaggccaaacacccaagcacaaactgtcgtctttttccaaacaatttagccagaatgtttcctgtggaaatatgcaacctgtgcaaaataaaatgagttacctcatgccgctgtgtctatgaactagagactctgtgatctaagcagttgcaatgatcagacttgatttacaagcatcatggatcaaccaagttacacggggttacactgttaatcatgggttcctcccttcttctgagtgaatgttaacatgcgcattttgtggctgatttcaaatgcagtccagtgagaaattacaggttccttttgaagctcaactgttgccaggagatggaatatcaatgcccaacagggcaaccaataaaagtgtcactaagaatataaatatttggaatcagcaaaaactgtagtgttacaggaaacagtacagtcttctgaacacccagatcatagaggtgatgatgttactagcccccaactactcagtataattattgtctgaatgcaaagtatgtgtttataggatgtgaaaaaatgtaatgcaaaacaaatttgaatcccatggcagttggaatataaagcagatgttcatcacttattttccttttttcttttcttatttttttttttgacagtctgtgtcactgattgagatagaaatgccaattatcaaggaaataatgttttcttaagttccctaaggcagaagatttaacatgcaattctaccagatcccttcctattcccccaacaccttttctctaacccccatatcccaaataataataataataataataataataataataataataataaaagcagttggttcagtgattctgaattaaaaggataatgttttgcaatgttcaagttgtaaaaactggccgagtattggctgtgtggaagactaaagctttcattctaacattcagacatagcaatccaaacccttgttcctgctgtaaatgaacttgatggagcatgggcagatttcagtgatacgagaaaggggactggtcatctatagaaaaatctgtgagagaacttggaagtggactgcgtttatcaatacagtcacaatgttaaatgaacaaaattcttgaacagttttttttcaaaaaatgttcaggtttatttgtggaaatgcaagatttctatgaaaatagtttttgtatggaaatttttgtaatactttttatcaacaaaacaagaacatgtgttcctgtcaggggtgtgatgtcaagcatgaatggtagtgcgtgtgcaccaccaacgtttggtgaaaactatttttatcaagaaaaaaggaatcatagaagagaaatattttcaagttagataatataaaagctaggtgcactaccaccactgcttaccatgccacacccctggtttccacgaggctgacaacatactgtaatgaacaattgtgtgtaaaatggtaaaagacacagacctcttgacaacattgtgataacagttgagtgcacacagtttgctgtttgaatccaatgcacaaaattaaaaaaaatcattaaaactatgttcattttactttca

SEQ ID NO: 8968 - DNA, 1981 bp, Homo sapiens
  source 1..1981: mol_type = unassigned DNA
gcagctatctcagtctttctcacttaatcttggcttcacgtcagaagctgtgcagcagtgcagtagaatagggcctggcaaaacctttgctagcaaagcgccttttgtgccgggctgtggctcgctatcgacatctcgtccgttaccaaggctgggtttcctactgatttccctcctcctctgctttcacaggctcgcgcggccggacattgtgggtgtgcgtgctggatttctcccggatgctctccgactaacatggatgtcccaccattccttgcagtggaaggttgttccttggcgcagtgagtgaagaacatgcagcgattgctaatgggtttgggaagcggagactccttcctctctctatgaccatgccgtgatcgtgtctgcggtcaccactcgacgcatcctcatttctacccgaacccaggagccgaacgctagatcggggaagtgggtgccgtgcgtgtgggcacagaaacaccatgaagattattttcccgattctaagtaatccagtcttcaggcgcaccgttaaactcctgctctgtttactgtggattggatattctcaaggaaccacacatgtattaagatttggtggtatttttgaatatgtggaatctggcccaatgggagctgaggaacttgcattcagatttgctgtgaacacaattaacagaaacagaacattgctacccaatactacccttacctatgatacccagaagataaacctttatgatagttttgaagcatccaagaaagcctgtgatcagctgtctcttggggtggctgccatcttcgggccttcacacagctcatcagcaaacgcagtgcagtccatctgcaatgctctgggagttccccacatacagacccgctggaagcaccaggtgtcagacaacaaagattccttctatgtcagtctctacccagacttctcttcactcagccgtgccattttagacctggtgcagtttttcaagtggaaaaccgtcacggttgtgtatgatgacagcactggtctcattcgtttgcaagagctcatcaaagctccatcaaggtataatcttcgactcaaaattcgtcagttacctgctgatacaaaggatgcaaaacccttactaaaagaaatgaaaagaggcaaggagtttcatgtaatctttgattgtagccatgaaatggcagcaggcattttaaaacaggcattagctatgggaatgatgacagaatactatcattatatctttaccactctggacctctttgctcttgatgttgagccctaccgatacagtggtgttaacatgacagggttcagaatattaaatacagaaaatacccaagtctcctccatcattgaaaagtggtcgatggaacgattgcaggcacctccgaaacccgattcaggtttgctggatggatttatgacgatggagtttcactcttgttgcccaggctggagtgcaatggcacgatctcagctcactgcaacctctgcctcctgggttcaagcgattcttctgcctcagcctcccgagtagctgagattacaggcacacaccactatgcctggctaatttttttgtatttttagtagagatggggtttctctatgttggtcaggatggtctcgaactcctgacctcaggtaatccgcccaccttggcctcccaaagtgctgggattacaggcaagagccactgcacctggcccacagtttcttaatccatttgttgattgatgggcatatgggctggttccatatgtttgcaactgcaaattgtgagcactgtttaattctaagcttccttgtaggtaaggcaaaaagcaagcaaagtattttaggcaattcccataactaaagggaaattatttattatatttgtccatttgaaaagatattttttcatgttgtaaaaaatttattaaatgaatgctaacataaggattaataaacaacatgatcttaacattc

SEQ ID NO: 8969 - DNA, 540 bp, Homo sapiens
  source 1..540: mol_type = unassigned DNA
tgtagccatgaaatggcagcaggcattttaaaacaggcattagctatgggaatgatgacagaatactatcattatatctttaccactctgactgatgctgctctaatgtatgatgctgtgcatgtggtgtctgtggccgttcaacagtttccccagatgacagtcagttccttgcagtgtaatcgacataaaccctggcgcttcgggacccgctttatgagtctaattaaagaggcacattgggaaggcctcacaggcagaataactttcaacaaaaccaatggcttgagaacagattttgatttggatgtgatcagtctgaaggaagaaggtctagaaaagattggaacgtgggatccagccagtggcctgaatatgacagaaagtcaaaagggaaagccagcgaacatcacagattccttatccaatcgttctttgattgttaccaccattttggaagagccttatgtcctttttaagaagtctgacaaacctctctatggtaatgatcgatttgaaggctattgcattgatctcctc

SEQ ID NO: 8970 - DNA, 1066 bp, Homo sapiens
  source 1..1066: mol_type = unassigned DNA
attggaacgtgggatccagccagtggcctgaatatgacagaaagtcaaaagggaaagccagcgaacatcacagattccttatccaatcgttctttgattgttaccaccattttggaagagccttatgtcctttttaagaagtctgacaaacctctctatggtaatgatcgatttgaaggctattgcattgatctcctcagagagttatctacaatccttggctttacatatgaaattagacttgtggaagatgggaaatatggagcccaggatgatgccaatggacaatggaatggaatggttcgtgaactaattgatcataaagctgaccttgcagttgctccactggctattacctatgttcgagagaaggtcatcgacttttccaagccctttatgacacttggaataagtattttgtaccgcaagcccaatggtacaaacccaggcgtcttctccttcctgaatcctctctcccctgatatctggatgtatattctgctggcttacttgggtgtcagttgtgtgctctttgtcatagccaggtaacatgctcacttttgtgatttttttggcaattgttacctcctttatctaactaataattgtcaaaagtcacaatcaattttactttttctgttctttattttccatggggtgctgagaaataatgaaattttaagaatcacattcatttattaaaatgtactgtcctgtctttgtgggcagagagcatgctggttgtgtcagtaagctataagtgttatagggattactgttttcttaaccagaatataaaagctttttaaatcaatatgataaatgaatcattgcctcacttcgaagatttctgaagaaccaaaactaaaataacatgttttactaacttgagttaataattcagttataagaaaaaccaaagtactaaaatttaaaaggaggccttttttaaggaaccaagacatttataataaacattctaactataaaaggactaccttagtattctacataatatttgtggtttttttcttgttttttcacagaataaatgtcattaccaaaa

SEQ ID NO: 8971 - DNA, 1518 bp, Homo sapiens
  source 1..1518: mol_type = unassigned DNA
tttaattgatgctaaccatagtgatgggagatccttgcttatacaggagaacataatttattatcttattttaaaataaacattacactaaaaccccacatcatttcaagaaatgtgggcaatagtagttattttattattatacgtaacttttaaaaataacaagatagacaaaatgtttgagctacatgcacatgaaaagtgaaatttacaaaaagcttaagaaagggatccaaaagtatatttaagcacttcctctgaaaccctcataactaacaaaatatgaaaaaacaataaatgtggtttataaaccagaaagcctaaaaaatctcttctaatgctatttttattaaaaatgtttactcattaatattttaattggaactttgcatcatctcaggtagaacatgagtctcctgtcactatatttaaacaagaatgtcctaaaagattgtctattttctgaaaatagcctctgctttcccaatggttgttgcttgcttactaaagaaatatgtaaatctttgatttaagcttttattacacagtgattccattctgccactgtgacaaaaagtatctgattgctgatcaaattctctatattcgtttcacctttcccccactctctgttaggttctgagctcatgcccaaagcactgtccaccaggatagtgggaggcatttggtggtttttcacacttatcatcatttcttcgtatactgctaacttagccgcctttctgacagtggaacgcatggaatcccctattgactctgctgatgatttagctaaacaaaccaagatagaatatggagcagtagaggatggtgcaaccatgacttttttcaagaagaagaaaaaaaaagaatgaggaggaataagaagaggaggaggaaggaaagaagaacagaaacacaaaatcttactgtgtcattacatgacctatgattaatctcttccatcttatttacattttggataaataggtgactctattttctcaaagtaaaaaggaagatatatttacttacttgccaattatcttattgaagtgttaaagttttatttttctctggattattttaagatgtacttactattaattcattttattgaaagttgacatggtaaactatatttccaggactatagaagattcaaagatgataaaatatgtatggccttttcttcacaggctttaaaatctaatgacaatttcataagcaaccataaatttgaacatttttgatatctgtaacaatatagtactttatgtaaatggttatagcaaaaataatgccatagttctatgaggaaagaaattttaaaattcctgattcttctcctttagaaatatgtacatatttatctatctatgcatagatactatttcttgaaatatagttaaatctattatacttccatcatattaggctatatatgcatgcttctatatatatattaatatatatgttaacatacagaataaaaataaatatatatgttctactagc

SEQ ID NO: 8972 - DNA, 691 bp, Homo sapiens
  source 1..691: mol_type = unassigned DNA
cattaatattttaattggaactttgcatcatctcaggtagaacatgagtctcctgtcactatatttaaacaagaatgtcctaaaagattgtctattttctgaaaatagcctctgctttcccaatggttgttgcttgcttactaaagaaatatgtaaatctttgatttaagcttttattacacagtgattccattctgccactgtgacaaaaagtatctgattgctgatcaaattctctatattcgtttcacctttcccccactctctgttaggttctgagctcatgcccaaagcactgtccaccaggatagtgggaggcatttggtggtttttcacacttatcatcatttcttcgtatactgctaacttagccgcctttctgacagtggaacgcatggaatcccctattgactctgctgatgatttagctaaacaaaccaagatagaatatggagcagtagaggatggtgcaaccatgacttttttcaagaaatcaaaaatctccacgtatgacaaaatgtgggcctttatgagtagcagaaggcagtcagtgctggtcaaaagtaatgaagaaggaatccagcgagtcctcacctctgattatgctttcctaatggagtcaacaaccatcgagtttgttacccagcggaactgtaacctgacacagattggcggccttatagactctaaa

SEQ ID NO: 8973 - DNA, 4185 bp, Homo sapiens
  source 1..4185: mol_type = unassigned DNA
ggtggtatttttgaatatgtggaatctggcccaatgggagctgaggaacttgcattcagatttgctgtgaacacaattaacagaaacagaacattgctacccaatactacccttacctatgatacccagaagataaacctttatgatagttttgaagcatccaagaaagcctgtgatcagctgtctcttggggtggctgccatcttcgggccttcacacagctcatcagcaaacgcagtgcagtccatctgcaatgctctgggagttccccacatacagacccgctggaagcaccaggtgtcagacaacaaagattccttctatgtcagtctctacccagacttctcttcactcagccgtgccattttagacctggtgcagtttttcaagtggaaaaccgtcacggttgtgtatgatgacagcactggtctcattcgtttgcaagagctcatcaaagctccatcaaggtataatcttcgactcaaaattcgtcagttacctgctgatacaaaggatgcaaaacccttactaaaagaaatgaaaagaggcaaggagtttcatgtaatctttgattgtagccatgaaatggcagcaggcattttaaaacaggcattagctatgggaatgatgacagaatactatcattatatctttaccactctggacctctttgctcttgatgttgagccctaccgatacagtggtgttaacatgacagggttcagaatattaaatacagaaaatacccaagtctcctccatcattgaaaagtggtcgatggaacgattgcaggcacctccgaaacccgattcaggtttgctggatggatttatgacgactgatgctgctctaatgtatgatgctgtgcatgtggtgtctgtggccgttcaacagtttccccagatgacagtcagttccttgcagtgtaatcgacataaaccctggcgcttcgggacccgctttatgagtctaattaaagaggcacattgggaaggcctcacaggcagaataactttcaacaaaaccaatggcttgagaacagattttgatttggatgtgatcagtctgaaggaagaaggtctagaaaagattggaacgtgggatccagccagtggcctgaatatgacagaaagtcaaaagggaaagccagcgaacatcacagattccttatccaatcgttctttgattgttaccaccattttggaagagccttatgtcctttttaagaagtctgacaaacctctctatggtaatgatcgatttgaaggctattgcattgatctcctcagagagttatctacaatccttggctttacatatgaaattagacttgtggaagatgggaaatatggagcccaggatgatgccaatggacaatggaatggaatggttcgtgaactaattgatcataaagctgaccttgcagttgctccactggctattacctatgttcgagagaaggtcatcgacttttccaagccctttatgacacttggaataagtattttgtaccgcaagcccaatggtacaaacccaggcgtcttctccttcctgaatcctctctcccctgatatctggatgtatattctgctggcttacttgggtgtcagttgtgtgctctttgtcatagccaggtttagtccttatgagtggtataatccacacccttgcaaccctgactcagacgtggtggaaaacaattttaccttgctaaatagtttctggtttggagttggagctctcatgcagcaaggttctgagctcatgcccaaagcactgtccaccaggatagtgggaggcatttggtggtttttcacacttatcatcatttcttcgtatactgctaacttagccgcctttctgacagtggaacgcatggaatcccctattgactctgctgatgatttagctaaacaaaccaagatagaatatggagcagtagaggatggtgcaaccatgacttttttcaagaaatcaaaaatctccacgtatgacaaaatgtgggcctttatgagtagcagaaggcagtcagtgctggtcaaaagtaatgaagaaggaatccagcgagtcctcacctctgattatgctttcctaatggagtcaacaaccatcgagtttgttacccagcggaactgtaacctgacacagattggcggccttatagactctaaaggttatggcgttggcactcccatgggttctccatatcgagacaaaattaccatagcaattcttcagctgcaagaggaaggcaaactgcatatgatgaaggagaaatggtggaggggcaatggttgcccagaagaggagagcaaagaggccagtgccctgggggttcagaatattggtggcatcttcattgttctggcagccggcttggtgctttcagtttttgtggcagtgggagaatttttatacaaatccaaaaaaaacgctcaattggaaaagaggtccttctgtagtgccatggtagaagaattgaggatgtccctgaagtgccagcgtcggttaaaacataagccacaggccccagttattgtgaaaacagaagaagttatcaacatgcacacatttaacgacagaaggttgccaggtaaagaaaccatggcataaagctgggaggccaaacacccaagcacaaactgtcgtctttttccaaacaatttagccagaatgtttcctgtggaaatatgcaacctgtgcaaaataaaatgagttacctcatgccgctgtgtctatgaactagagactctgtgatctaagcagttgcaatgatcagacttgatttacaagcatcatggatcaaccaagttacacggggttacactgttaatcatgggttcctcccttcttctgagtgaatgttaacatgcgcattttgtggctgatttcaaatgcagtccagtgagaaattacaggttccttttgaagctcaactgttgccaggagatggaatatcaatgcccaacagggcaaccaataaaagtgtcactaagaatataaatatttggaatcagcaaaaactgtagtgttacaggaaacagtacagtcttctgaacacccagatcatagaggtgatgatgttactagcccccaactactcagtataattattgtctgaatgcaaagtatgtgtttataggatgtgaaaaaatgtaatgcaaaacaaatttgaatcccatggcagttggaatataaagcagatgttcatcacttattttccttttttcttttcttatttttttttttgacagtctgtgtcactgattgagatagaaatgccaattatcaaggaaataatgttttcttaagttccctaaggcagaagatttaacatgcaattctaccagatcccttcctattcccccaacaccttttctctaacccccatatcccaaataataataataataataataataataataataataataataaaagcagttggttcagtgattctgaattaaaaggataatgttttgcaatgttcaagttgtaaaaactggccgagtattggctgtgtggaagactaaagctttcattctaacattcagacatagcaatccaaacccttgttcctgctgtaaatgaacttgatggagcatgggcagatttcagtgatacgagaaaggggactggtcatctatagaaaaatctgtgagagaacttggaagtggactgcgtttatcaatacagtcacaatgttaaatgaacaaaattcttgaacagttttttttcaaaaaatgttcaggtttatttgtggaaatgcaagatttctatgaaaatagtttttgtatggaaatttttgtaatactttttatcaacaaaacaagaacatgtgttcctgtcaggggtgtgatgtcaagcatgaatggtagtgcgtgtgcaccaccaacgtttggtgaaaactatttttatcaagaaaaaaggaatcatagaagagaaatattttcaagttagataatataaaagctaggtgcactaccaccactgcttaccatgccacacccctggtttccacgaggctgacaacatactgtaatgaacaattgtgtgtaaaatggtaaaagacacagacctcttgacaacattgtgataacagttgagtgcacacagtttgctgtttgaatccaatgcacaaaattaaaaaaaatcattaaaactatgttcattttactttca

SEQ ID NO: 8974 - DNA, 4317 bp, Homo sapiens
  source 1..4317: mol_type = unassigned DNA
ggtggtatttttgaatatgtggaatctggcccaatgggagctgaggaacttgcattcagatttgctgtgaacacaattaacagaaacagaacattgctacccaatactacccttacctatgatacccagaagataaacctttatgatagttttgaagcatccaagaaagcctgtgatcagctgtctcttggggtggctgccatcttcgggccttcacacagctcatcagcaaacgcagtgcagtccatctgcaatgctctgggagttccccacatacagacccgctggaagcaccaggtgtcagacaacaaagattccttctatgtcagtctctacccagacttctcttcactcagccgtgccattttagacctggtgcagtttttcaagtggaaaaccgtcacggttgtgtatgatgacagcactggtctcattcgtttgcaagagctcatcaaagctccatcaaggtataatcttcgactcaaaattcgtcagttacctgctgatacaaaggatgcaaaacccttactaaaagaaatgaaaagaggcaaggagtttcatgtaatctttgattgtagccatgaaatggcagcaggcattttaaaacaggcattagctatgggaatgatgacagaatactatcattatatctttaccactctggacctctttgctcttgatgttgagccctaccgatacagtggtgttaacatgacagggttcagaatattaaatacagaaaatacccaagtctcctccatcattgaaaagtggtcgatggaacgattgcaggcacctccgaaacccgattcaggtttgctggatggatttatgacgactgatgctgctctaatgtatgatgctgtgcatgtggtgtctgtggccgttcaacagtttccccagatgacagtcagttccttgcagtgtaatcgacataaaccctggcgcttcgggacccgctttatgagtctaattaaagaggcacattgggaaggcctcacaggcagaataactttcaacaaaaccaatggcttgagaacagattttgatttggatgtgatcagtctgaaggaagaaggtctagaaaagattggaacgtgggatccagccagtggcctgaatatgacagaaagtcaaaagggaaagccagcgaacatcacagattccttatccaatcgttctttgattgttaccaccattttggaagagccttatgtcctttttaagaagtctgacaaacctctctatggtaatgatcgatttgaaggctattgcattgatctcctcagagagttatctacaatccttggctttacatatgaaattagacttgtggaagatgggaaatatggagcccaggatgatgccaatggacaatggaatggaatggttcgtgaactaattgatcataaagctgaccttgcagttgctccactggctattacctatgttcgagagaaggtcatcgacttttccaagccctttatgacacttggaataagtattttgtaccgcaagcccaatggtacaaacccaggcgtcttctccttcctgaatcctctctcccctgatatctggatgtatattctgctggcttacttgggtgtcagttgtgtgctctttgtcatagccaggtttagtccttatgagtggtataatccacacccttgcaaccctgactcagacgtggtggaaaacaattttaccttgctaaatagtttctggtttggagttggagctctcatgcagcaaggttctgagctcatgcccaaagcactgtccaccaggatagtgggaggcatttggtggtttttcacacttatcatcatttcttcgtatactgctaacttagccgcctttctgacagtggaacgcatggaatcccctattgactctgctgatgatttagctaaacaaaccaagatagaatatggagcagtagaggatggtgcaaccatgacttttttcaagaaatcaaaaatctccacgtatgacaaaatgtgggcctttatgagtagcagaaggcagtcagtgctggtcaaaagtaatgaagaaggaatccagcgagtcctcacctctgattatgctttcctaatggagtcaacaaccatcgagtttgttacccagcggaactgtaacctgacacagattggcggccttatagactctaaaggttatggcgttggcactcccatgggttctccatatcgagacaaaattaccatagcaattcttcagctgcaagaggaaggcaaactgcatatgatgaaggagaaatggtggaggggcaatggttgcccagaagaggagagcaaagaggccagtgccctgggggttcagaatattggtggcatcttcattgttctggcagccggcttggtgctttcagtttttgtggcagtgggagaatttttatacaaatccaaaaaaaacgctcaattggaaaagagagccaagactaagttacctcaagactatgtattcctccctattttggagtcagtttccatttctacagtgttgtcatcatcaccatcttcatcatcattatcatcatgttcttaataagtacatctaataaggtccttctgtagtgccatggtagaagaattgaggatgtccctgaagtgccagcgtcggttaaaacataagccacaggccccagttattgtgaaaacagaagaagttatcaacatgcacacatttaacgacagaaggttgccaggtaaagaaaccatggcataaagctgggaggccaaacacccaagcacaaactgtcgtctttttccaaacaatttagccagaatgtttcctgtggaaatatgcaacctgtgcaaaataaaatgagttacctcatgccgctgtgtctatgaactagagactctgtgatctaagcagttgcaatgatcagacttgatttacaagcatcatggatcaaccaagttacacggggttacactgttaatcatgggttcctcccttcttctgagtgaatgttaacatgcgcattttgtggctgatttcaaatgcagtccagtgagaaattacaggttccttttgaagctcaactgttgccaggagatggaatatcaatgcccaacagggcaaccaataaaagtgtcactaagaatataaatatttggaatcagcaaaaactgtagtgttacaggaaacagtacagtcttctgaacacccagatcatagaggtgatgatgttactagcccccaactactcagtataattattgtctgaatgcaaagtatgtgtttataggatgtgaaaaaatgtaatgcaaaacaaatttgaatcccatggcagttggaatataaagcagatgttcatcacttattttccttttttcttttcttatttttttttttgacagtctgtgtcactgattgagatagaaatgccaattatcaaggaaataatgttttcttaagttccctaaggcagaagatttaacatgcaattctaccagatcccttcctattcccccaacaccttttctctaacccccatatcccaaataataataataataataataataataataataataataataaaagcagttggttcagtgattctgaattaaaaggataatgttttgcaatgttcaagttgtaaaaactggccgagtattggctgtgtggaagactaaagctttcattctaacattcagacatagcaatccaaacccttgttcctgctgtaaatgaacttgatggagcatgggcagatttcagtgatacgagaaaggggactggtcatctatagaaaaatctgtgagagaacttggaagtggactgcgtttatcaatacagtcacaatgttaaatgaacaaaattcttgaacagttttttttcaaaaaatgttcaggtttatttgtggaaatgcaagatttctatgaaaatagtttttgtatggaaatttttgtaatactttttatcaacaaaacaagaacatgtgttcctgtcaggggtgtgatgtcaagcatgaatggtagtgcgtgtgcaccaccaacgtttggtgaaaactatttttatcaagaaaaaaggaatcatagaagagaaatattttcaagttagataatataaaagctaggtgcactaccaccactgcttaccatgccacacccctggtttccacgaggctgacaacatactgtaatgaacaattgtgtgtaaaatggtaaaagacacagacctcttgacaacattgtgataacagttgagtgcacacagtttgctgtttgaatccaatgcacaaaattaaaaaaaatcattaaaactatgttcattttactttca

SEQ ID NO: 8975 - DNA, 4272 bp, Homo sapiens
  source 1..4272: mol_type = unassigned DNA
ggtggtatttttgaatatgtggaatctggcccaatgggagctgaggaacttgcattcagatttgctgtgaacacaattaacagaaacagaacattgctacccaatactacccttacctatgatacccagaagataaacctttatgatagttttgaagcatccaagaaagcctgtgatcagctgtctcttggggtggctgccatcttcgggccttcacacagctcatcagcaaacgcagtgcagtccatctgcaatgctctgggagttccccacatacagacccgctggaagcaccaggtgtcagacaacaaagattccttctatgtcagtctctacccagacttctcttcactcagccgtgccattttagacctggtgcagtttttcaagtggaaaaccgtcacggttgtgtatgatgacagcactggtctcattcgtttgcaagagctcatcaaagctccatcaaggtataatcttcgactcaaaattcgtcagttacctgctgatacaaaggatgcaaaacccttactaaaagaaatgaaaagaggcaaggagtttcatgtaatctttgattgtagccatgaaatggcagcaggcattttaaaacaggcattagctatgggaatgatgacagaatactatcattatatctttaccactctggacctctttgctcttgatgttgagccctaccgatacagtggtgttaacatgacagggttcagaatattaaatacagaaaatacccaagtctcctccatcattgaaaagtggtcgatggaacgattgcaggcacctccgaaacccgattcaggtttgctggatggatttatgacgactgatgctgctctaatgtatgatgctgtgcatgtggtgtctgtggccgttcaacagtttccccagatgacagtcagttccttgcagtgtaatcgacataaaccctggcgcttcgggacccgctttatgagtctaattaaagaggcacattgggaaggcctcacaggcagaataactttcaacaaaaccaatggcttgagaacagattttgatttggatgtgatcagtctgaaggaagaaggtctagaaaagattggaacgtgggatccagccagtggcctgaatatgacagaaagtcaaaagggaaagccagcgaacatcacagattccttatccaatcgttctttgattgttaccaccattttggaagagccttatgtcctttttaagaagtctgacaaacctctctatggtaatgatcgatttgaaggctattgcattgatctcctcagagagttatctacaatccttggctttacatatgaaattagacttgtggaagatgggaaatatggagcccaggatgatgccaatggacaatggaatggaatggttcgtgaactaattgatcataaagctgaccttgcagttgctccactggctattacctatgttcgagagaaggtcatcgacttttccaagccctttatgacacttggaataagtattttgtaccgcaagcccaatggtacaaacccaggcgtcttctccttcctgaatcctctctcccctgatatctggatgtatattctgctggcttacttgggtgtcagttgtgtgctctttgtcatagccaggtttagtccttatgagtggtataatccacacccttgcaaccctgactcagacgtggtggaaaacaattttaccttgctaaatagtttctggtttggagttggagctctcatgcagcaaggttctgagctcatgcccaaagcactgtccaccaggatagtgggaggcatttggtggtttttcacacttatcatcatttcttcgtatactgctaacttagccgcctttctgacagtggaacgcatggaatcccctattgactctgctgatgatttagctaaacaaaccaagatagaatatggagcagtagaggatggtgcaaccatgacttttttcaagaaatcaaaaatctccacgtatgacaaaatgtgggcctttatgagtagcagaaggcagtcagtgctggtcaaaagtaatgaagaaggaatccagcgagtcctcacctctgattatgctttcctaatggagtcaacaaccatcgagtttgttacccagcggaactgtaacctgacacagattggcggccttatagactctaaaggttatggcgttggcactcccatgggttctccatatcgagacaaaattaccatagcaattcttcagctgcaagaggaaggcaaactgcatatgatgaaggagaaatggtggaggggcaatggttgcccagaagaggagagcaaagaggccagtgccctgggggttcagaatattggtggcatcttcattgttctggcagccggcttggtgctttcagtttttgtggcagtgggagaatttttatacaaatccaaaaaaaacgctcaattggaaaaggaatcttctatttggttagtgccaccataccatccagacactgtttagtaatcttttgaaacttactaaaagaggtttttaataatgaggtccttctgtagtgccatggtagaagaattgaggatgtccctgaagtgccagcgtcggttaaaacataagccacaggccccagttattgtgaaaacagaagaagttatcaacatgcacacatttaacgacagaaggttgccaggtaaagaaaccatggcataaagctgggaggccaaacacccaagcacaaactgtcgtctttttccaaacaatttagccagaatgtttcctgtggaaatatgcaacctgtgcaaaataaaatgagttacctcatgccgctgtgtctatgaactagagactctgtgatctaagcagttgcaatgatcagacttgatttacaagcatcatggatcaaccaagttacacggggttacactgttaatcatgggttcctcccttcttctgagtgaatgttaacatgcgcattttgtggctgatttcaaatgcagtccagtgagaaattacaggttccttttgaagctcaactgttgccaggagatggaatatcaatgcccaacagggcaaccaataaaagtgtcactaagaatataaatatttggaatcagcaaaaactgtagtgttacaggaaacagtacagtcttctgaacacccagatcatagaggtgatgatgttactagcccccaactactcagtataattattgtctgaatgcaaagtatgtgtttataggatgtgaaaaaatgtaatgcaaaacaaatttgaatcccatggcagttggaatataaagcagatgttcatcacttattttccttttttcttttcttatttttttttttgacagtctgtgtcactgattgagatagaaatgccaattatcaaggaaataatgttttcttaagttccctaaggcagaagatttaacatgcaattctaccagatcccttcctattcccccaacaccttttctctaacccccatatcccaaataataataataataataataataataataataataataataaaagcagttggttcagtgattctgaattaaaaggataatgttttgcaatgttcaagttgtaaaaactggccgagtattggctgtgtggaagactaaagctttcattctaacattcagacatagcaatccaaacccttgttcctgctgtaaatgaacttgatggagcatgggcagatttcagtgatacgagaaaggggactggtcatctatagaaaaatctgtgagagaacttggaagtggactgcgtttatcaatacagtcacaatgttaaatgaacaaaattcttgaacagttttttttcaaaaaatgttcaggtttatttgtggaaatgcaagatttctatgaaaatagtttttgtatggaaatttttgtaatactttttatcaacaaaacaagaacatgtgttcctgtcaggggtgtgatgtcaagcatgaatggtagtgcgtgtgcaccaccaacgtttggtgaaaactatttttatcaagaaaaaaggaatcatagaagagaaatattttcaagttagataatataaaagctaggtgcactaccaccactgcttaccatgccacacccctggtttccacgaggctgacaacatactgtaatgaacaattgtgtgtaaaatggtaaaagacacagacctcttgacaacattgtgataacagttgagtgcacacagtttgctgtttgaatccaatgcacaaaattaaaaaaaatcattaaaactatgttcattttactttca

SEQ ID NO: 8976 - DNA, 9101 bp, Homo sapiens
  source 1..9101: mol_type = unassigned DNA
ctcggcggcgcccaacgatgaccgctccctggcggcgcctccggagtctggtttgggaatactgggccgggctcctcgtgtgcgccttctggatcccggactcgcgcgggatgccccacgtcatccggatcggaggaatcttcgagtatgcggacggccccaacgcccaggtcatgaatgccgaggagcatgcctttcgattttctgccaacatcatcaacaggaacaggactctgctgcccaacacaaccttgacctatgacatacagaggattcacttccatgacagcttcgaggcgaccaaaaaggcctgtgaccagctggcactgggcgtggtggcgatcttcggcccatcacagggctcctgcaccaatgccgtccagtccatctgcaatgccctggaggtgccccacatccagctgcgttggaagcaccacccgctggacaacaaggacaccttctacgtgaacctctaccccgactacgcctcgctcagccatgccatcctcgacctggtccagtacctcaagtggcggtcagccaccgtggtctatgacgacagtacagggctcatccgactgcaggagctcatcatggccccatcaagatacaacatccgcctgaagatccgtcagctccccatcgactctgacgactcgcgccccttgctcaaggagatgaagcgaggccgggaattccgcattatcttcgactgcagccacactatggcggcccagatcctcaagcaggccatggccatgggcatgatgactgagtactaccacttcatcttcaccactctggatctctacgctttagacctggagccctaccgctactcaggcgtgaacctgacaggattccggattctcaatgtggacaacccacacgtctcggccattgtggagaagtggtccatggagcggctgcaggcagctccccggtccgagtctggcctgctggatggagtgatgatgactgatgcagccttactgtacgacgccgtccatatcgtgtccgtgtgctaccagcgggcaccacagatgaccgtgaactccctgcagtgccatcggcacaaggcctggcgctttggcggccgcttcatgaacttcatcaaggaggctcaatgggaaggattaactggacgaattgttttcaacaaaactagtggcttgcggacggattttgatctggacatcatcagcctgaaagaggatggcctggagaaggttggggtgtggagtcctgccgacgggctcaacatcactgaggttgccaaaggccgaggccctaatgtcaccgactctctgacaaacagatcactcattgtcaccacagtgctggaggagcccttcgtcatgtttcggaaatcagacaggacgctatacgggaatgaccggttcgagggctactgcatcgacctgctaaaggagctggcccacatccttggtttctcctatgagatccggctggtggaggacggcaagtacggggcacaggatgacaagggccagtggaacggcatggtcaaggagctcatcgaccacaaggcagatctggccgtggcccccctgaccatcacccatgttcgagagaaggccatcgacttctccaagcccttcatgacacttggtgtgagcatcctgtatcgaaagcccaatggcaccaaccccagcgtcttctccttcctcaatcccctgtccccagacatctggatgtatgttctcctcgcctacctgggggtcagctgtgtcctcttcgtcatcgccaggttcagcccttatgagtggtacgatgctcacccctgcaaccctggctccgaggtggtggaaaataacttcactctgcttaacagcttctggtttggaatgggatccctgatgcagcaagggtctgagctgatgcccaaagccctgtccacacgcatcattggtggcatctggtggttcttcacgctcatcatcatctcttcctacacggccaacctggctgcctttctgaccgtggagcgcatggaatcacccattgactctgctgatgacctggccaagcaaaccaaaatcgagtatggggctgtcaaggatggggccaccatgaccttcttcaagaaatccaagatctccaccttcgagaagatgtgggccttcatgagcagcaagccatcggcgctggtgaagaacaacgaggagggcatccagagggccctgacggccgactacgcgctgctcatggagtccaccaccatcgagtacgtcacgcagaggaactgcaacctcacccagatcgggggcctcattgactccaagggctacggcatcggcacgcccatgggctccccataccgggacaagatcaccatcgccatcctgcagcttcaggaggaggacaagctgcatatcatgaaggagaagtggtggcggggcagcgggtgtcctgaggaggaaaacaaagaggccagtgccctggggatccagaagatcgggggcatcttcattgtcctggccgccgggctggtcctctctgtgctggtggccgtgggcgagtttgtgtacaagctccgcaaaacagcagagagagagcagcgttccttctgcagcaccgtggccgatgagatccgtttctcccttacctgccagcgtcgagtcaagcacaagcctcagcctcccatgatggtcaagactgacgccgtcatcaacatgcacacattcaatgaccgccggcttcccggcaaggacagcatggcctgcagcacatccttagcccctgtgttcccctaggcacagctggggtggggacctcaggcctgggggctgggcagaggaaagcaaaggagattggaaggaacgtcccctgtccccgcactgggcttggggaccagagctgccacctgcctgttgggccaggagcctcctgcccttacctgccaggaagccagcaggctctcaggccagctgcttgggcttcatcctcctcagatcttctgtgggtttctaaagctgccagccgagatagccaaggccaaaggaagcacatgcctctctcaggccaaactcacctgcccctcaactctcctccagagtcagaagtttctgccgcagccctgcagagggcacagaaaatggaagacagctcttatattgccatttcttccacaagagcccaggcctcctacagcttgaccgtgaggccagagacacaagccttcggcgccttaaggatgttctagcatggctgccaatgggagctcatggtgagggatacccatcccatatgcctgggcagaaggaagacttcatccctctggggctgttcacgtggtcctaatcttctgaacttggcgctgcccctggcagcccctgttctggcagagttgaagacagagctacacaggggaaaagaggagtttggggtatgggagagaagagaatgcacaaacagaggccgccattttggattcttatggacaatgacccagtggttcctaatcctctaggaggtctctaagaatataagtgggggagtggccacagaaaattcttctccactttctagccagaggagagaggaccccctgaatttctcacaaaggatgcccaaagatgcagccggtatttgaagcccagcagaggaaaagcagattccatggaagtcccaccggctcttgtgccaatggatctcactttcctggttagcaagctgttgtctaaaccctgttcacatttggaaacctgggctctttgccatcttctcatcaacaactccccattcctggctggttgaccttggcctcactctgtctttttgaaagaagagttggttgaagtgaaagtcaagttgtccctcctcaaaaaaggagttagtgtcctactacacagactaactttgggctaggtgagggaaaccagaagagaccaaaagaacttctggtctcctggacttaccaaacctagagatgctccccaggaaaagaaagtttccagggacataatatcatagctggcagaggccccaagggtggggaggaagaagctgcctcctggagaattaaccaaagaccccacacagagacatgaggccatcctggccccttgtctgttgtccagagcagctatggcattgtggggcttggggaagacagcagagaagtagcagcaggttgggtaccagccagggggtggacctatgagttccagcttgctgtgatgaatgctctagaggtctgtgactttaagagtcttggaaaagaatgagacatgaaggattaggaacaaagtgtccttaaagagaacatgatgggccagcagggttaccatggccaaggatggaggggcaggttttgaacaggggagggaggttctggggattctggatgagaactggggcataccagccactcccctcccacctctgtcccatgctgcttgggaagcccggttagggaagagcttcatttggatctcaagggctttctcatctgggtgaagggcaatctctagcaaagcaggagaccacagtgggctcatgtgataaacactgtccctcctccagactgtgagctgcaggaccaaaccagcaggttcccagaatcctagcagctctgactggctatgtacattggacgagggagaggagggctagacatacaccaaagccccatgcatgtaatgttaggaaaagccatgctgtcataagcttcagggtacagagggcgtgtgcatgtgtgtctgtgtctttgtgtttgtatgtgtgagcttcgggggctggggcacaggacagatctggacatataacatagtccagggcatgcaataataggtgaatccttggggatctgatgtgtgcatatgcgtgcgtatgtgtatctgagtgaattggggacgagggagacaaatatgtgaagcagcaaggccccatatatgtaaaaacaggagaagccatgtcataatggggccctggtgggtatgcatatgtaagcatgcatgcatgcataggtgtgtgcatgctggtgtgtgtgtgtgcacatgtacactgaatggcataggatggagatcaggatcttacctgcagctagccaaatatgcgtaaaaggagaagccatgtcaccaaggggtccatgtctgagtgcatgtgaacacatgtgtacaggcatgtgtgcacagtggggagcggggggaaggccaggaccagagagtcgtgtgacatgggtcaatgcatgctgtagacaagaagccacgtggagttgaagtttccgagtgtgtgggacacacacatatgttccaggtcacagtggaagcaaagacagacaatcaggaaggccgggcaccagggtctgtttgcacttctgtcatgggagagatcatttgtcacagagaggttccaaggttgcatgggcacacttgccaggagacgggggcacaacccttcaggggctcatgctgctgatgcctttgctgtggacatcatgtcctgtttgaagggaaaactcttttttgtaattcccaggtaacaggattctaatgaaggtatttgccaatttgctgtcagcaaacacaatcattaagcgccgtcttactttgtccagtatagtttcagagcacgtgcctcattcttgctcttgtctcacacatgtgttgtgtgtgtgatgctacatgagcatgttcttcagaggctatgcatatatgtggattgtgacaggaggaagaagaagtggtgagaatttttataaaacgaacaaagaatagtggataaatagaggcagaattcaattcgagaaaccccccaaaatgtaccgactggtctttagactcctgtgtggaagcaggagggcatgctgcctcatctcctctcccaggcaaaccttgcgtcctgatgttcaggtgttgtcggtgtggctgatatttggcttctggccaatatcctgcatttgtcctagagaccagcctagtgttcaaagtgcagtggggaccacagctgcccaagcatgagctctgtctctcccggggcactgaaaatgatgctacatctgtgaggtgggacggagtggggaggtgttttcagtgaggcagatcttgtgtttttttaagtttaggtctgtcctgccagtgggcatggagctgagctggggcaggtgcatgcgtgtgtgtgtatgtgtgtgtatgcatgtgtagtgtgtgtgcacacacgcaggcactgagaggtgatgggaagcatgaaagcttgcttggatggagcagaagaaggaacctgcctgagcagatgctggactgtccctgcgtggtgccacatgccagccctgaacagaagaatgtccccactgcatccccaaatgcaagtgcctcctctccacctgctcaagctggccaagttgaggggcagtggtaagaagacaccaaccccaccgcccctgccgaggccctgggactaaggacagtgagccctcccaatcactctccccttgtcctgctgctggtttctctgctctggacagaagaaaatcctgaaagcgttgtcaatgttcaagtggccccatgctgcaagagtctctcgcgaggggtgacgcccccttggccagtgtgctggactttgagtgtctgaggggtaagagggccaccccctcctcacagccgagactctatctaacctggaagcacactctggctccacccccaacccctgccatgccctaggccctggaagatgggaatcctggcccaggccagggtaaagggccaaacaggttagaagttgctcccctccaccaggcgtgcactcaccaagaacgatcaaaagctccctttctgcctacttttccaggggtactgggtgtggggggtgggtcacagctcctgcttcatcactcagcatgaagttggtccctccctgagccactcccagctacatgcacaaacatctgaaagtaggctggcctctctggctcacatctggagtggtcctgtgtggatacccatctgcaaaggggctagaggtttggacaaacagctgcatggacttatcatctgggatgggcccagcctcatggacagatacaagaaatgagcccaactctgtgggcaggtctctggattagacacatctgaaagttgcaggtcaagtggacacatctggaagtggcccggctgctggctgccatggaagggccgtgccctctgtccccatggcagtttaaatcaggccttcccttcagtcctggatttgccctggagtaaaaatttcagagctgaggtcatacgtgagtcacaaaacttttaggtagaaggttaatgttctgtacaatatatatatgaatgtaaaatatatatatatactgtatatatatatatatatgcacagtgtatatatgacctgtagcccatgtgtatacaaccctttcctgcacgtctgcacacggagtgtacagaacccagccagcacgggtgaggaccagatgagagatgggggctgcagcagcaaagtctgggacggaggtctcagagagccccttggggtggcgaaggccctccacacatcagagctccagaccctgaagaagagggcagagctacatggtgctgccaggtgagtcctgcaccgccagggcctcctgtgggaggggcaggaatggccaacggacctcatctccatccgagcctgtctgaggcaggacagctgggtgtgtctgagaagcaatgtcatgctagtactcagcccctgtgccaatattacattctagttctggggcaattcatcaggagcagaagggctgggaaagagcaggccactccccaggcctgttctcacacctgcctgcagaatcacaggtaggtttcaggctccatctaggataccctagaaggcggggctattctaggtagcaaaagcctctgcctctgattctcacccacatgcagaagcagtcacaacttgcacacaacacagctcacaactagggaaagcacttgttaaagagaatgcccccagggcatggccagcatgccgatacagtgttcccatgcccctgttactgatcctgtcctcctgccttctagaacagtggacctcacatcacctcccagattgtctccattttatggattgaaactctgaggcctccagacatgaagaagcagccatagattcagtcaaatgccagccaagggtttgccttgcctcagacaacctccccagccccatttgacccagagaccagctgtcagggagcgacctcagagccagaggggtgaaagatgagaggcaagaaggtagctcctatcctagcacagcccaggctccatctgtctgcctttctctcccctgcggcatcctggcagggcagttggcagagtgccccctccccaggaggctgcagatctctgtccctggctcacccagatcggtctgttctctgcagttccattcctttagcctctttcgcaggtctgagcatctctggagcatgcaggggaggagatatctgaggtgggcttccgtgcagtcagcagcctgccccagcttcagcctcaggcgtcaggctggtctgcactgaactctgggtctgcctctggggccctgaccaagcacgcctgactccagccccatgaggagcatcctgtcttggttccgtagggatcatgggtcctcttaccactgtgcgccaagcccccagcccacctctgcctgggccgacttcctggttgggcctcccatggtaggggcctcagttcccaggctctgggctgagcccccagggagcaccatgggcctctgagaccctagacctgtcccaccacccagaccagagtgcctggacgccccccactcccactcaacatggttcccacacactggtctctgggccattcaggggatgccctttgtggacatgcagaatttctatgaatatagttttttgtaaacattttgtaacaatttgggtttcatagtaactgtgttacttgccaatcattctaggctgatgtaaataaatttccaaacaaatctgattattttcctttttaagacactgtgatatatcaaagtgcacagtttgctgtatgaagtaatatggttttaaattttaaataaaatgtttctagaaaacaggg

SEQ ID NO: 8977 - DNA, 2955 bp, Homo sapiens
  source 1..2955: mol_type = unassigned DNA
cacgctcggcggcgcccaacgatgaccgctccctggcggcgcctccggagtctggtttgggaatactgggccgggctcctcgtgtgcgccttctggatcccggactcgcgcgggatgccccacgtcatccggatcggaggaatcttcgagtatgcggacggccccaacgcccaggtcatgaatgccgaggagcatgcctttcgattttctgccaacatcatcaacaggaacaggactctgctgcccaacacaaccttgacctatgacatacagaggattcacttccatgacagcttcgaggcgaccaaaaaggcctgtgaccagctggcactgggcgtggtggcgatcttcggcccatcacagggctcctgcaccaatgccgtccagtccatctgcaatgccctggaggtgccccacatccagctgcgttggaagcaccacccgctggacaacaaggacaccttctacgtgaacctctaccccgactacgcctcgctcagccatgccatcctcgacctggtccagtacctcaagtggcggtcagccaccgtggtctatgacgacagtacagggctcatccgactgcaggagctcatcatggccccatcaagatacaacatccgcctgaagatccgtcagctccccatcgactctgacgactcgcgccccttgctcaaggagatgaagcgaggccgggaattccgcattatcttcgactgcagccacactatggcggcccagatcctcaagcaggccatggccatgggcatgatgactgagtactaccacttcatcttcaccactctggatctctacgctttagacctggagccctaccgctactcaggcgtgaacctgacaggattccggattctcaatgtggacaacccacacgtctcggccattgtggagaagtggtccatggagcggctgcaggcagctccccggtccgagtctggcctgctggatggagtgatgatgactgatgcagccttactgtacgacgccgtccatatcgtgtccgtgtgctaccagcgggcaccacagatgaccgtgaactccctgcagtgccatcggcacaaggcctggcgctttggcggccgcttcatgaacttcatcaaggaggctcaatgggaaggattaactggacgaattgttttcaacaaaactagtggcttgcggacggattttgatctggacatcatcagcctgaaagaggatggcctggagaaggttggggtgtggagtcctgccgacgggctcaacatcactgaggttgccaaaggccgaggccctaatgtcaccgactctctgacaaacagatcactcattgtcaccacagtgctggaggagcccttcgtcatgtttcggaaatcagacaggacgctatacgggaatgaccggttcgagggctactgcatcgacctgctaaaggagctggcccacatccttggtttctcctatgagatccggctggtggaggacggcaagtacggggcacaggatgacaagggccagtggaacggcatggtcaaggagctcatcgaccacaaggcagatctggccgtggcccccctgaccatcacccatgttcgagagaaggccatcgacttctccaagcccttcatgacacttggtgtgagcatcctgtatcgaaagcccaatggcaccaaccccagcgtcttctccttcctcaatcccctgtccccagacatctggatgtatgttctcctcgcctacctgggggtcagctgtgtcctcttcgtcatcgccaggttcagcccttatgagtggtacgatgctcacccctgcaaccctggctccgaggtggtggaaaataacttcactctgcttaacagcttctggtttggaatgggatccctgatgcagcaagggtctgagctgatgcccaaagccctgtccacacgcatcattggtggcatctggtggttcttcacgctcatcatcatctcttcctacacggccaacctggctgcctttctgaccgtggagcgcatggaatcacccattgactctgctgatgacctggccaagcaaaccaaaatcgagtatggggctgtcaaggatggggccaccatgaccttcttcaagaaatccaagatctccaccttcgagaagatgtgggccttcatgagcagcaagccatcggcgctggtgaagaacaacgaggagggcatccagagggccctgacggccgactacgcgctgctcatggagtccaccaccatcgagtacgtcacgcagaggaactgcaacctcacccagatcgggggcctcattgactccaagggctacggcatcggcacgcccatgggctccccataccgggacaagatcaccatcgccatcctgcagcttcaggaggaggacaagctgcatatcatgaaggagaagtggtggcggggcagcgggtgtcctgaggaggaaaacaaagaggccagtgccctggggatccagaagatcgggggcatcttcattgtcctggccgccgggctggtcctctctgtgctggtggccgtgggcgagtttgtgtacaagctccgcaaaacagcagagagagagcaggtaagccttagagcttggagcctgcacaggatgggaaatggagattcgcgctgatttcactcctgtatgtgccaggcacacagtggtgtctcatctcagcctcacaacagctcaccctgcatccagtcggccagcaagccctgccactctacctctgtcctgacctggcacttttttccatcgccgttgccccaccccaggccaagccccatcacctcctgcctggattatgccgcagccttcaaactggccctccagcctccatgcttccccaacaccatccacaattcacacagcaactggtaccttgtttaaaacttaattcaaaccatatcattttcctgcataaaaccctccagggtaattgtt

SEQ ID NO: 8978 - DNA, 558 bp, Homo sapiens
  source 1..558: mol_type = unassigned DNA
gcggccgcttcatgaacttcatcaaggaggctcaatgggaaggattaactggacgaattgttttcaacaaaactagtggcttgcggacggattttgatctggacatcatcagcctgaaagaggatggcctggagaaggttggggtgtggagtcctgccgacgggctcaacatcactgaggttgccaaaggccgaggccctaatgtcaccgactctctgacaaacagatcactcattgtcaccacagtgctgttcccaggcaaaagcctttcccacaagtcaccccagctgtggtgggtgctgtggccacacctcgagagcccagcaggtgctgggagcctgtacacatgccgcattctatagtggcccttccgagagccgtcagccactgccacaccccctgcctggaatcacaccccatcttctctctattccccaactgaatagcaccgccttctcctgacctgtttcaaaccaagaagcaactctgggggcctcccatgggctctctgcacctttgagctcatgcgggggcaggaggacagacccaggctgctga

SEQ ID NO: 8979 - DNA, 550 bp, Homo sapiens
  source 1..550: mol_type = unassigned DNA
caacaaaactagtggcttgcggacggattttgatctggacatcatcagcctgaaagaggatggcctggagaaggttggggtgtggagtcctgccgacgggctcaacatcactgaggttgccaaaggccgaggccctaatgtcaccgactctctgacaaacagatcactcattgtcaccacagtgctggtaagagcctgcagcccctgcaggaaggactgtccgacctgggggtggggtggccgttcgggctggagagtcccctctatcccccccacccagaagatggaggctgcaggtaggtggagacttttagagtcagcaggaagttctcagagagcagctggagcgcagcagcgctgctcgctgccacgggcggaagccgctgcgtttttgtgtctcactcccactcactccccaagtccttgatgtctgagtaggaaccatgctggatggtggaattaagggggtttgacagcccattgcaacctgagtgaggattcgcctctcccaccccagttcccaggcaaaagcctttcccacaagtcaccc

SEQ ID NO: 8980 - DNA, 14450 bp, Homo sapiens
  source 1..14450: mol_type = unassigned DNA
atcatgggaccgggtgagcgctgagaatcgcggccgcagccatcagccctggagatgaccaggagcggccactgctgagaactatgtggagagaggctgcgagccctgctgcagagcctccggctgggatagccgccccccgtgggggcgatgcggacagcgcgggacagccaggggagcgcgctggggccgcagcatgcgggaacccgctaaacccggtggctgctgaggcggccgagatgctcgtgcgcgcagcgcgccccactgcatcctcgaccttctcgggctacagggaccgtcagtggcgactatgggcagagtgggctattggaccctgctggtgctgccggcccttctggtctggcgcggtccggcgccgagcgcggcggcggagaagggtccccccgcgctaaatattgcggtgatgctgggtcacagccacgacgtgacagagcgcgaacttcgaacactgtggggccccgagcaggcggcggggctgcccctggacgtgaacgtggtagctctgctgatgaaccgcaccgaccccaagagcctcatcacgcacgtgtgcgacctcatgtccggggcacgcatccacggcctcgtgtttggggacgacacggaccaggaggccgtagcccagatgctggattttatctcctcccacaccttcgtccccatcttgggcattcatgggggcgcatctatgatcatggctgacaaggatccgacgtctaccttcttccagtttggagcgtccatccagcagcaagccacggtcatgctgaagatcatgcaggattatgactggcatgtcttctccctggtgaccactatcttccctggctacagggaattcatcagcttcgtcaagaccacagtggacaacagctttgtgggctgggacatgcagaatgtgatcacactggacacttcctttgaggatgcaaagacacaagtccagctgaagaagatccactcttctgtcatcttgctctactgttccaaagacgaggctgttctcattctgagtgaggcccgctcccttggcctcaccgggtatgatttcttctggattgtccccagcttggtctctgggaacacggagctcatcccaaaagagtttccatcgggactcatttctgtctcctacgatgactgggactacagcctggaggcgagagtgagggacggcattggcatcctaaccaccgctgcatcttctatgctggagaagttctcctacatccccgaggccaaggccagctgctacgggcagatggagaggccagaggtcccgatgcacaccttgcacccatttatggtcaatgttacatgggatggcaaagacttatccttcactgaggaaggctaccaggtgcaccccaggctggtggtgattgtgctgaacaaagaccgggaatgggaaaaggtgggcaagtgggagaaccatacgctgagcctgaggcacgccgtgtggcccaggtacaagtccttctccgactgtgagccggatgacaaccatctcagcatcgtcaccctggaggaggccccattcgtcatcgtggaagacatagaccccctgaccgagacgtgtgtgaggaacaccgtgccatgtcggaagttcgtcaaaatcaacaattcaaccaatgaggggatgaatgtgaagaaatgctgcaaggggttctgcattgatattctgaagaagctttccagaactgtgaagtttacttacgacctctatctggtgaccaatgggaagcatggcaagaaagttaacaatgtgtggaatggaatgatcggtgaagtggtctatcaacgggcagtcatggcagttggctcgctcaccatcaatgaggaacgttctgaagtggtggacttctctgtgccctttgtggaaacgggaatcagtgtcatggtttcaagaagtaatggcaccgtctcaccttctgcttttctagaaccattcagcgcctctgtctgggtgatgatgtttgtgatgctgctcattgtttctgccatagctgtttttgtctttgaatacttcagccctgttggatacaacagaaacttagccaaagggaaagcaccccatgggccttcttttacaattggaaaagctatatggcttctttggggcctggtgttcaataactccgtgcctgtccagaatcctaaagggaccaccagcaagatcatggtatctgtatgggccttcttcgctgtcatattcctggctagctacacagccaatctggctgccttcatgatccaagaggaatttgtggaccaagtgaccggcctcagtgacaaaaagtttcagagacctcatgactattccccaccttttcgatttgggacagtgcctaatggaagcacggagagaaacattcggaataactatccctacatgcatcagtacatgaccaaatttaatcagaaaggagtagaggacgccttggtcagcctgaaaacggggaagctggacgctttcatctacgatgccgcagtcttgaattacaaggctgggagggatgaaggctgcaagctggtgaccatcgggagtgggtacatctttgccaccaccggttatggaattgcccttcagaaaggctctccttggaagaggcagatcgacctggccttgcttcagtttgtgggtgatggtgagatggaggagctggagaccctgtggctcactgggatctgccacaacgagaagaacgaggtgatgagcagccagctggacattgacaacatggcgggcgtattctacatgctggctgccgccatggcccttagcctcatcaccttcatctgggagcacctcttctactggaagctgcgcttctgtttcacgggcgtgtgctccgaccggcctgggttgctcttctccatcagcaggggcatctacagctgcattcatggagtgcacattgaagaaaagaagaagtctccagacttcaatctgacgggatcccagagcaacatgttaaaactcctccggtcagccaaaaacatttccagcatgtccaacatgaactcctcaagaatggactcacccaaaagagctgctgacttcatccaaagaggttccctcatcatggacatggtttcagataaggggaatttgatgtactcagacaacaggtcctttcaggggaaagagagcatttttggagacaacatgaacgaactccaaacatttgtggccaaccggcagaaggataacctcaataactatgtattccagggacaacatcctcttactctcaatgagtccaaccctaacacggtggaggtggccgtgagcacagaatccaaagcgaactctagaccccggcagctgtggaagaaatccgtggattccatacgccaggattcactatcccagaatccagtctcccagagggatgaggcaacagcagagaataggacccactccctaaagagccctaggtatcttccagaagagatggcccactctgacatttcagaaacgtcaaatcgggccacgtgccacagggaacctgacaacagtaagaaccacaaaaccaaggacaactttaaaaggtcagtggcctccaaataccccaaggactgtagtgaggtcgagcgcacctacctgaaaaccaaatcaagctcccctagagacaagatctacactatagatggtgagaaggagcctggtttccacttagatccaccccagtttgttgaaaatgtgaccctgcccgagaacgtggacttcccggacccctaccaggatcccagtgaaaacttccgcaagggggactccacgctgccaatgaaccggaaccccttgcataatgaagaggggctttccaacaacgaccagtataaactctactccaagcacttcaccttgaaagacaagggttccccgcacagtgagaccagcgagcgataccggcagaactccacgcactgcagaagctgcctttccaacatgcccacctattcaggccacttcaccatgaggtcccccttcaagtgcgatgcctgcctgcggatggggaacctctatgacatcgatgaagaccagatgcttcaggagacaggtaacccagccaccggggagcaggtctaccagcaggactgggcacagaacaatgcccttcaattacaaaagaacaagctaaggattagccgtcagcattcctacgataacattgtcgacaaacctagggagctagaccttagcaggccctcccggagcataagcctcaaggacagggaacggcttctggagggaaatttttacggcagcctgtttagtgtcccctcaagcaaactctcggggaaaaaaagctcccttttcccccaaggtctggaggacagcaagaggagcaagtctctcttgccagaccacacctccgataaccctttcctccactcccacagggatgaccaacgcttggttattgggagatgcccctcggacccttacaaacactcgttgccatcccaggcggtgaatgacagctatcttcggtcgtccttgaggtcaacggcatcgtactgttccagggacagtcggggccacaatgatgtgtatatttcggagcatgttatgccttatgctgcaaataagaataatatgtactctacccccagggttttaaattcctgcagcaatagacgcgtgtacaagaaaatgcctagtatcgaatctgatgtttaaaaatcttccattaatgttttatctatagggaaatatacgtaatggccaatgttctggagggtaaatgttggatgtccaatagtgccctgctaagaggaagaagatgtagggaggtattttgttgttgttgttgttggctcttttgcacacggcttcatgccataatcttccactcaaggaatcttgtgaggtgtgtgctgagcatggcagacaccagataggtgagtccttaaccaaaaataactaactacataagggcaagtctccgggacatgcctactgggtatgttggcaataatgatgcattggatgccaatggtgatgttatgatttcctatattccaaattccattaaggtcagcccaccatgtaattttctcatcagaaatgcctaatggtttctctaatacagaataagcaatatggtgtgcatgtaaacctgacacagacaaaataaaaacagttaagaatgcatctgcactgtagtgcgattgacatgtgcaagagattaggaagtttggctcgtaacagtttcagctttcttgttatgccttccatcacagcccaggctcaccccaagaactccaggctcccctaaagaatagcaaatcagtgtgttcgtgatgactgtgctaccttcattatagttcatttccaagacacatctggagccaaaggcccgagggaccctcaggtggggagagctacaggaatctctttggatgttgatgtgtgtttctctcaccctcggcttcgatggtcttgttcagagctgcataaactaacacatttatgtctccgagatctaagtgtggatcttctgtctgtgacacagtggccattgtagtttatcccgaagacgcctatgtacgtaagtttgcatttcctcccttctggtgatgactcagggttgtatagtatctgttaccccttccctcccagagtaaccataactcgttccgtttccaaacagccatggtggtgtccaattagctgtgtatcgctcttcccagagttgttaatgtggtgacatgcaccaacagccgtatgtgtactgtgatctgtaagaagtacaatgccatctgtctgccgaaggctagcatggttttaggtttatcttccttcacatccagaaattctgttggacactcacttccaccccaaactcctcaaatcaaaagccttcaaaacacgaggcactcttggatctaccctgagtatcctccaaactgtggatacagtttagtgagacaagcaatttctcccttctgagttattctctctgttggtggcaaaccacttcatagcaccaacagagatgtaggaaaaattcctcaaagtatttgtcatttctgagtcgcctgcattatcccattcttattctcctcaaacctgtgcatatatgacatgaaatgatatccattttttttttaagttagagacagagaggggaatacttatgcatggggagcctgttagcacagtgcctgccacaaaaacaagtgcccccgacaagatagttgctatgttatgacactttctcagatcaggattttctagtttaaaaattaaatatcataaaaccagcaaataatattaactaaaccttttatatagttctactctgttaattagtgtatttcatgtacatgaatatttttgaagtatttgggataactagccatcagtgtttgcagaagacctcagtctgttttgggccattacggaaacactaagctaatgtagactcgcctggccatttcctggtttcctcctgcattctgctttacattcttgaagaaagggataaagtggcaggttgaaaaattatcccatttcttctcctcatggtgtgcgttctgttttgtaagtattattttcttgcatgtgggcaagtgtcagggatgattcccttaaagctcaaggatgcatggaatagctccatctttgggaaagtacacctgacctacagtgttcctataatgaaaagtggttgcaataaatttcagggtcaatcatagggagacagagggaggcagtgggtgagaggagcttcctttcatttttgaaaggcagaaggggctgactaggtgctggggatgcatgtgcttgaaaatgacattttatttcccggatgctgtacctctgctgccccaagacccagccatggagaagcctggatcgaagggcccagaatagtcaccccaacatctgatcctaaatctgaatctccatgactgtgtagccttttagccctttctaccttctgcccttccagtgcattccagaccttaatccaccccagcaaggatcgcctccatttcctcatgagtctgggatgttttgacatgaatgaattaaaaagtcttcccagaatacagaagagtgatttgtcgtcaagccaaagaggctttctgtcttcctctggtgtcctctaaacccagggggctgccaaatgccacagagacctccagggagagtgagagttatacttggactgacttcatcggtcagaaagccttcccctaacagcagcattatttctgctattaaccccatacatctctggataaagaaactgaaaacgtggcctttggaagaatcaacagtaatgttgtgaaaaaaatatatattcttttcactgaccgaagtgttttttcaaataaataatcagaaatgttatgctacacaaagtttatggtatcccttctctactaattcaatgactcttcaatgtgatgatcccaagcaaaaaaaaaaaaaaaaaaaaaaaatcaactactgatcagatggtcaatttctaaggaaaagatgtagagttattcaaaggtcatctaagtcagttcagtctttgcaaaaagaatatcaggaatgtaacgtccagtggtaaatggaacccacagtatgagaagtaacaagaattaaataggaagcctggaagcctgagactatagatctatcacagaagattcccgtaacatatcccagctctgagttcttagatttgttgatgtcaaggagcccaaatttctgaacacaaatgcctgagtttcagctggcttaagtcagagctggcatccataatgatattttgttaattctaattggttttccccacttgagaaggacccaactagtcctcagataggtacacttgaatgcaaacggttgggtctctgtccatgggtaatagcacgcacatgcaaccaatttaaaatactctgggtaagagagtcttctagagcataaactgtacttgagaaacctttgtgcttctggaaaatgggtttcatcatccttacatctgcaggttcttaggccacttatggtttcaatgctctgagctggcaagtccctataggtctatctttctgccagagagacttgcaggattataatctcacaatctcaccactcattactgttatgtcctctgcaaatctctctgcgttattttagccagcaccatgactgggcatccacggattactcttgattttctcttccctgattcacaggatgccagagagtctgagtatttagtttttctggtgaaagcattaaaattcacacattgcagcaaaatctgtcaaatcatttcacgcttattttctggggagaaaaatagaaaattacaccttgtttacaaatgaaatagtttcacttaaatgggactctagccaaggcagttaattagtcaaaagatccacagctgtcatatagtcacacattgtttattctatttgctatgtcgaccactgatgtgtatttaatattctgcatccttcacaggaaatgacaaatgccctgaattatttgcaaatagaattgctaatgaaaaagaaaaaaaatgttgatgttaattaaatggtgattaaaaatttatctcctttaaatctaaaaagtgcagctttaataatcagttgtcatataaataagtaccttgtactgaaatcccttgcggtttaagacctaaataaacactaatttgagaactctaaataccttacagaggagctggatatattcgttaacattatgcacattcctgtactgtttctttgtgcatagctgttgtgcatgaatccttgaaaaggggacatgcgttgtttctgaaatggagcctgtttgtattaaccatggctatagtagacatgattggactcaaagaaaaagaagtttgagtaggtggaagctaaatgtgttgcttgatatttaatgagtgaagggttctatgtaaaggcaattttccttccaaaagtactgtttattttcactggagacaaaattagacctttccagataccccatctctttttggtgaacagggttgaaagtgctgtggggtctatacttgaaaagttctcccaatatgcagttactgtttcccattcaatccctatacattgtactgtgttcatatctaattgtatcagatgaggtcagcttgccacttgatatagatcagagatgatcaaatgcacttatcctgtgaatacaactgcttgtgtacacatgtatataatatacatgcttgatttctacaattcacacgtaagtgtattatccaaataaaattgtacatattgtaaagtttatgttaaaaattaaatggtgatgatggtattaacacatggaaaacccattctggttatttttatgggaggatatttctgtagagagggcactatatttttttaatctcagttgtagggaggatgacagagcctaagtagaatatgggtgttggcgttcttggccccttctttaaaaaacaaaactctgggatgaggggtatagaatatattctgctcgcatttgcttctgaagacaatgccgatatggacttgtgtgtgatttccttaaacacatcaaagggcatagatttcctatttaaattccttatcctctttcctcacctgcactctttctgtgcccagcagtactttcagtatagtattagctagaagtgcctgcccagaagggtcttagaaaaatagagttcgtagaaccacaccaaaagttaggagaaggggaggagagatgagaaaaatgaagtttacaaatgggcagttgcctgtttaagatcatcaagttagagagtatcagagcgaggattagatccaagacatggttcaatttctggctcgattctctgaccgggctgacttatttctaggtttctttcaaggggaaactcctgagtagctctggaataagagccagagatccccataaggctgccctggtttttgttttgttttgttttttgtttttgccacttgccccagaaagacctacccatgcttctttgaatttggttttcctttaaactccctcacaatccctgtcttaaagttcctagaagagaaaacttttctcagagaccgtctccttaggaaaaatcaacagggatattgtttaaaacctcaaactgaagataaaaggctggcagtgaccattgaaataattgaggtctatgtatcatgcattgaggaagaaccaagcacattgaccagctaataggacttcactgaatgtccactttattttgaaagccagtttgggattgtgggggaggggatgcaaaataaatagaaaatatagtctcttcccataagtagcttatggtttagaagttcagttctctaatacaaaggataaccaaggacccatgcaatgcaaacagagactaaacagcaaaaattagaaatgacaactaaagttgtagccaggaaaaaaaaaataatctgattctatgagcataccttttttaaaaaaaaaaaaaaagtccttccctaaacctttaagtaactccggagaatagagttagtggtcccggaaatgcagttgatttattttaatcttcaaataatggacttaggagacccaggagctgctaaccaggtgaacacactcacactcctacatttttgcacaggaaggcttttgtctggttccaaccagttctccagtccttgccaaatcatgcctcctcccagccttgcattatgacatgtgcctcaagaaaaggttgaaaaaattccccaaaggattagaaaatagaccatgatgtaaaaagacgaagcatttccctaaagcttttttgtttggttttgtttttgacatttgaagaacccttctgatacaccagggtatgaatgtatcagggaagcatagagggaaaattctttatcaagttccaagtgcctactgctgtggctgacagaaagcatcaggttccctagagagaaaacggggcaaagagatggcaaaaggaatagaggtgtatttcaggaaggatggcgaggtggagagggagcttttgtcactctgtctatcccattctgtgcattcttggaatgttacattttctgcttatcgcaagtacttgccatggatctgcacctgaatttgaaaatatcaaaatatatctaaattgagtgtaggcgatattctaggcatatcctagaatgtgatcctcaaaacaaccttaagatataaatatgattgctcccattttacagataaggaaactgaggctcaggtttttctcaacctcgtcagcaactagaattagctagtaaatccctaacgttagacatattttcaaagtgcctggtctcctccagggaggtcagaatagaagtcagaaagagaggtgtgctcttttgaggttcctgggcatatacccttgagtatcagcctctgtgacagggaagtctgttagggtcttacccctcattgcctgatctgtgtgtatggagaacttctggggatctcacctctgttcatagttccttctgagacttgaacactgtttgtgtctccctttcatatgcttgcacttagcatttaaaaaaatttctggggagttattttctctacttagcatgtgcctaatcttaaatatctctttcctaatgtctcatctttttatcagtcaacatcagggctaattccattaaacatatatacatagtacatgctctcatgtgtgtgggtatgcacacacacacacacagccatgtgaccctccattaaagtcctcctaaatattgtgacccatgttcaaagaggtgatattatttgcaagttgactattcctcctatttcatgtctatgtttggttatctttgccaggcagatggaatgagtttcagaggtgggacagggaataggaaatagagtttctgcatgaatgatggagagctttggtagtcagaatgattgaggaccagctattaaaatgttgttgttgttttccttcttggtctgttcctttttttttttcttttccaaattgtcttagagataattcccggctcacttagcattaggataatgacggttattctgtcccactgaagagtgttgaactggaacgcttccaccgggctttataggtacccagaatggcctaatgtttaacatatcctgcaggcatgcccctgagcacacactgcctttcctgcattcccccctctccatggtctaagccacatttctttcctggcatttatatttactgagaggtgaggggtgcattaggcccatttgatggatgaggacactagcggggatttgaaggaatgtctttctgggagtctccatgaattctctggagagttagctaacttaatgcaagttaagtgctagtctatgagaaaaatttctcagctgttttcatctttcaagctggcagtaaaaagccttttaagacagaaagattattatttgttatttggagatcctgttgttgggtctacaagtgcgtgaccatgttctccttggaatgttgagctatgcagaaatggagcactccaaagaacgatttgaccaatagcatttcttctctgggggttgtatttcaaagcatgcaactctccagggaaccagaactaaattgcttaaaatgaagtcattcctcagattaacttcctcagataaagtgtcagcggtctgcagaaacgaagaagacaaaactgagattatcactcataattctcttacttactatgtcagtgaaacaatgagtttgcatttttgcaatcctagaacattcttcattagccctgggtcatgacctcttccagttaattctctttcacacctttaggaaagatttaagatgaaccttcaataggatattaacataactcatagccaataccacagctgcctttcaaattaatgaggttaattgttctccagcaaacatgagtttgtctttggcattttaaatgcttcccattgatctgacattttgctgtttcaagttttaaagggctcaaatcaaagactattgataactgagcaaagagcgaagatccagaaatacgaaaacattgtctttttttttccatgaaaaacaatcatagccttttgaattcaatcgaagtttctacattagccatctaagacttatttaattatttctgttctcagtcaagctaattcaagtgaatgaacagtattgacttttaaaatcttttttaaatttttttaaatctttagtttattaagtttgtagaaaagctctggggccatgaccacttacgtaaatgtttcagtttaaaaacaaaagattcaggcctctaatttgagccaaatccaggtgatcttgtttgaaatttttgatgaatttgaaaagatgaaagtggaacttttaacattcatgttccccaaatttttcactgggaagggatgctaattgcctacttaagatataagttcaagaataacattttcatagaaaattcagaaaactgcttgacacagcagtgacatagttagatgtggctcagatgccttccaaacctgagggtccccaaagatttctttaccagttgtttttaactatgaatcttaatcttgttcattcccctgccaaaacaaatttaaaagcataaacctgctgaattaattggcagaattcaccatagtttatatcaccccagaatgtttatgtgtatatgtttatgtatagtatatatatttcaagctgaatgttcagaaagaataaggtgagtttcttggtagcttgaataagaattagatcataaaaattataaataatggccttctcaaagaggataaatgattcatttttcactcacgtattaataatatgacttgttgcataatacacaagctggtcattgcctgcaagaaagttattgaattaagcagctatccaggtttatgtctgagtccatttttaacccaacaaggctaggattgaactccatatgcagagggtttctattcacagctacattcaaacagaatccaaaacccacatcagaactgacttgatgtcttgtatggtggagctgaaagcaagctgtctgctctaagcaatggtcttcatttgggaattaatgttcactgatcaactgcagcagtttatatctgtcatgttttaatccactgcatgaggaagtgctaataagtgtattaaatatttccaagcatagctacaaaattatatgtttgcttaacacctttctatgatagaggaagtatatactatggttgtcttcttgtagtatgtcttttaattttgttcaatgtgttatcaactgttttaaggaatggggattgaaattcgtgtgcaaactgatatgtatataactcctgaggcaacagaagtgcccggtcatatggtgtaaaaatgtaaatacaggaaaatttcatttttctaataaagataatttctgccaattgatatgaaaatgagaaa

SEQ ID NO: 8981 - DNA, 4165 bp, Homo sapiens
  source 1..4165: mol_type = unassigned DNA
atatatccaatatttctcctgttgagagtttaccagcctgtaattttcttaaggatccgacgtctaccttcttccagtttggagcgtccatccagcagcaagccacggtcatgctgaagatcatgcaggattatgactggcatgtcttctccctggtgaccactatcttccctggctacagggaattcatcagcttcgtcaagaccacagtggacaacagctttgtgggctgggacatgcagaatgtgatcacactggacacttcctttgaggatgcaaagacacaagtccagctgaagaagatccactcttctgtcatcttgctctactgttccaaagacgaggctgttctcattctgagtgaggcccgctcccttggcctcaccgggtatgatttcttctggattgtccccagcttggtctctgggaacacggagctcatcccaaaagagtttccatcgggactcatttctgtctcctacgatgactgggactacagcctggaggcgagagtgagggacggcattggcatcctaaccaccgctgcatcttctatgctggagaagttctcctacatccccgaggccaaggccagctgctacgggcagatggagaggccagaggtcccgatgcacaccttgcacccatttatggtcaatgttacatgggatggcaaagacttatccttcactgaggaaggctaccaggtgcaccccaggctggtggtgattgtgctgaacaaagaccgggaatgggaaaaggtgggcaagtgggagaaccatacgctgagcctgaggcacgccgtgtggcccaggtacaagtccttctccgactgtgagccggatgacaaccatctcagcatcgtcaccctggaggaggccccattcgtcatcgtggaagacatagaccccctgaccgagacgtgtgtgaggaacaccgtgccatgtcggaagttcgtcaaaatcaacaattcaaccaatgaggggatgaatgtgaagaaatgctgcaaggggttctgcattgatattctgaagaagctttccagaactgtgaagtttacttacgacctctatctggtgaccaatgggaagcatggcaagaaagttaacaatgtgtggaatggaatgatcggtgaagtggtctatcaacgggcagtcatggcagttggctcgctcaccatcaatgaggaacgttctgaagtggtggacttctctgtgccctttgtggaaacgggaatcagtgtcatggtttcaagaagtaatggcaccgtctcaccttctgcttttctagaaccattcagcgcctctgtctgggtgatgatgtttgtgatgctgctcattgtttctgccatagctgtttttgtctttgaatacttcagccctgttggatacaacagaaacttagccaaagggaaagcaccccatgggccttcttttacaattggaaaagctatatggcttctttggggcctggtgttcaataactccgtgcctgtccagaatcctaaagggaccaccagcaagatcatggtatctgtatgggccttcttcgctgtcatattcctggctagctacacagccaatctggctgccttcatgatccaagaggaatttgtggaccaagtgaccggcctcagtgacaaaaagtttcagagacctcatgactattccccaccttttcgatttgggacagtgcctaatggaagcacggagagaaacattcggaataactatccctacatgcatcagtacatgaccaaatttaatcagaaaggagtagaggacgccttggtcagcctgaaaacggggaagctggacgctttcatctacgatgccgcagtcttgaattacaaggctgggagggatgaaggctgcaagctggtgaccatcgggagtgggtacatctttgccaccaccggttatggaattgcccttcagaaaggctctccttggaagaggcagatcgacctggccttgcttcagtttgtgggtgatggtgagatggaggagctggagaccctgtggctcactgggatctgccacaacgagaagaacgaggtgatgagcagccagctggacattgacaacatggcgggcgtattctacatgctggctgccgccatggcccttagcctcatcaccttcatctgggagcacctcttctactggaagctgcgcttctgtttcacgggcgtgtgctccgaccggcctgggttgctcttctccatcagcaggggcatctacagctgcattcatggagtgcacattgaagaaaagaagaagtctccagacttcaatctgacgggatcccagagcaacatgttaaaactcctccggtcagccaaaaacatttccagcatgtccaacatgaactcctcaagaatggactcacccaaaagagctgctgacttcatccaaagaggttccctcatcatggacatggtttcagataaggggaatttgatgtactcagacaacaggtcctttcaggggaaagagagcatttttggagacaacatgaacgaactccaaacatttgtggccaaccggcagaaggataacctcaataactatgtattccagggacaacatcctcttactctcaatgagtccaaccctaacacggtggaggtggccgtgagcacagaatccaaagcgaactctagaccccggcagctgtggaagaaatccgtggattccatacgccaggattcactatcccagaatccagtctcccagagggatgaggcaacagcagagaataggacccactccctaaagagccctaggtatcttccagaagagatggcccactctgacatttcagaaacgtcaaatcgggccacgtgccacagggaacctgacaacagtaagaaccacaaaaccaaggacaactttaaaaggtcagtggcctccaaataccccaaggactgtagtgaggtcgagcgcacctacctgaaaaccaaatcaagctcccctagagacaagatctacactatagatggtgagaaggagcctggtttccacttagatccaccccagtttgttgaaaatgtgaccctgcccgagaacgtggacttcccggacccctaccaggatcccagtgaaaacttccgcaagggggactccacgctgccaatgaaccggaaccccttgcataatgaagaggggctttccaacaacgaccagtataaactctactccaagcacttcaccttgaaagacaagggttccccgcacagtgagaccagcgagcgataccggcagaactccacgcactgcagaagctgcctttccaacatgcccacctattcaggccacttcaccatgaggtcccccttcaagtgcgatgcctgcctgcggatggggaacctctatgacatcgatgaagaccagatgcttcaggagacagggatgaccaacgcttggttattgggagatgcccctcggacccttacaaacactcgttgccatcccaggcggtgaatgacagctatcttcggtcgtccttgaggtcaacggcatcgtactgttccagggacagtcggggccacaatgatgtgtatatttcggagcatgttatgccttatgctgcaaataagaataatatgtactctacccccagggttttaaattcctgcagcaatagacgcgtgtacaagaaaatgcctagtatcgaatctgatgtttaaaaatcttccattaatgttttatctatagggaaatatacgtaatggccaatgttctggagggtaaatgttggatgtccaatagtgccctgctaagaggaagaagatgtagggaggtattttgttgttgttgttgttggctcttttgcacacggcttcatgccataatcttccactcaaggaatcttgtgaggtgtgtgctgagcatggcagacaccagataggtgagtccttaaccaaaaataactaactacataagggcaagtctccgggacatgcctactgggtatgttggcaataatgatgcattggatgccaatggtgatgttatgatttcctatattccaaattccattaaggtcagcccaccatgtaattttctcatcagaaatgcctaatggtttctctaatacagaataagcaatatggtgtgcatgtaaacctgacacagacaaaataaaaacagttaagaatgca

SEQ ID NO: 8982 - DNA, 4692 bp, Homo sapiens
  source 1..4692: mol_type = unassigned DNA
agatgatgagctcatgcctttgtgactttgtttcttgagacctgcctgatttccatggtcacaagaacacagagaaagatgtgtgggctcccggggctctgcctgacactgttgagagcgattccagaggagaaggtatctgtggggtaatcttcggatgttattctgaaaagccccaacgtcttcctcataacagcttctaagcttgaggaccaagagttatcctctaaaaaggtgtccccaaacaaggatccgacgtctaccttcttccagtttggagcgtccatccagcagcaagccacggtcatgctgaagatcatgcaggattatgactggcatgtcttctccctggtgaccactatcttccctggctacagggaattcatcagcttcgtcaagaccacagtggacaacagctttgtgggctgggacatgcagaatgtgatcacactggacacttcctttgaggatgcaaagacacaagtccagctgaagaagatccactcttctgtcatcttgctctactgttccaaagacgaggctgttctcattctgagtgaggcccgctcccttggcctcaccgggtatgatttcttctggattgtccccagcttggtctctgggaacacggagctcatcccaaaagagtttccatcgggactcatttctgtctcctacgatgactgggactacagcctggaggcgagagtgagggacggcattggcatcctaaccaccgctgcatcttctatgctggagaagttctcctacatccccgaggccaaggccagctgctacgggcagatggagaggccagaggtcccgatgcacaccttgcacccatttatggtcaatgttacatgggatggcaaagacttatccttcactgaggaaggctaccaggtgcaccccaggctggtggtgattgtgctgaacaaagaccgggaatgggaaaaggtgggcaagtgggagaaccatacgctgagcctgaggcacgccgtgtggcccaggtacaagtccttctccgactgtgagccggatgacaaccatctcagcatcgtcaccctggaggaggccccattcgtcatcgtggaagacatagaccccctgaccgagacgtgtgtgaggaacaccgtgccatgtcggaagttcgtcaaaatcaacaattcaaccaatgaggggatgaatgtgaagaaatgctgcaaggggttctgcattgatattctgaagaagctttccagaactgtgaagtttacttacgacctctatctggtgaccaatgggaagcatggcaagaaagttaacaatgtgtggaatggaatgatcggtgaagtggtctatcaacgggcagtcatggcagttggctcgctcaccatcaatgaggaacgttctgaagtggtggacttctctgtgccctttgtggaaacgggaatcagtgtcatggtttcaagaagtaatggcaccgtctcaccttctgcttttctagaaccattcagcgcctctgtctgggtgatgatgtttgtgatgctgctcattgtttctgccatagctgtttttgtctttgaatacttcagccctgttggatacaacagaaacttagccaaagggaaagcaccccatgggccttcttttacaattggaaaagctatatggcttctttggggcctggtgttcaataactccgtgcctgtccagaatcctaaagggaccaccagcaagatcatggtatctgtatgggccttcttcgctgtcatattcctggctagctacacagccaatctggctgccttcatgatccaagaggaatttgtggaccaagtgaccggcctcagtgacaaaaagtttcagagacctcatgactattccccaccttttcgatttgggacagtgcctaatggaagcacggagagaaacattcggaataactatccctacatgcatcagtacatgaccaaatttaatcagaaaggagtagaggacgccttggtcagcctgaaaacggggaagctggacgctttcatctacgatgccgcagtcttgaattacaaggctgggagggatgaaggctgcaagctggtgaccatcgggagtgggtacatctttgccaccaccggttatggaattgcccttcagaaaggctctccttggaagaggcagatcgacctggccttgcttcagtttgtgggtgatggtgagatggaggagctggagaccctgtggctcactgggatctgccacaacgagaagaacgaggtgatgagcagccagctggacattgacaacatggcgggcgtattctacatgctggctgccgccatggcccttagcctcatcaccttcatctgggagcacctcttctactggaagctgcgcttctgtttcacgggcgtgtgctccgaccggcctgggttgctcttctccatcagcaggggcatctacagctgcattcatggagtgcacattgaagaaaagaagaagtctccagacttcaatctgacgggatcccagagcaacatgttaaaactcctccggtcagccaaaaacatttccagcatgtccaacatgaactcctcaagaatggactcacccaaaagagctgctgacttcatccaaagaggttccctcatcatggacatggtttcagataaggggaatttgatgtactcagacaacaggtcctttcaggggaaagagagcatttttggagacaacatgaacgaactccaaacatttgtggccaaccggcagaaggataacctcaataactatgtattccagggacaacatcctcttactctcaatgagtccaaccctaacacggtggaggtggccgtgagcacagaatccaaagcgaactctagaccccggcagctgtggaagaaatccgtggattccatacgccaggattcactatcccagaatccagtctcccagagggatgaggcaacagcagagaataggacccactccctaaagagccctaggtatcttccagaagagatggcccactctgacatttcagaaacgtcaaatcgggccacgtgccacagggaacctgacaacagtaagaaccacaaaaccaaggacaactttaaaaggtcagtggcctccaaataccccaaggactgtagtgaggtcgagcgcacctacctgaaaaccaaatcaagctcccctagagacaagatctacactatagatggtgagaaggagcctggtttccacttagatccaccccagtttgttgaaaatgtgaccctgcccgagaacgtggacttcccggacccctaccaggatcccagtgaaaacttccgcaagggggactccacgctgccaatgaaccggaaccccttgcataatgaagaggggctttccaacaacgaccagtataaactctactccaagcacttcaccttgaaagacaagggttccccgcacagtgagaccagcgagcgataccggcagaactccacgcactgcagaagctgcctttccaacatgcccacctattcaggccacttcaccatgaggtcccccttcaagtgcgatgcctgcctgcggatggggaacctctatgacatcgatgaagaccagatgcttcaggagacaggtaacccagccaccggggagcaggtctaccagcaggactgggcacagaacaatgcccttcaattacaaaagaacaagctaaggattagccgtcagcattcctacgataacattgtcgacaaacctagggagctagaccttagcaggccctcccggagcataagcctcaaggacagggaacggcttctggagggaaatttttacggcagcctgtttagtgtcccctcaagcaaactctcggggaaaaaaagctcccttttcccccaaggtctggaggacagcaagaggagcaagtctctcttgccagaccacacctccgataaccctttcctccactcccacagggatgaccaacgcttggttattgggagatgcccctcggacccttacaaacactcgttgccatcccaggcggtgaatgacagctatcttcggtcgtccttgaggtcaacggcatcgtactgttccagggacagtcggggccacaatgatgtgtatatttcggagcatgttatgccttatgctgcaaataagaataatatgtactctacccccagggttttaaattcctgcagcaatagacgcgtgtacaagaaaatgcctagtatcgaatctgatgtttaaaaatcttccattaatgttttatctatagggaaatatacgtaatggccaatgttctggagggtaaatgttggatgtccaatagtgccctgctaagaggaagaagatgtagggaggtattttgttgttgttgttgttggctcttttgcacacggcttcatgccataatcttccactcaaggaatcttgtgaggtgtgtgctgagcatggcagacaccagataggtgagtccttaaccaaaaataactaactacataagggcaagtctccgggacatgcctactgggtatgttggcaataatgatgcattggatgccaatggtgatgttatgatttcctatattccaaattccattaaggtcagcccaccatgtaattttctcatcagaaatgcctaatggtttctctaatacagaataagcaatatggtgtgcatgtaaacctgacacagacaaaataaaaaca

SEQ ID NO: 8983 - DNA, 4338 bp, Homo sapiens
  source 1..4338: mol_type = unassigned DNA
tcgggctacagggaccgtcagtggcgactatgggcagagtgggctattggaccctgctggtgctgccggcccttctggtctggcgcggtccggcgccgagcgcggcggcggagaagggtccccccgcgctaaatattgcggtgatgctgggtcacagccacgacgtgacagagcgcgaacttcgaacactgtggggccccgagcaggcggcggggctgcccctggacgtgaacgtggtagctctgctgatgaaccgcaccgaccccaagagcctcatcacgcacgtgtgcgacctcatgtccggggcacgcatccacggcctcgtgtttggggacgacacggaccaggaggccgtagcccagatgctggattttatctcctcccacaccttcgtccccatcttgggcattcatgggggcgcatctatgatcatggctgacaaggatccgacgtctaccttcttccagtttggagcgtccatccagcagcaagccacggtcatgctgaagatcatgcaggattatgactggcatgtcttctccctggtgaccactatcttccctggctacagggaattcatcagcttcgtcaagaccacagtggacaacagctttgtgggctgggacatgcagaatgtgatcacactggacacttcctttgaggatgcaaagacacaagtccagctgaagaagatccactcttctgtcatcttgctctactgttccaaagacgaggctgttctcattctgagtgaggcccgctcccttggcctcaccgggtatgatttcttctggattgtccccagcttggtctctgggaacacggagctcatcccaaaagagtttccatcgggactcatttctgtctcctacgatgactgggactacagcctggaggcgagagtgagggacggcattggcatcctaaccaccgctgcatcttctatgctggagaagttctcctacatccccgaggccaaggccagctgctacgggcagatggagaggccagaggtcccgatgcacaccttgcacccatttatggtcaatgttacatgggatggcaaagacttatccttcactgaggaaggctaccaggtgcaccccaggctggtggtgattgtgctgaacaaagaccgggaatgggaaaaggtgggcaagtgggagaaccatacgctgagcctgaggcacgccgtgtggcccaggtacaagtccttctccgactgtgagccggatgacaaccatctcagcatcgtcaccctggaggaggccccattcgtcatcgtggaagacatagaccccctgaccgagacgtgtgtgaggaacaccgtgccatgtcggaagttcgtcaaaatcaacaattcaaccaatgaggggatgaatgtgaagaaatgctgcaaggggttctgcattgatattctgaagaagctttccagaactgtgaagtttacttacgacctctatctggtgaccaatgggaagcatggcaagaaagttaacaatgtgtggaatggaatgatcggtgaagtggtctatcaacgggcagtcatggcagttggctcgctcaccatcaatgaggaacgttctgaagtggtggacttctctgtgccctttgtggaaacgggaatcagtgtcatggtttcaagaagtaatggcaccgtctcaccttctgcttttctagaaccattcagcgcctctgtctgggtgatgatgtttgtgatgctgctcattgtttctgccatagctgtttttgtctttgaatacttcagccctgttggatacaacagaaacttagccaaagggaaagcaccccatgggccttcttttacaattggaaaagctatatggcttctttggggcctggtgttcaataactccgtgcctgtccagaatcctaaagggaccaccagcaagatcatggtatctgtatgggccttcttcgctgtcatattcctggctagctacacagccaatctggctgccttcatgatccaagaggaatttgtggaccaagtgaccggcctcagtgacaaaaagtttcagagacctcatgactattccccaccttttcgatttgggacagtgcctaatggaagcacggagagaaacattcggaataactatccctacatgcatcagtacatgaccaaatttaatcagaaaggagtagaggacgccttggtcagcctgaaaacggggaagctggacgctttcatctacgatgccgcagtcttgaattacaaggctgggagggatgaaggctgcaagctggtgaccatcgggagtgggtacatctttgccaccaccggttatggaattgcccttcagaaaggctctccttggaagaggcagatcgacctggccttgcttcagtttgtgggtgatggtgagatggaggagctggagaccctgtggctcactgggatctgccacaacgagaagaacgaggtgatgagcagccagctggacattgacaacatggcgggcgtattctacatgctggctgccgccatggcccttagcctcatcaccttcatctgggagcacctcttctactggaagctgcgcttctgtttcacgggcgtgtgctccgaccggcctgggttgctcttctccatcagcaggggcatctacagctgcattcatggagtgcacattgaagaaaagaagaagtctccagacttcaatctgacgggatcccagagcaacatgttaaaactcctccggtcagccaaaaacatttccagcatgtccaacatgaactcctcaagaatggactcacccaaaagagctgctgacttcatccaaagaggttccctcatcatggacatggtttcagataaggggaatttgatgtactcagacaacaggtcctttcaggggaaagagagcatttttggagacaacatgaacgaactccaaacatttgtggccaaccggcagaaggataacctcaataactatgtattccagggacaacatcctcttactctcaatgagtccaaccctaacacggtggaggtggccgtgagcacagaatccaaagcgaactctagaccccggcagctgtggaagaaatccgtggattccatacgccaggattcactatcccagaatccagtctcccagagggatgaggcaacagcagagaataggacccactccctaaagagccctaggtatcttccagaagagatggcccactctgacatttcagaaacgtcaaatcgggccacgtgccacagggaacctgacaacagtaagaaccacaaaaccaaggacaactttaaaaggtcagtggcctccaaataccccaaggactgtagtgaggtcgagcgcacctacctgaaaaccaaatcaagctcccctagagacaagatctacactatagatggtgagaaggagcctggtttccacttagatccaccccagtttgttgaaaatgtgaccctgcccgagaacgtggacttcccggacccctaccaggatcccagtgaaaacttccgcaagggggactccacgctgccaatgaaccggaaccccttgcataatgaagaggggctttccaacaacgaccagtataaactctactccaagcacttcaccttgaaagacaagggttccccgcacagtgagaccagcgagcgataccggcagaactccacgcactgcagaagctgcctttccaacatgcccacctattcaggccacttcaccatgaggtcccccttcaagtgcgatgcctgcctgcggatggggaacctctatgacatcgatgaagaccagatgcttcaggagacagggatgaccaacgcttggttattgggagatgcccctcggacccttacaaacactcgttgccatcccaggcggtgaatgacagctatcttcggtcgtccttgaggtcaacggcatcgtactgttccagggacagtcggggccacaatgatgtgtatatttcggagcatgttatgccttatgctgcaaataagaataatatgtactctacccccagggttttaaattcctgcagcaatagacgcgtgtacaagaaaatgcctagtatcgaatctgatgtttaaaaatcttccattaatgttttatctatagggaaatatacgtaatggccaatgttctggagggtaaatgttggatgtccaatagtgccctgctaagaggaagaagatgtagggaggtattttgttgttgttgttgttggctcttttgcacacggcttcatgccataatcttccactcaaggaatcttgtgaggtgtgtgctgagcatggcagacaccagataggtgagtccttaaccaaaaataactaactacataagg

SEQ ID NO: 8984 - DNA, 5031 bp, Homo sapiens
  source 1..5031: mol_type = unassigned DNA
cgctcagcagctcccggtcgcacaactcccagcagccggcgctggggaggtggtagggggtgcgggtggaggtgcccagttagcttctcgtgggtggccaacctggggctcccattctcctgtgcaccctggagtggagctcccgctatcagccacaggggctgaggatccgcactgggggcgtcgtgggcatcgggcttcagcttcccccctcttgtctagcccccctgggcgcataggggggcttgtgagcactgcagactgcagccttcccctcaaccctccctcccctcgttggtgggctgaccctgcctctccttctctcctccgccccgttagagccctgctgcagagcctccggctgggatagccgccccccgtgggggcgatgcggacagcgcgggacagccaggggagcgcgctggggccgcagcatgcgggaacccgctaaacccggtggctgctgaggcggccgagatgctcgtgcgcgcagcgcgccccactgcatcctcgaccttctcgggctacagggaccgtcagtggcgactatgggcagagtgggctattggaccctgctggtgctgccggcccttctggtctggcgcggtccggcgccgagcgcggcggcggagaagggtccccccgcgctaaatattgcggtgatgctgggtcacagccacgacgtgacagagcgcgaacttcgaacactgtggggccccgagcaggcggcggggctgcccctggacgtgaacgtggtagctctgctgatgaaccgcaccgaccccaagagcctcatcacgcacgtgtgcgacctcatgtccggggcacgcatccacggcctcgtgtttggggacgacacggaccaggaggccgtagcccagatgctggattttatctcctcccacaccttcgtccccatcttgggcattcatgggggcgcatctatgatcatggctgacaaggatccgacgtctaccttcttccagtttggagcgtccatccagcagcaagccacggtcatgctgaagatcatgcaggattatgactggcatgtcttctccctggtgaccactatcttccctggctacagggaattcatcagcttcgtcaagaccacagtggacaacagctttgtgggctgggacatgcagaatgtgatcacactggacacttcctttgaggatgcaaagacacaagtccagctgaagaagatccactcttctgtcatcttgctctactgttccaaagacgaggctgttctcattctgagtgaggcccgctcccttggcctcaccgggtatgatttcttctggattgtccccagcttggtctctgggaacacggagctcatcccaaaagagtttccatcgggactcatttctgtctcctacgatgactgggactacagcctggaggcgagagtgagggacggcattggcatcctaaccaccgctgcatcttctatgctggagaagttctcctacatccccgaggccaaggccagctgctacgggcagatggagaggccagaggtcccgatgcacaccttgcacccatttatggtcaatgttacatgggatggcaaagacttatccttcactgaggaaggctaccaggtgcaccccaggctggtggtgattgtgctgaacaaagaccgggaatgggaaaaggtgggcaagtgggagaaccatacgctgagcctgaggcacgccgtgtggcccaggtacaagtccttctccgactgtgagccggatgacaaccatctcagcatcgtcaccctggaggaggccccattcgtcatcgtggaagacatagaccccctgaccgagacgtgtgtgaggaacaccgtgccatgtcggaagttcgtcaaaatcaacaattcaaccaatgaggggatgaatgtgaagaaatgctgcaaggggttctgcattgatattctgaagaagctttccagaactgtgaagtttacttacgacctctatctggtgaccaatgggaagcatggcaagaaagttaacaatgtgtggaatggaatgatcggtgaagtggtctatcaacgggcagtcatggcagttggctcgctcaccatcaatgaggaacgttctgaagtggtggacttctctgtgccctttgtggaaacgggaatcagtgtcatggtttcaagaagtaatggcaccgtctcaccttctgcttttctagaaccattcagcgcctctgtctgggtgatgatgtttgtgatgctgctcattgtttctgccatagctgtttttgtctttgaatacttcagccctgttggatacaacagaaacttagccaaagggaaagcaccccatgggccttcttttacaattggaaaagctatatggcttctttggggcctggtgttcaataactccgtgcctgtccagaatcctaaagggaccaccagcaagatcatggtatctgtatgggccttcttcgctgtcatattcctggctagctacacagccaatctggctgccttcatgatccaagaggaatttgtggaccaagtgaccggcctcagtgacaaaaagtttcagagacctcatgactattccccaccttttcgatttgggacagtgcctaatggaagcacggagagaaacattcggaataactatccctacatgcatcagtacatgaccaaatttaatcagaaaggagtagaggacgccttggtcagcctgaaaacggggaagctggacgctttcatctacgatgccgcagtcttgaattacaaggctgggagggatgaaggctgcaagctggtgaccatcgggagtgggtacatctttgccaccaccggttatggaattgcccttcagaaaggctctccttggaagaggcagatcgacctggccttgcttcagtttgtgggtgatggtgagatggaggagctggagaccctgtggctcactgggatctgccacaacgagaagaacgaggtgatgagcagccagctggacattgacaacatggcgggcgtattctacatgctggctgccgccatggcccttagcctcatcaccttcatctgggagcacctcttctactggaagctgcgcttctgtttcacgggcgtgtgctccgaccggcctgggttgctcttctccatcagcaggggcatctacagctgcattcatggagtgcacattgaagaaaagaagaagtctccagacttcaatctgacgggatcccagagcaacatgttaaaactcctccggtcagccaaaaacatttccagcatgtccaacatgaactcctcaagaatggactcacccaaaagagctgctgacttcatccaaagaggttccctcatcatggacatggtttcagataaggggaatttgatgtactcagacaacaggtcctttcaggggaaagagagcatttttggagacaacatgaacgaactccaaacatttgtggccaaccggcagaaggataacctcaataactatgtattccagggacaacatcctcttactctcaatgagtccaaccctaacacggtggaggtggccgtgagcacagaatccaaagcgaactctagaccccggcagctgtggaagaaatccgtggattccatacgccaggattcactatcccagaatccagtctcccagagggatgaggcaacagcagagaataggacccactccctaaagagccctaggtatcttccagaagagatggcccactctgacatttcagaaacgtcaaatcgggccacgtgccacagggaacctgacaacagtaagaaccacaaaaccaaggacaactttaaaaggtcagtggcctccaaataccccaaggactgtagtgaggtcgagcgcacctacctgaaaaccaaatcaagctcccctagagacaagatctacactatagatggtgagaaggagcctggtttccacttagatccaccccagtttgttgaaaatgtgaccctgcccgagaacgtggacttcccggacccctaccaggatcccagtgaaaacttccgcaagggggactccacgctgccaatgaaccggaaccccttgcataatgaagaggggctttccaacaacgaccagtataaactctactccaagcacttcaccttgaaagacaagggttccccgcacagtgagaccagcgagcgataccggcagaactccacgcactgcagaagctgcctttccaacatgcccacctattcaggccacttcaccatgaggtcccccttcaagtgcgatgcctgcctgcggatggggaacctctatgacatcgatgaagaccagatgcttcaggagacaggtaacccagccaccggggagcaggtctaccagcaggactgggcacagaacaatgcccttcaattacaaaagaacaagctaaggattagccgtcagcattcctacgataacattgtcgacaaacctagggagctagaccttagcaggccctcccggagcataagcctcaaggacagggaacggcttctggagggaaatttttacggcagcctgtttagtgtcccctcaagcaaactctcggggaaaaaaagctcccttttcccccaaggtctggaggacagcaagaggagcaagtctctcttgccagaccacacctccgataaccctttcctccactcccacagggatgaccaacgcttggttattgggagatgcccctcggacccttacaaacactcgttgccatcccaggcggtgaatgacagctatcttcggtcgtccttgaggtcaacggcatcgtactgttccagggacagtcggggccacaatgatgtgtatatttcggagcatgttatgccttatgctgcaaataagaataatatgtactctacccccagggttttaaattcctgcagcaatagacgcgtgtacaagaaaatgcctagtatcgaatctgatgtttaaaaatcttccattaatgttttatctatagggaaatatacgtaatggccaatgttctggagggtaaatgttggatgtccaatagtgccct

SEQ ID NO: 8985 - DNA, 488 bp, Homo sapiens
  source 1..488: mol_type = unassigned DNA
tggaaacccagcaaactcagaaacttgtcttaaggttacatagctgtgagttgcacatcgtctgttccaaacccagaagcgtctgccccaaagtgcatgttctggtcctcactgcctgtgaatgttgtgatctgtccaggtgagatggaggagctggagaccctgtggctcactgggatctgccacaacgagaagaacgaggtgatgagcagccagctggacattgacaacatggcgggcgtattctacatgctggctgccgccatggcccttagcctcatcaccttcatctgggagcacctcttctactggaagctgcgcttctgtttcacgggcgtgtgctccgaccggcctgggttgctcttctccatcagcaggggcatctacagctgcattcatggagtgcacattgaagaaaagaagaagtctccagacttcaatctgacgggatcccagagcaacatgttaaaactcctccggtcagccaa

SEQ ID NO: 8986 - DNA, 430 bp, Homo sapiens
  source 1..430: mol_type = unassigned DNA
gggctctctgctgggtgccaggaacgcagcactgaccacgacaaagcccctgccttagagagatgacgtttctgtataaggacagagacggcaaatggacaagcaagtgaatgaatgtggcaggaagcagtgtggctgggaagaaatacttaaaagcagggcgagagactagagcatattggctgccatttaggcaggaaaaacctcttgtgctgacatttgaagtgaagggacacccatatttatggtcaatgttacatgggatggcaaagacttatccttcactgaggaaggctaccaggtgcaccccaggctggtggtgattgtgctgaacaaagaccgggaatgggaaaaggtgggcaagtgggagaaccatacgctgagcctgaggcacgccgtgtggcccaggtacaagtccttctccgactgt

SEQ ID NO: 8987 - DNA, 1142 bp, Homo sapiens
  source 1..1142: mol_type = unassigned DNA
aggccagcccatgctgaaagctcaccaactccagcactcaccagcgaggactcctcatgtctcactgggttccccttccatcatcagaagccaaggatgtttccaaaatattccatcgatgtccagagcagcactggaagagcagtgagcatggggagagaagtgcttttgcttcagaaccaaagtgggtgtatgaaatctgttcctctcccccagctgcacattctaaggaagccgagtgccagaggtggtcagaggctgatatgtagaatccgaaaaatacaggctgagccatggcaggaggaggatccgacgtctaccttcttccagtttggagcgtccatccagcagcaagccacggtcatgctgaagatcatgcaggattatgactggcatgtcttctccctggtgaccactatcttccctggctacagggaattcatcagcttcgtcaagaccacagtggacaacagctttgtgggctgggacatgcagaatgtgatcacactggacacttcctttgaggatgcaaagacacaagtccagctgaagaagatccactcttctgtcatcttgctctactgttccaaagacgaggctgttctcattctgagtgaggcccgctcccttggcctcaccgggtatgatttcttctggattgtccccagcttggtctctgggaacacggagctcatcccaaaagagtttccatcgggactcatttctgtctcctacgatgactgggactacagcctggaggcgagagtgagggacggcattggcatcctaaccaccgctgcatcttctatgctggagaagttctcctacatccccgaggccaaggccagctgctacgggcagatggagaggccagaggtcccgatgcacaccttgcacccgtaagaaagggcttgttgtctcccaaagtgggatcagagttttgctgttgtcattgtttgcttgcttacatactcattgttggaaatacgcactgaaaatgcagaatgttatgtgtttacttacgggacttttattttgctctcctctctctttctttcatctcctttgtaagaaaagtcacattagactttgtttcctgcaacttaacttttttttctactcaacaatatatcttggaaacc

SEQ ID NO: 8988 - DNA, 833 bp, Homo sapiens
  source 1..833: mol_type = unassigned DNA
gacaaggatccgacgtctaccttcttccagtttggagcgtccatccagcagcaagccacggtcatgctgaagatcatgcaggattatgactggcatgtcttctccctggtgaccactatcttccctggctacagggaattcatcagcttcgtcaagaccacagtggacaacagctttgtgggctgggacatgcagaatgtgatcacactggacacttcctttgaggatgcaaagacacaagtccagctgaagaagatccactcttctgtcatcttgctctactgttccaaagacgaggctgttctcattctgagtgaggcccgctcccttggcctcaccgggtatgatttcttctggattgtccccagcttggtctctgggaacacggagctcatcccaaaagagtttccatcgggactcatttctgtctcctacgatgactgggactacagcctggaggcgagagtgagggacggcattggcatcctaaccaccgctgcatcttctatgctggagaagttctcctacatccccgaggccaaggccagctgctacgggcagatggagaggccagaggtcccgatgcacaccttgcacccgtaagaaagggcttgttgtctcccaaagtgggatcagagttttgctgttgtcattgtttgcttgcttacatactcattgttggaaatacgcactgaaaatgcagaatgttatgtgtttacttacgggacttttattttgctctcctctctctttctttcatctcctttgtaagaaaagtcacattagactttgtttcctgcaacttaacttttttttctactcaacaatatatc

SEQ ID NO: 8989 - DNA, 655 bp, Homo sapiens
  source 1..655: mol_type = unassigned DNA
gtgcaccactgtctacgggctctctgctgggtgccaggaacgcagcactgaccacgacaaagcccctgccttagagagatgacgtttctgtataaggacagagacggcaaatggacaagcaagtgaatgaatgtggcaggaagcagtgtggctgggaagaaatacttaaaagcagggcgagagactagagcatattggctgccatttaggcaggaaaaacctcttgtgctgacatttgaagtgaagggacacccatgatccgacgtctaccttcttccagtttggagcgtccatccagcagcaagccacggtcatgctgaagatcatgcaggattatgactggcatgtcttctccctggtgaccactatcttccctggctacagggaattcatcagcttcgtcaagaccacagtggacaacagctttgtgggctgggacatgcagaatgtgatcacactggacacttcctttgaggatgcaaagacacaagtccagctgaagaagatccactcttctgtcatcttgctctactgttccaaagacgaggctgttctcattctgagtgaggcccgctcccttggcctcaccgggtatgatttcttctggattgtccccagcttggtctctgggaacacggagctcatcccaaaagag

SEQ ID NO: 8990 - DNA, 166 bp, Homo sapiens
  source 1..166: mol_type = unassigned DNA
gccgtagcccagatgctggattttatctcctcccacaccttcgtccccatcttgggcattcatgggggcgcatctatgatcatggctgacaaggacttgctgagagctttatcctggcaaacggaagctaaatgtggccagcatgaaagtgatcgcaggagaagac

SEQ ID NO: 8991 - DNA, 1322 bp, Homo sapiens
  source 1..1322: mol_type = unassigned DNA
atcagccacaggggctgaggatccgcactgggggcgtcgtgggcatcgggcttcagcttcccccctcttgtctagcccccctgggcgcataggggggcttgtgagcactgcagactgcagccttcccctcaaccctccctcccctcgttggtgggctgaccctgcctctccttctctcctccgccccgttagagccctgctgcagagcctccggctgggatagccgccccccgtgggggcgatgcggacagcgcgggacagccaggggagcgcgctggggccgcagcatgcgggaacccgctaaacccggtggctgctgaggcggccgagatgctcgtgcgcgcagcgcgccccactgcatcctcgaccttctcgggctacagggaccgtcagtggcgactatgggcagagtgggctattggaccctgctggtgctgccggcccttctggtctggcgcggtccggcgccgagcgcggcggcggagaagggtccccccgcgctaaatattgcggtgatgctgggtcacagccacgacgtgacagagcgcgaacttcgaacactgtggggccccgagcaggcggcggggctgcccctggacgtgaacgtggtagctctgctgatgaaccgcaccgaccccaagagcctcatcacgcacgtgtgcgacctcatgtccggggcacgcatccacggcctcgtgtttggggacgacacggaccaggaggccgtagcccagatgctggattttatctcctcccacaccttcgtccccatcttgggcattcatgggggcgcatctatgatcatggctgacaaggtaaggccggaaactgatgccctgccaggacctgggaagccaccagctgcatggcagctgctgcaggtcttcggacgcccctagaatctgtcttgatgtgaagtgggggtgggggtgggagggtcgtggccactggccctggtgagaaccaggtcttgcctctccaacccagaaatgaatggaaatgccttttgccttgtttctgaaaatggtgtacacaggagcactttggtgtgtgtgtgccaggaagcgctcagaaaactgagaagtaggctgtggggtggtggtggtggcggtggtggcatgtttggagatttacgagtaccatggggcacagaggtgggcccaggagcactggagacatatgcttcctattttcacaatgccagttttacctgattgttttgtgggaaaatgtccattttttcctcttatggtaagtgactaaaactatttctaaaaattattaaatgtgggtaggttctggaagaaaatgcaaagttttta

SEQ ID NO: 8992 - DNA, 100 bp, Homo sapiens
  source 1..100: mol_type = unassigned DNA
acagaacacgcgcggcgcttaggggaccgtcagtggcgactatgggcagagtgggctattggaccctgctggtgctgccggcccttctggtctggcgcgg

SEQ ID NO: 8993 - DNA, 100 bp, Homo sapiens
  source 1..100: mol_type = unassigned DNA; mol_type = unassigned DNA
ccgagaggcgcgcgtcagggcacgcgtgcacgaccgtgctggtatttgcagggaccgtcagtggcgactatgggcagagtgggctattggaccctgctgg

SEQ ID NO: 8994 - DNA, 4118 bp, Homo sapiens
  source 1..4118: mol_type = unassigned DNA; mol_type = unassigned DNA
ctggcaggatccgacgtctaccttcttccagtttggagcgtccatccagcagcaagccacggtcatgctgaagatcatgcaggattatgactggcatgtcttctccctggtgaccactatcttccctggctacagggaattcatcagcttcgtcaagaccacagtggacaacagctttgtgggctgggacatgcagaatgtgatcacactggacacttcctttgaggatgcaaagacacaagtccagctgaagaagatccactcttctgtcatcttgctctactgttccaaagacgaggctgttctcattctgagtgaggcccgctcccttggcctcaccgggtatgatttcttctggattgtccccagcttggtctctgggaacacggagctcatcccaaaagagtttccatcgggactcatttctgtctcctacgatgactgggactacagcctggaggcgagagtgagggacggcattggcatcctaaccaccgctgcatcttctatgctggagaagttctcctacatccccgaggccaaggccagctgctacgggcagatggagaggccagaggtcccgatgcacaccttgcacccatttatggtcaatgttacatgggatggcaaagacttatccttcactgaggaaggctaccaggtgcaccccaggctggtggtgattgtgctgaacaaagaccgggaatgggaaaaggtgggcaagtgggagaaccatacgctgagcctgaggcacgccgtgtggcccaggtacaagtccttctccgactgtgagccggatgacaaccatctcagcatcgtcaccctggaggaggccccattcgtcatcgtggaagacatagaccccctgaccgagacgtgtgtgaggaacaccgtgccatgtcggaagttcgtcaaaatcaacaattcaaccaatgaggggatgaatgtgaagaaatgctgcaaggggttctgcattgatattctgaagaagctttccagaactgtgaagtttacttacgacctctatctggtgaccaatgggaagcatggcaagaaagttaacaatgtgtggaatggaatgatcggtgaagtggtctatcaacgggcagtcatggcagttggctcgctcaccatcaatgaggaacgttctgaagtggtggacttctctgtgccctttgtggaaacgggaatcagtgtcatggtttcaagaagtaatggcaccgtctcaccttctgcttttctagaaccattcagcgcctctgtctgggtgatgatgtttgtgatgctgctcattgtttctgccatagctgtttttgtctttgaatacttcagccctgttggatacaacagaaacttagccaaagggaaagcaccccatgggccttcttttacaattggaaaagctatatggcttctttggggcctggtgttcaataactccgtgcctgtccagaatcctaaagggaccaccagcaagatcatggtatctgtatgggccttcttcgctgtcatattcctggctagctacacagccaatctggctgccttcatgatccaagaggaatttgtggaccaagtgaccggcctcagtgacaaaaagtttcagagacctcatgactattccccaccttttcgatttgggacagtgcctaatggaagcacggagagaaacattcggaataactatccctacatgcatcagtacatgaccaaatttaatcagaaaggagtagaggacgccttggtcagcctgaaaacggggaagctggacgctttcatctacgatgccgcagtcttgaattacaaggctgggagggatgaaggctgcaagctggtgaccatcgggagtgggtacatctttgccaccaccggttatggaattgcccttcagaaaggctctccttggaagaggcagatcgacctggccttgcttcagtttgtgggtgatggtgagatggaggagctggagaccctgtggctcactgggatctgccacaacgagaagaacgaggtgatgagcagccagctggacattgacaacatggcgggcgtattctacatgctggctgccgccatggcccttagcctcatcaccttcatctgggagcacctcttctactggaagctgcgcttctgtttcacgggcgtgtgctccgaccggcctgggttgctcttctccatcagcaggggcatctacagctgcattcatggagtgcacattgaagaaaagaagaagtctccagacttcaatctgacgggatcccagagcaacatgttaaaactcctccggtcagccaaaaacatttccagcatgtccaacatgaactcctcaagaatggactcacccaaaagagctgctgacttcatccaaagaggttccctcatcatggacatggtttcagataaggggaatttgatgtactcagacaacaggtcctttcaggggaaagagagcatttttggagacaacatgaacgaactccaaacatttgtggccaaccggcagaaggataacctcaataactatgtattccagggacaacatcctcttactctcaatgagtccaaccctaacacggtggaggtggccgtgagcacagaatccaaagcgaactctagaccccggcagctgtggaagaaatccgtggattccatacgccaggattcactatcccagaatccagtctcccagagggatgaggcaacagcagagaataggacccactccctaaagagccctaggtatcttccagaagagatggcccactctgacatttcagaaacgtcaaatcgggccacgtgccacagggaacctgacaacagtaagaaccacaaaaccaaggacaactttaaaaggtcagtggcctccaaataccccaaggactgtagtgaggtcgagcgcacctacctgaaaaccaaatcaagctcccctagagacaagatctacactatagatggtgagaaggagcctggtttccacttagatccaccccagtttgttgaaaatgtgaccctgcccgagaacgtggacttcccggacccctaccaggatcccagtgaaaacttccgcaagggggactccacgctgccaatgaaccggaaccccttgcataatgaagaggggctttccaacaacgaccagtataaactctactccaagcacttcaccttgaaagacaagggttccccgcacagtgagaccagcgagcgataccggcagaactccacgcactgcagaagctgcctttccaacatgcccacctattcaggccacttcaccatgaggtcccccttcaagtgcgatgcctgcctgcggatggggaacctctatgacatcgatgaagaccagatgcttcaggagacagggatgaccaacgcttggttattgggagatgcccctcggacccttacaaacactcgttgccatcccaggcggtgaatgacagctatcttcggtcgtccttgaggtcaacggcatcgtactgttccagggacagtcggggccacaatgatgtgtatatttcggagcatgttatgccttatgctgcaaataagaataatatgtactctacccccagggttttaaattcctgcagcaatagacgcgtgtacaagaaaatgcctagtatcgaatctgatgtttaaaaatcttccattaatgttttatctatagggaaatatacgtaatggccaatgttctggagggtaaatgttggatgtccaatagtgccctgctaagaggaagaagatgtagggaggtattttgttgttgttgttgttggctcttttgcacacggcttcatgccataatcttccactcaaggaatcttgtgaggtgtgtgctgagcatggcagacaccagataggtgagtccttaaccaaaaataactaactacataagggcaagtctccgggacatgcctactgggtatgttggcaataatgatgcattggatgccaatggtgatgttatgatttcctatattccaaattccattaaggtcagcccaccatgtaattttctcatcagaaatgcctaatggtttctctaatacagaataagcaatatggtgtgcatgtaaacctgacacagacaaaataaaaacagttaagaatgc

SEQ ID NO: 8995 - DNA, 139 bp, Homo sapiens
  source 1..139: mol_type = unassigned DNA; mol_type = unassigned DNA
gccaacttagctgccttcatgatccaagaggaatatgtggaccaggtttctggcctgagcgacaaaaagatgagaacactgagacttagaagaagtatctttcccaaagtcacaaagttagtgacagagccgggattcg

SEQ ID NO: 8996 - DNA, 30355 bp, Homo sapiens
  source 1..30355: mol_type = unassigned DNA; mol_type = unassigned DNA
cccttaggaaggggacgctttgggaatgaccatgctccaccgagggacggagccggcccccagcttctccacacagagcctcctccactaacgctccaaaaaccaaaaaccgtaattgccagaagaagcgttaaaaatctattccagccactaacctcacatgcacacggaataattactctggattctgcattgtgagctgctctccataccctgaattacctttgaattaaatctttttttttttgaatttgcatctcttcaagacacaagattaaaacaaaatttacgctaaattggattttaaattatcttccgttcatttatccttcgtctttcttatgtggatatgcaagcgagaagaagggactggacattcccaacatgctcactcccttaatctgtccgtctagaggtttggcttctacaaaccaagggagtcgacgagttgaagatgaagcccagagcggagtgctgttctcccaagttctggttggtgttggccgtcctggccgtgtcaggcagcagagctcgttctcagaagagcccccccagcattggcattgctgtcatcctcgtgggcacttccgacgaggtggccatcaaggatgcccacgagaaagatgatttccaccatctctccgtggtaccccgggtggaactggtagccatgaatgagaccgacccaaagagcatcatcacccgcatctgtgatctcatgtctgaccggaagatccagggggtggtgtttgctgatgacacagaccaggaagccatcgcccagatcctcgatttcatttcagcacagactctcacccccatcctgggcatccacgggggctcctctatgataatggcagataaggatgaatcctccatgttcttccagtttggcccatcaattgaacagcaagcttccgtaatgctcaacatcatggaagaatatgactggtacatcttttctatcgtcaccacctatttccctggctaccaggactttgtaaacaagatccgcagcaccattgagaatagctttgtgggctgggagctagaggaggtcctcctactggacatgtccctggacgatggagattctaagatccagaatcagctcaagaaacttcaaagccccatcattcttctttactgtaccaaggaagaagccacctacatctttgaagtggccaactcagtagggctgactggctatggctacacgtggatcgtgcccagtctggtggcaggggatacagacacagtgcctgcggagttccccactgggctcatctctgtatcatatgatgaatgggactatggcctccccgccagagtgagagatggaattgccataatcaccactgctgcttctgacatgctgtctgagcacagcttcatccctgagcccaaaagcagttgttacaacacccacgagaagagaatctaccagtccaatatgctaaataggtatctgatcaatgtcacttttgaggggaggaatttgtccttcagtgaagatggctaccagatgcacccgaaactggtgataattcttctgaacaaggagaggaagtgggaaagggtggggaagtggaaagacaagtccctgcagatgaagtactatgtgtggccccgaatgtgtccagagactgaagagcaggaggatgaccatctgagcattgtgaccctggaggaggcaccatttgtcattgtggaaagtgtggaccctctgagtggaacctgcatgaggaacacagtcccctgccaaaaacgcatagtcactgagaataaaacagacgaggagccgggttacatcaaaaaatgctgcaaggggttctgtattgacatccttaagaaaatttctaaatctgtgaagttcacctatgacctttacctggttaccaatggcaagcatgggaagaaaatcaatggaacctggaatggtatgattggagaggtggtcatgaagagggcctacatggcagtgggctcactcaccatcaatgaggaacgatcggaggtggtcgacttctctgtgcccttcatagagacaggcatcagtgtcatggtgtcacgcagcaatgggactgtctcaccttctgccttcttagagccattcagcgctgacgtatgggtgatgatgtttgtgatgctgctcatcgtctcagccgtggctgtctttgtctttgagtacttcagccctgtgggttataacaggtgcctcgctgatggcagagagcctggtggaccctctttcaccatcggcaaagctatttggttgctctggggtctggtgtttaacaactccgtacctgtgcagaacccaaaggggaccacctccaagatcatggtgtcagtgtgggccttctttgctgtcatcttcctggccagctacactgccaacttagctgccttcatgatccaagaggaatatgtggaccaggtttctggcctgagcgacaaaaagttccagagacctaatgacttctcaccccctttccgctttgggaccgtgcccaacggcagcacagagagaaatattcgcaataactatgcagaaatgcatgcctacatgggaaagttcaaccagaggggtgtagatgatgcattgctctccctgaaaacagggaaactggatgccttcatctatgatgcagcagtgctgaactatatggcaggcagagatgaaggctgcaagctggtgaccattggcagtgggaaggtctttgcttccactggctatggcattgccatccaaaaagattctgggtggaagcgccaggtggaccttgctatcctgcagctctttggagatggggagatggaagaactggaagctctctggctcactggcatttgtcacaatgagaagaatgaggtcatgagcagccagctggacattgacaacatggcaggggtcttctacatgttgggggcggccatggctctcagcctcatcaccttcatctgcgaacaccttttctattggcagttccgacattgctttatgggtgtctgttctggcaagcctggcatggtcttctccatcagcagaggtatctacagctgcatccatggggtggcgatcgaggagcgccagtctgtaatgaactcccccaccgcaaccatgaacaacacacactccaacatcctgcgcctgctgcgcacggccaagaacatggctaacctgtctggtgtgaatggctcaccgcagagcgccctggacttcatccgacgggagtcatccgtctatgacatctcagagcaccgccgcagcttcacgcattctgactgcaaatcctacaacaacccgccctgtgaggagaacctcttcagtgactacatcagtgaggtagagagaacgttcgggaacctgcagctgaaggacagcaacgtgtaccaagatcactaccaccatcaccaccggccccatagtattggcagtgccagctccatcgatgggctctacgactgtgacaacccacccttcaccacccagtccaggtccatcagcaagaagcccctggacatcggcctcccctcctccaagcacagccagctcagtgacctgtacggcaaattctccttcaagagcgaccgctacagtggccacgacgacttgatccgctccgatgtctctgacatctcaacccacaccgtcacctatgggaacatcgagggcaatgccgccaagaggcgtaagcagcaatataaggacagcctgaagaagcggcctgcctcggccaagtcccgcagggagtttgacgagatcgagctggcctaccgtcgccgaccgccccgctcccctgaccacaagcgctacttcagggacaaggaagggctacgggacttctacctggaccagttccgaacaaaggagaactcaccccactgggagcacgtagacctgaccgacatctacaaggagcggagtgatgactttaagcgcgactccgtcagcggaggagggccctgtaccaacaggtctcacatcaagcacgggacgggcgacaaacacggcgtggtcagcggggtacctgcaccttgggagaagaacctgaccaacgtggagtgggaggaccggtccgggggcaacttctgccgcagctgtccctccaagctgcacaactactccacgacggtgacgggtcagaactcgggcaggcaggcgtgcatccggtgtgaggcttgcaagaaagcaggcaacctgtatgacatcagtgaggacaactccctgcaggaactggaccagccggctgccccagtggcggtgacgtcaaacgcctccaccactaagtaccctcagagcccgactaattccaaggcccagaagaagaaccggaacaaactgcgccggcagcactcctacgacaccttcgtggacctgcagaaggaagaagccgccctggccccgcgcagcgtaagcctgaaagacaagggccgattcatggatgggagcccctacgcccacatgtttgagatgtcagctggcgagagcacctttgccaacaacaagtcctcagtgcccactgccggacatcaccaccacaacaaccccggcggcgggtacatgctcagcaagtcgctctaccctgaccgggtcacgcaaaaccctttcatccccacttttggggacgaccagtgcttgctccatggcagcaaatcctacttcttcaggcagcccacggtggcgggggcgtcgaaagccaggccggacttccgggcccttgtcaccaacaagccggtggtctcggcccttcatggggccgtgccagcccgtttccagaaggacatctgtatagggaaccagtccaacccctgtgtgcctaacaacaaaaaccccagggctttcaatggctccagcaatgggcatgtttatgagaaactttctagtattgagtctgatgtctgagtgagggaacagagaggttaaggtgggtacgggagggtaaggctgtgggtcgcgtgatgcgcatgtcacggagggtgacgggggtgaacttggttcccatttgctcctttcttgttttaatttatttatgggatcctggagttctggttcctactgggggcaaccctggtgaccagcaccatctctcctccttttcacagttctctccttcttccccccgctgtcagccattcctgttcccatgagatgatgccatgggccctctcagcaggggagggtagagcggagaaaggaagggctgcatgcgggcttcctcctggtgtggaagagctccttgatatcctctttgagtgaagctgggagaaccaaaaagaggctatgtgagcacaaaggtagcttttcccaaactgatcttttcatttaggtgaggaagcaaaagcatctatgtgagaccatttagcacactgcttgtgaaaggaaagaggctctggctaaattcatgctgcttagatgacatctgtctaggaatcatgtgccaagcagaggttgggaggccatttgtgtttatatataagccaaaaaatgcttgcttcaaccccatgagactcgatagtggtggtgaacagaacaaaaggtcattggtggcagagtggattcttgaacaaactggaaagtacgttatgatagtgtcccacggtgccttggggacaagagcaggtggattgtgcgtgcatgtgtgttcatgcacacttgcacccatgtgtagtcaggtgcctcaagagaaggcaaccttgactctttctattgtttctttcaatatccccaagcagtgtgattgtttggcttatatacagacagagatggccatgtattacctgaattttggctgtgtctcccttcatccttctggaataaggagaatgaaaattcttgataaagaagattctgtggtctaaacaaaaaaaggcggtgagcaatcctgcaagaacaaggtacataaacaagtcctcagtggttggcaattgtttcaaccagtttgaaccaagaactttccaggaaggctaaagggaaaccgaattttcacagccatgattcttttgcccacacttgggagcaaaagattctacaaagctcttttgagcatttagactctcgactggccaaggtttggggaagaacgaagccacctttgaagaagtaaggagtcgtgtatggtagggtaagtgagagagggggatgtttccaatgctttgatcccttcttacttaacctgaagctagacgagcaggcttcttccccccaaaactgattacaactgctacagagcagacagttaagagaaatgagcttgacctttaagagaaatgagctgcactccatgagtgcagctctggaggtacgaaaagaggggaagagacttggaaatgggagacgggggcagagagggaccctccaccacctctttgggcctggctccctgggaatgtgacttgagcccagagtgaacactcttggtagaagcccttctaccttcctgcaacaccttgtttccctctcagattgtaccattgaggaataaaaaaagatatacatgtataaaactccagggatgagggtaccagcagaactgatgctcccttcacttaacattggaaaattgagaagggaaatgaatatgtatcactgccggtcctgaaacttgcggtagggctatttattctatgggtcagttccactgtcctgccatcctcccctacacagggtggcatccagagagccccaggtctgtgtggaagcttgactgcaggatcgccatgttgcacacaggacacataaaccagaaaggtgctcatcctcctctggaaggaagctgccatgtctcttcaagtcactccctccagggctgctcttcgcccctgtttgccctcactcgtgacccttcctcatcccgcccttgactgctgtccccaaccctcctccttgatttttacctcagtatctttcattttaaagccaactgaaggccttgtaaagctttgttttctttctaaaatgaacatgggggcaaggggctgaacctctcacagatttggtgagaggagcacggagtgctttaccttagataacagaaaagactgagagaggacagagggcatgaggcacctccaggaggaagaaggcgaagggccacgtaaacactgcttcgccctgactctgtccaggggtcagggactcatcccctcatcttcctcttacctcacccctttcaaacaaaaaaaccaaaccaactaacctagcgaacagcaatctagaaccaagggagctctttcagtctccgctggcaacagaaatcaagatggtgtttatttcatatgtaaatattttgttttctaattttgtatagataaagtgttctcttgtgagtattcagggtgttgggctggagggagtggggtggtgatgggaatgagagggaaaaagtgttttgttatgggttttcatttcccattgggggaattgttttgtatggcttttttgcttcagggtgtctggaaaaagcgaatgctcatggaggccactatggtgaaaaagccaggggaaagtaattgtgtccatcccccccagaaaaccagtcttcttactggtttgtgagaaatgttcatgcactttggccagggttttacatagggttcaatttggctctaagcaaaccccaggtctgactcctatcttctaggtagaccctaggttaccacattccacacaaagacaggctggtggcaccatatttcctctgtcagtacctagggtaggaaagattcccaaaagggcttaaacagaattaaggtcaaattaacttcccattcttggcgtgactgaaaggtttcaggaagctcaatcctgagaaatctcccagcggcctcctctgatgctgaaacaatcgtctcagtcatctgagtcttttcttctttaggacctgggcgctgactcactccctgccccatctccaccctcagaagtcagcctggcaaacacacgtggaaaaatctccactaactctactttttgaagcatgtgatatctggtcacagagaggtagtgctggatatgtgtcttacaaatttgcatgcttttctagaaaagatgatgggatccactagaaactcagtggtgagatgattcccttagcaagattgctgaagttaggtttagacgtgggagggtgggtatgtgagcaatggtgccaatagcggctctttatttgccttgtcctcattactgccatcaggaaggtgctactggcctcgagccaggtgttcataatctggccttgggttaaccagacaaatagaacttcttttcctagactgttggctttgtggaggttggcagcctctatcacaggataaaatttccaaatccatttacccagtatattcactacattttttcctatcctcccatcataaaagctgttagctggacaattttatttttctaaacttatttggccccagttggttgcttttcttcaactggatatttgcactgggactaagttactcatggtctgcttaagaaaacttaaagaaaggaaggctgggcattgttaaaatctagatgttacttaattccagaataacaagcaagtaaaatgcatgaggaagaattcagctataagcccaatctatatcacagatgggtatgaaacaacacccaatccatccaaaactgtgagattccgcagataccctcaggagcacctaatattcccatgttcttcagaatccatgctttctcgctttgtaccctctatcattcccttccattgcagaagtggttggtgagtgtggtcctgtatgaactcctttcagtggcaatgcttaaatctcagcatttccactgacaataatctgacccttgaatttgcctgagtcgagactttgcacacccttcaaagtgatgcatgtacagtggactttgttatttcaaaatctgtcactgtgtatcctcagccagaacttgggaaacatccttcatatgtatttccctgcactggccacagccatgttgtgattgaggggaaaatcccaaatgattccattaaatgttgctggtgtcagtagtgccaaaaacgcatgtatgacatgatacagtaggagttgtctatacagttaagtgactatcactcacccggtcttccgtggccatcaggagttgcccaagggagaattctctgcagagtgctggtcacctgcacatgtcactaagaactaggtttctttggttcattttttttttttttttggtcggtttttagttagttagttcaagatttacagatagaataaccagattgtttgggcaataagcttttggaaaaactattccagaactcactttattctttcaatcatcatctctctaaaaaggccctgtcattgcttgacaccctgtgaatgtctgtttttgtatgttaggaatgattcagatgtgtgcataaatgatgtcactgcagtgatattgatgaatgcattcagcatttccagggactgtggccataccttatgtgctctctgagcccaaagccatataggaaatacatgctcagtaggctgctacacactacagcagagcttttgctttcttcacttgggtgtcagagacttttcctcctgtttaaggagctcttcatggaggagaagcagctgaaagtgaatagtcacactgggatgggtctggccttatgtatgctatgtggtccatggtgtgttgaaggtcctgaaaaggtctttttcatttcccaccccactgcaactaccaccttcccacacagatttgttgctttagcactgagctgagctgtctgtcattcgaatgaaagtaatcccaggaaaggtgacatattaagccatattagggatgtatacatttaatcacctaatttacattaggaatctcactccttttcctgggaataagttatgatacaagagaagaggaagggagcagagagcactgagagcaatagagtagggaacaaggatacaggttctagatggcaaagacatttaaaccatattttggcctccgcctgcttttatttaagcctcatttgacacctaaataggactcctggttaggaattattttcaatacacaatcatatgagtgtataatttatgaatttctaaattcagtatcttgtagggcaggttgagaactatgattctttccatagaaaatagaagagtgatgcttctcctccattacatgttactgagtaggcagctagaaaaatcaaattgaattagtgatacaataaaatttactgtcattgtctggtttctgtcccagtttaattaatcttccaattagctgagttggtctatatcctatactttccacctccatagggggtgccctgttatctggtaaaagagccacttatgacctcaggtgctacttaacctggggggcaattgtttcttaggcctagcagatgtttgggatgacactaaaatggcagattagtcagtctgagaatgtctaatattgatctgaatctaggattctattctagtttggggggtggggttgcagtattgtataaaatcataggatatctgagaacatcccaccctcaactcattccaaccacattgattcagtcacacagtggccctgtgagctctatgacttagaagagatagcctatctattcctatgacaaaggccctcacccaaaaccttaaattgaaagccagtgctgctactttcatgccttggagagaactgtgacgtttagggcttctcatttacaatattgaagcaagaaaaaagaattttgttcagagtaatgggttagaatagcagtactgggaataagtagggaaagttagaaatcttccacatttctctctacatctctcaagagctctgtacagtgagtttctggagctgcttcatgctttgaatataattgctggggtgattatgtggttaagggctcctgaaagaactgaaggtgaaaagcagagtagatgagtagaattcctcagagccttggcactctggtgtgtagaatctgtgttttggagaaggtgaaagaactcagtgcaagaattaaggtacaattaaaaagcacaacactaagcccaatttaaactgttattttaaagattaggtttccacactttaaacctgaactcttttatcggtaattattttaatgttgtgatttaggaggtggagcagattctagtactatgcaggagaaaaaaataaaagctctctggttaaatatgtgagtttaattaaaccaacgtctattgtgcacgtactatgtccctaggctagttctgtgaatgatataaaaggtttcaaaatggagtatattgtactcacgtagaatatatgaaagcataagtataaaatatgtaaatgtatgtataaataggtatgcatacatttgtatgattatacatgcaagtttaatattttctggtttcagggtaggagtcaaagatatccattatgctatttgaaaaaacattgcagagattcagcttcccatgtcatggccaggcctggacttattcttttgaaattattacacctcccagagctaaaactctgggatttcctctctaaccacaaccttgccttttctatatcttccttccttcaagacccctctgttgttctggtccataaatccatcaggcctcattgaattccctctttggtctaaccctgtatttacccacattagcaatattctcaccggcaattcctttttcctcttgccatctcactacaccaaccatgcttagctaactgcatcccatccccttgtcattcattgcatccccaagaagagcaagtcttaaacctacgtgaagagcacaaattcaatcaatttaacctcacctgaagcctactcacttggactttttaatttctccaatgttgactcagtgtcacattctgtgcttgataaatttgttttattttcctttcatgttcatgtcctgtctttcaacaggcaatctttcctactgtgtttgcaagaaaatctgattattgaatcctcacatatgctgtcctctctgcctttagatttctcttgtctttcacacatcttttccatcctttctcccaaccaagtgctcctcttccctatgctctgacctcttctgaggtgctctccagccaattgtatttctctcttttgcatctttaattccttccacacatctacctgcaactatctcaaaaacacccgtcctacaactatctctaaagacaaatctctcaatccaatttgactcttgaatttctgtcctatcgctatcttttcacttcccaacttctcaaaagggtagtctttctttctccacttcctcaccttatgctcatggcttcatcaatgggctacaccctaccactcttctgaaactactctcaggcaacgttccaatgaagttcttgttacaaaagtcaatagccttttttctttacttaccctgctcttcaacctcattgacaattaccattgggaggcaatacattctggttttaatcttagttctctggtcctctaacctcattggttcctgctcttcctcttatctccttagcattgacttgccatggtatatctgagcttgaccctcttctccttatcttaatgcttctgtagcaatctttctgtcttctatgatttcaataactctttgaatgaagatgaatcccaaatcttcacttttagcccctaccttttgcttttccttcatacacatacttccagtcaccttctgaacactcaacttcatcttgactcaaatatccaaaaccattgctgcaaaccaacataatcaccaacttcctccttttgcttaatggtatcaccatgtcttccgtcaccgaactcaagcttttcaggcacttttgcctcctccattttcttcatcctgcatatctaaaaatttgaaaagcctactaattcttccccctaaggtttccagtctttccttttcattcagacccttccttctagtctggattatttcagcgtcttttagcattgttccaatattttatatttgaatctactcttgtcagtactcacttcctacatataaatcagatgtcattcttcagatcaagaaacaaccttcagtgggcttcacttgccgtagtctgccagcaataatttcttgttacttgactatgtgtgtgtcccataatccagacaagctgaataacatttgtttcacctttccctaccagcttgttttcccacttgcgtcttcccttaaactgttccctttgtccaaaatactctccttcctatctcccatctcactcccttcttgaataatatccattccctctatataagtcttcaaagaccagaacaacttctttatcttccattcagaaaataattttaggcattttatgaatgcccataacactttcgttgtttctccctagtggcagctatcatgggccatcttatttcataggtatttggttatacatctcatctctcctgctacagcataagctccctgtgttcagggccatgtatttttaaatctttttatctcctgtagcactaaacagagtgccttgtatatgaaaggcattagtaaatatttgatattattataaattataattgagaaggagtcactttattttgcccatttgtatctgcagtagcacctaaggatgaatccccccagtttctctatatatatctgcacacacaatcacatgtatatactacatgtatacagttcattatttcaaatggaatctggatttttctaagtgctttgtcctttttctaagtgctttgtcctttgaagttgttttggactgttttatggttaggaaagtgtacttggaacactacatgtgttcaagtaagtgacagagggagaaactatgaaggatattgatcaaattttaggtatcagcttttcagatgctttgggtagagcttgtatccagacactttactaccaagattgagtctctaataacctgatccatgctgggactgatctgtgatccaatatttagcttcttttttaacactttcagcaccaaaagaaccttgtcacagttctggctcactaatcacacagccttgtagaccccaggtggtggtccaacaggaccactgtatttcaccacacgctacttccacatttgtggccttgggggaactgtctgtgctggtcaccaccttgtctttatatttctttcctgagttctttggcttctcaccctttctgaggctttgtctacaggatcacttctcccaaagggaggataagagttgaggtaattgagcactttacctcttatctgtatatttacaatgaaagtaagttaggatttgaatgagctggctcagagagaatgctagtctctaaactactcctttctctgtaaatataaagggattcattacctcagggggagacaacatcacttctgaccttatggccctcccttatcctctggtccctgtattcttgaagccctgttaacccttcctcctcctctcttggctctacttagcaatctatcaatcattctttctagccagtgtcagtctctgtccctctgaagaaactcttggagctcgtactgtcctttcacttcagctgctctggtaaccgataatgttttcgttccttctcccggccagccttctctgtaaatctcattatgccattggctatgaattattcccctttgggaggcatcttctgccactgtgtgctaatttaaagcatactatagagaactgaactcaaataagttacaggcagtgacaagtctctttttttaaaaaaaaagtgaagaaagtccactcttcattgagacaggagtgggtaggacaattattattggcaaggtagggcaaaacttgtgacaacttgggagatacctagtgaaaattaaaatataagtctagagagataattttgcttttcaaaagtcctatggggtctagatagccttgctcctgaaaatgagaatagttaatattttagagcaaaacccatttcattatactatgagacttttttttttagctgatgaaacaaattatctggtaaacagctggtgggagggtaggaagacagccatcctcatgaaggacgttcatgaatctcatttgggccaataaatggaccaaaattctaggcattttagccatgaactgttcatgtcaattattttgcctacaaatacccataaaaggaaagggaggatatgaggaaggaaaagaacaggaagtctacactggagcttccttttgtgtcaccaataaagccagaagctgacatgtgaggcacatggttcccccttggttactggcttcaatgatagcttcggaaagtagggaaacttgaaagagcaaggaccaaagcggagatgagtgaggaacctgaatgcaaccttatgtgtgaggtcctgatatccacaaggaacctggccccatgtcattcctgcccaggtccttcagattacagcacccaaggagcccttgatcatcaccctgggcagagggagtgacttatcacaccacccttacccacagaatttaggccaccaggctgtgactccatctgtcccccttgcagtaagagattcatagtctctgaaatctgacaggagaacagcatcaggggaaggggccacaggaatgcgaatttgttgagctgcctgctcctctaggataagtatattacctgtttccagaggggattgtttttttttcgaaatgaaacaaaacatgcctgcctaaaacttcagccctattcagaacagtcttgcagttaactgtcattgtcacattttaattgtaattgattttcttttgaaatccatggctattttaatgctccctttgaccatgacataagaaccctctgcaaaccagagacctggccattaggttgcctctggctgagttatactctcagtagtttatactttgctctcagatattcacctgaacagcacaactacacagaatttgatctctttgccatgagcattctgatgcctatgtacctccctaatgcacacacacaatcttaacaaatagatccaaatttcctatgtcaatcatgttatggtagatgaaagtgttcatttagaatgggataaagagacatatcataatttatgcagccagtgttttctctttgctctacctggcttgtggatcattgatccctcaaggtttgacagaaatattcaggcttcatgtgaaggcagcatgttctttgtgatgaaacaacctagttatcgtctccattttcccattttaccctatggaatccatgtggccttctaaggtcctgttgatggactggtactaagaggatggagaagcagaagccagtccccctgagaacagacagtcctgttgcttagatacatacatattcgcacatgtgcccacatctcttcttggaaacatcatgagcagaggtggagaggtctgttctcaatgggaggaataagggtaggagaattccttgagaatccctattctcaaggaatagggataaatgccttcacggattcaataatttatctgttctctctctcccagggtcaggagcaagaaaaatatcaaggtttcacataggcaggaagcaaggaggatagtgaagcatctaggtggaggtggaactcttactgagaaaaacatgaagtagtaaaatcaccctttctttgatataaatgcatttagaagtcaatgagggcacttacagctgtgtttcccttcactaacttttcatctcttgcattctttacttctctttctcaatttattcatcttgaggtatacttatcctgagttgactctgagcagcccatcctcaaaacacaaacaatgttaggatgagaagttgagtgagcacagagctcgaacacgtgcatggtacttaatgtttccaaactcgagcccaatcagtctagcacagtcaatcccactgcattttaatgactaggatggggcctgctgtacatagctggacatcttggattacagaaaagaggctttatgtgaaggcagcattttctttgtggtagagcaacatagttatcctgctaactgtcctatttgacctgatggaatccataaggtcctgttgatgggttggttctaagaggatggagaagcagaagtcattctactgagaacagacagtcctgttgcttagatacatacatattctttatgacagaattcctcctgagactcttgcacaccttcagtgatcagcgcattcactttggttatttcttggtaacaggcacgagaaatgggtcacatagaaatctgaagagtcatttctcgagcatttttagcttattcccatgtaaagaggcactgagctcctgcagttctagcctgcctctgctcccctccttggggaatggtggagtttctaggataaccagcaacccattaggctccaccacacttagcctatggtacattctgagtaaatcacagtagttggtatgtgaatacagaagaatttaccataaccacttctccaaataacctcctttgacttggaaataagatcatctttcagttttacagatgagaagtcaaagcacaaaattggataattagccaaaagtaagattatacagaaaattcttgacagaaccaaaacttggctgaaccaaaacttgtccaaatttctaactctcagtctagctcagcgagtaatgctgcctgaattgtctgcccccactgtaggttttcagcatctagcagtggagaaaagtcacgaaatctaggcagctgatttagccagatcttatctatgaaatttccctttgtagacacacacacactccacatacatctacagagacaagtcaaaaagagcaagaagaaagcaaaaatttgaaaatcagaaaggttagagaggtttccacggtgaagaaaacttggtcaaataaaaatgtttttgaattctatagggtaagatattgtgaataattttttattattaaaaattttttttaggtagcatgtaatccacataaataaaaaactcaagaataaactgggacagaggatttcttccagagtgctacatggcaaaagagccttcaggaacgtgtgcaggggtgtcatgatactccgaaggtgtcagtagttttggtcagcccacagtgagcagggcagcctcaagggagagccccttacatccttttctgggcacctctgtctaattaagttcaaacatacaagcctgattctaggattaaggcataagttagttctgaacagaaaaatataaggcagttcacatacacaatgaattcttgaagaaagaacctatagcccccagaccgataataaataattactgcctgccaaaatcctgaagaaagggaagcatgggggctccaaaattaatagtctcctgagaatacttatgagaccttgattttgtcacaaggttgcaatggtgaattatttattaagcacccgcagatcagagaatcttgcaacaaccttctcttacaacccacctgttcacttatgaatgatatcaagctcaggatataatccatctttccaaagattttagtatctttagtttgggctgcagaagaaattttggctcacagcattatgcttaaaccaaaaacagtgaaagagctctagtgtcctgcttaatgtagagtaactttttttttttatcagtccttcctagccctagagggaagataggagaggaggtaggaagatggaaaagtccttagatgaatgagtgaggagacttctataccatcaacttcagagtgtactgatccccggagcctggttcaggaggctagtttcagatgatcggaggaaatggaggaggtagcttttattcccatgcatgaagatggggggaggaggtgggcactagactaattttttaatctaaaaaaaatcaagcctattacaaatctcatttttcccttgtccttttgcctcccaataattcacataaaatcgtgttatcatagtaagctaagagagaggggcagtagctatttctaccttgactccgtggtgacttcatctttttcatgagtgtcattacagatacctggatcatgatgatcctgaaaaacaggtcacagggccaacagctgatgagtatttggagcatcttattcccccaagatgaccactccctgtcttctgctacacctatattcatcgggggggggaggtgggaaaatagcaggattcttggggactctgagggcatgaatggagaattatttgattgaaaccacagagctcttgtacttagtattaaatattaaaatagaaatgaaaagttcagcttttctgagctgtaccatagcggccaatggaggaagtcttacaaagaaaatctatatctgcacaagactgaagccactaaaccgagtatacacaacataaagatatcttcctatttcaagtatcccttagggggcatgggtgcttagctatcctatgaaagacagagaagataagctcaattttagagcccagagcttgctccggaacagcaagatccacatgaacttaaactctttcccactgagcctaggggtggaatgtaattcctctgatggttttgatttatttccaagctagacttctctatttgatcattggcaccttggcagctcacacatctccgtggtctcttctgtagctttcagaaaaaaaaaaaaaatatatatatatatatatatatacacacacatacatacatacatacatatacataaccctgtttgggtaaggcctattgacagaagccagatatctgggtggaagttagaagatgggcaaggaattcttatctcagagtttcaacactgcgacaatgtggagagaagtctcctgggaaaatgcagatgcccaataacttccaaaagaatcagggaagttggagtatttttgagatttacagtgtctttacttcagtaaaacaagccatagcaacattatgctctgcagagtcttctgttcacctttggatggaaaagagctgcttctcctagggagacaactaagaccaagaacaaaactcccatctcctaggccaattattgttttctcctttcctttcttttttattctctttgttacataatggtgaaatctacctggccattgccagtcaaacattctaattgctaaatatcatacagaaattcatgaaaaaagagtagaatcagcagatttcatttaatcccaagggtctttgcagttttcatcctctccctcaaagttatctcttctttgagacacatgatcacccctttcctcttctgggtggccatgattccaaaatgaacttcagtggttggtgcttcacaaaaggaaagacagctataatataaaatagaccaaaatacttatatttttagccactgcaaagtgggttttatcgttgagaacaaccttccaagctccttacttggaaacccttcctcacctcccagcctcctggcagctctcctggttccccttcatgtttttggctcccctccccgactttcctttcctatgaaaatgggatatatcccttaaactgtattcttatctaaactatcagactgttaaaagaaacccttgacagtaatttttcatggttttctcatcattttttaacttaggaagttggagaaagaatgacaagcaggcaaatgaggtcttgttcctgagtgcttcaactcaagatcaagtgctgggatagtgagtggctcttagtggagagggatgtgctctggaatattaagccacctctgagcatgtgtcctggtgctctggtcaagatgcctgttgtgtatgtggaggtattttgtggcttttcttgttctctctttttaaatttatttcaaggcacaagccctttgtgatggaggatgtctagcttgaacatgctggtaatgtgacactatcctcagctccccttggccctgggttcataggaggcaagtgtttctaaatttctcgcccagtgagttgttgcatgttatttttaaccattaatattgtgtgtctattggaatgagaaacagaaggttgaatgggaaatagattcagtgacaagcagacaaaaagcttggttctgagaaatgttcttcactgagttgaaaaaaaaataatctagaaacaaagaagagggaaattggggtagaatggtttggtggtgaagagacgatgacacccacatccagatgctctggtgtattccctcagagatttgtcattccctgtgagctctggcagaaggagaggctgtgctgccattgatggctcagaaatggtgacaggctggctttagaaagagacgtaggctttcttccagacagacattgataagcattgtagctcgattcttcaaaaccttgtctacaaacctttagggcagcccctctccaatgatttccattctccagtcaagaagattctgagtggaagagccttgtgtgcattgtgattacattgacttaaattgggaagccaaggggcactgagaactgaatatatcaggggaatggagttagctgaacctttttttttcaatattggaatgattttggatcacaaagttaggtcacctctgagagagaaaatctgttaaataaaattatatcttcccatctccagtgaaatcactaggttgttaatgtgattactgtttacttcagaaagaaaattgctagattcgattacaaataggcattttacagattgatttaatcctgagtcttacacatattaacatggaatttactgactcagacatgatcttctaagctataaaatattactggcgggtagtagatcatatgttctaagcaaaccaggaaagctaaaacgttaagtaatcctcccaaatattcagcgtctgtgtatttcactatagctgaaggggatttgggagttaggccgcaggggagaggagggacaaagtgccatagattaatgaaactcggagtaacttttttcttacctattaaaaataataattaacccaaggacaattctcaaaccagaaaaatcatgaaaagtgagctctgcacttgccattggttaaaatttagaaacacttagaataaatatccaggttttgggggaggagttgtttccttgcttgcattgttttgtttactggagctcttattttggggatatttggtctgtggcttcagagcatgttttggataaatgacttatccatgttgatatttattgagtggaaacccatgccaggctgttctaggtgctggaatataagaacgaaccacacaaagtccataccctcttgaagtttgtatgttgatgagaggaaatggacaaaaaagcaaatcaatagatctcatgtcagatagtgcaaagtgtcatgcagaaaaatgaggcagattaagggggatagatgataggatgggtgtggggttgctatttttgagtaagcaaagatgacatttaagtaaaggtttggaggaaatgagggagtgagacttggggctttctatgcaaaggcaaagagaaagcaattgcaaaggccctgctgtcaaaccaaatgcttggcaaacttgaggaagagccgggaggccaatgagggaggaggagagtatgagaggtgaggtcagagagggggcaataacgcaagtcaggtagggccttgtaggacactgtcaggatttggcttttaccaagagcaagatgagaagttgctagaaggttcggagcatagagtgatatgatctgacttcagttgaagaggaagctttgggactgctgtgttgagagtataccctgagagggcagacaatggaagcggctgaaagaccggttaggaagctcttgcaataatcctggtaagagatcatagttgcttgggccatgatgttagcaggggaggtgataagaagcagttggattccagaaatgttttaaagaatcgatatcacacagtttgctgatgaattagacattgaataagagaaagaaaaatcttaagaataaccttagaatgtttggcctgagctattgaaagtttggagttgccatcagtgtaagacaggaatcctgcaggtgaggctgactgggaaggaaagccttatagtttaaggtgtctacagatgttgcaagtagaaatgatgattaggcaattagatatatggacctggagttcagggaaaatgtatagcctgaagatacatatttaaaatttgtatgcgtttggttggtatttgaagccatgatactggaactagagaatgagtagcgacagaagaggattctctagactgaggcccagggtggaggattgttcaaagctccaggagatgagaagggaccagcaatgggaggagtggttaatgggtaaagcaagtactattattgagtaggataagactatctggaaacatggaggtcatcccattgatgacctggaagagagctgtttcagtggactggtgggggcaaaagcatgatggggtggattcaagaaagaggggaaggagaggaggtagagacaacaggaataggcaacgctttaggagtttggctgtaaagaggacatggaaatagcagatcatagagaatgtgacgcccagggagggacttctttttttaagatgggaaaaataacagcccattttatgttgacaagactaatccaggagaaaggaaaaattgatgatgcctagggagagaggacaattgctggagtaatgtctttgatgaagtgagagggcatgggattcaatacaaacatagagggactggcttcaggggactaaccaggtttgtttgtattaatagcagggagatagtgcatttgggcacagatgcaagtgggctggtaaatgggataatgggagtatgctttttctgattgatttttagtaaactatgaaaggagttcatcagttaagagtgagtataggggaagagtattggaggttttggaaggaagaaagcatgaatgagtcatatagccatccggcaggaagagtgagaacaaaaatgtcggagacaccaaaaatataggagacatgctagggggcataaaggaattatttgagtttttatgattatgagtttaaagaaatttgttttcttcagtcaccttcagctgcttaaacagggtggcaagttagattggaacagggttggggtataaccaggtgaatataatgaaagcaagagatgtggagtcaagggcaactgcagtgtgttaactataatgtttggtcatggaatctaagctgggtgtagaggaaagtgaggatttttagggaaggaggaacaatgaagcatattagaggcagaggattgagattcaagctgggatcactcagttagtgagtcagaagcaataacgtagaaattaggaggtgggttggagaggtggatgcttgaggttatggagggcttgcagttattggtggtttggggtctgttgttggggtggtgggctgagataagatagaggaaaaggttatagaaggagcaggggtcaaggaactgagaggccaggatatgggaattatatagatattgaagtcaacaaaatgttgacttccatatgataggaatgtaaattatgacaggaatgagggagagtgattcgagaacatttcaatcattgcatcaagtaaggggtgcagctagcctagtctgatgtgcatcaaagctggattttatggttgttgcatgttatttttttttaaaaaggagggaggatggtctggaatggcaatgaggggcaagaagggcatctccacctccaggccccagggcatgaggaaggtgcaagtggaaatgctcaccacctgggagtgattcagggtcctcaaagaggagccaggtttctgtaagagcaagaggaaaggaattgccagggttgtggctggtgatgaaccactgattcttaggcaggatttgggagttggtaaaggaagggaaatgagctgagatgggagatgtgcatgggtatctggggatgaaagtccaagtgataagagggactgggggtcttgggcttctcgtggtgattgccctaagcgaggctgtgggcatttggggttggccctaattgtctctatgtcagattgaggtggtgatgctgcaagtgcccggggcagggacttgatggcagcacatggaactctggtacctcttcctcagtcctgatatttgcttttttaacttctactaaaaaccccactgctaactgtgataggccacaacatgtttttatagatgtcaacaaatgttatcctggattgagaccacattttgactatttatcctggaaagtacacattttcacaggaaatcttgtcctttctaaggttcccaactaagctagtctcgttgtgggggggtcataattatttgttcttacttaccttactccttgttcatctttaaaaaaaaaatcaaataaaaaggattggaaagcaactttgcttctgcccaattctgctaaatgaaagttttctctgacagatcattttgattttgtattttcttttgtgacagaaacagtgggacaggagcatggaaatgaatgaaagtctttaaaagccttgagagagcgttttcaaggatcaggagagggcttagaaagaaaaggactctgagtggggctgcatgaaaagggggtaagtgaggactcttggggagggtctgaaaaaaacaagtagtttggcaaggagagcagaaaaataaaattccactgtgtaggcatttggagatttagcaagagcaacctagagtctgcccccagagacactgcacgttgtttctgacacagaggatgcactaattctatttcctgtgccacctgaaaaaatcataatttgagaagagaaactgttaggccatttctagtgaactatttttccaaaccctcacggaaccctgaacagggtgtgaatgagatcacaactactgctgctgctggttcagcctctctgtccactaataaaggcaaacccttcagcatggtcatatcctgccagccgttttcccccaaaagattaaattatgttcatcttggctcatctaacgccacatcttgagttcttaaggtatcacagccaactcagtcataccttactttatgcactgagtacgcattaaactctatttaggaaggaagagggaagcaaaggaagccagggatggttttgtcatgacctctctttgctttctgacctcccggaatccactctttggaagatgtgcagaaaacaatgtgacttccatttaccctgcctcagatctcccctccttcagactggctcccacccctggttaatggggtaacctgggtacgcctatttgttaaaggaatttgtgggaagtgaggggcaaaattgttggagcagagggaatagatttatgggagctttgttacccagtgactatcccagcattaatacttcagagtagccctgacgcttgtggaaacatttcaagggagctagaggcaatgttacagtggagatcagagaagggatggggcagtgagctcttgtccctaggggaaatctcttttcctccacgtgacaggagccagtgctccaacagcatcagaattacacttagccacaatgactgatgcgtgtgtgtgcctgtgcacatgtgtgtgagcgtgtgtgtgagcgcacgtgtgtaagggggtgatgatggaaacatgatatgcatccactatggggttgcgttgcaaattcacagctgcacccctcccaaagtcacatggcagaggggaaatggtcatagctttcctgtgtgatgtcctctccagggagcaccgacgactcaggcttgcctcagctctgcgaggcccagactccacactcctccctggggccggctctccttcctcttgactctcagatccccagcccatccacctccaagttctttttttgtttatttgttttgcttctgttttctgtaaatatctatttcttattttggacatgcagggatcaattgagattctggagtggggggaggggcggatgactgggtctttttattttttcctttctctcttggattttggtgtttgaacttgaaaaaaataattacaagtatatatataagcaaatgacttacctttaaacaaaagaaataagttgatttcattcttttgatttatcttgtttctcattggggtcgggtgggggtggggggtcttttgggtggagggcttttttgtgagctgtatagatttccagtttggacttgttcaaatgatgcaggaacaaaaattaaaacgaattaaaaaaaagacaacataaaaaaacaagaaaaactttgtgatgtataaaagctgtaaatagtcaaagattctttctcttttctaatggcaaattatttctgtcactttatattcaaaaaataaagaaacctaccacaaattatcagggttaaaaaaaatccagaatcagagtttttttcttggtctttgtgctttctttactgtgattccaaaaagattgttaaaagtgctgtttgggaaaaaccccttgcccagttggtttccaattgttggtaggagtcttggactggcgaatctacttgggttgggatctgtttctactatagctggtgctggagcccttggttacactcatctccccctcatgtattattctgaaacaaatcccataattatatggtttcatctgtaaacattacagtatatatctcttttactaaggactcttttttagtttaacaataccattgtgacatcataaggtagccataattccttgataagaaatatccagtgttcactaattgtctcaaatgtaatactgttttatggggtggtggtgggtttttttcccataagtcataaggtccatacaattagttgctatttctcaaatgtattttaaatctaaagatttgctttctaactttttcttgacatatacttgttaaaggaatagagcactttatcctttagaggttcccacagttggattttgctggttcttcccaatattaatgaagacaatgtaaattggtaattgttttactctttaatgcatacttccattgcttggaggtgtcagaaaagcaaaccagcccttgttttgctgattgtttcccaccccactcccagtcccagtcctgttactggctttatatatggattctaaatgatctctctttctataccttgattgctaaattatccaagttaaataatagtatctcccccttagctatcttggtaagaaaatagcatagacatatttagcttttcacatgccaatcatgaggcacatttcaacatcactttattaaaagccacatgctcctcctatagtcctagtactggaaaggaccttctagagaccatttagaagaactctgtctcatggccaaggagcctgggtgagctcatgtatggcagccctggctagaagccagcagggctaatccctagttccaggaatctcccaggataatgtattgttatctctttgaagttactgtctcagagagattatctgtgagggtctctcttgtactttcctttgtactgaacaaaaattcttgtttctccctgaacattccagaaagtagcaagctctaacataaagccagattcttcccagatatagtgattctctttacttctggagatacttccttaaaccccaaattttttttggacaacagaactgctttaacaataatctgaaaattatacagtaagtttgatttgaaaatctgagatttgtttaaaaaaaaaagggggaagacaagacttgaaatcttggctctgatttttctgttgtttttgtttttttgtttgttttttttttgtttgtttgttttttaagagggtcttgctctgtcatccaggctggagtggagaggtatgattacggctcactgcagccttgacctcccaggctcaagtgattctaccacctccgcctcctgtgtagctgggtactactggtgcataccaccacactgggctgattttgtattttttgtagagacggggtttcaccatgttgtccaggctgattctgaactcctgggttcaagtgatctgcctgcctcggcttcctatgatgctaggattacaggtgtgagccactgtgcccatcttggctctagttttaaataaggaagcttgcgagtatttatctggattatggtgggaacctccagtaggatatcatgaaagctttgatcatgatcacaacaccttcaataaaacaaagactccaatgacaagggtgagtgccagaacttcctgagactatgccaagtgtctgttctttatacagcctgcctcacccacacctggaatctcttaaatggattagctcagagcacctgtgtcctacatgcccttgtgccaccctgaagtccactgcaagggactatcagtaagaccagtctaatgaaaggctgagggagcacccggttgtgtccccatcagccaactgttccggaaagatgagcctccttggctgtcccaggattgacactcttcccctgcatacatcactaggaaggtagaacctaccctgaacacttgatttgaatatttctattcccctattcttttacaaatgcaaactaattctttcaaaaatataaatgatcctctgaaagaaatttcttgtggaattctggaatgaccaagaagatgggaagagaccaccagaaaagtggttctgagagtctgcagggcctgtcaaaaaaattatgccaaagctatcatttgtggcctgcatcaaatcatctagacttccgttttcttatcttgaaacccagatgttggtctatctgccctccccatcaaaggttacctggagcagtagttctcagttttacatagtggagtcatctgagtatttctgaaatgctgatgcctgagtctcatcccctagagagtctcattcaattgtcctgggtggctggaggggttaggggttgaaaacttgcccaggtgattttaatatacagccagaatgtgaaccactatgtatgtgcatctggggaaagcgggcctcctatttacttctaatcccattatatgtggcagctgtttgttgtcactctcctctcaccatggacaactattcacagcacagacagtcaccctttggaactccaggacctctttcctcttccatttggagctgaagaatggacataacggaagcaccattttatgattacagcctcgttctctaattctgcctatccccagcatacacggctagatatagacatactgcaaagctcctctatgtaaaggaaattctacacataaaatttaaacttggaatcga

SEQ ID NO: 8997 - DNA, 100 bp, Homo sapiens
  source 1..100: mol_type = unassigned DNA; mol_type = unassigned DNA
ctaaattcatgctgcttagatgacatctgtctaggaatcatgtgccaagcagagatggccatgtattacctgaattttggctgtgtctcccttcatcctt

SEQ ID NO: 8998 - DNA, 2688 bp, Homo sapiens
  source 1..2688: mol_type = unassigned DNA; mol_type = unassigned DNA
tttctgcagtggaggggctacatggagattcagacaacagagcctggtggaccctctttcaccatcggcaaagctatttggttgctctggggtctggtgtttaacaactccgtacctgtgcagaacccaaaggggaccacctccaagatcatggtgtcagtgtgggccttctttgctgtcatcttcctggccagctacactgccaacttagctgccttcatgatccaagaggaatatgtggaccaggtttctggcctgagcgacaaaaagttccagagacctaatgacttctcaccccctttccgctttgggaccgtgcccaacggcagcacagagagaaatattcgcaataactatgcagaaatgcatgcctacatgggaaagttcaaccagaggggtgtagatgatgcattgctctccctgaaaacagggaaactggatgccttcatctatgatgcagcagtgctgaactatatggcaggcagagatgaaggctgcaagctggtgaccattggcagtgggaaggtctttgcttccactggctatggcattgccatccaaaaagattctgggtggaagcgccaggtggaccttgctatcctgcagctctttggagatggggagatggaagaactggaagctctctggctcactggcatttgtcacaatgagaagaatgaggtcatgagcagccagctggacattgacaacatggcaggggtcttctacatgttgggggcggccatggctctcagcctcatcaccttcatctgcgaacaccttttctattggcagttccgacattgctttatgggtgtctgttctggcaagcctggcatggtcttctccatcagcagaggtatctacagctgcatccatggggtggcgatcgaggagcgccagtctgtaatgaactcccccaccgcaaccatgaacaacacacactccaacatcctgcgcctgctgcgcacggccaagaacatggctaacctgtctggtgtgaatggctcaccgcagagcgccctggacttcatccgacgggagtcatccgtctatgacatctcagagcaccgccgcagcttcacgcattctgactgcaaatcctacaacaacccgccctgtgaggagaacctcttcagtgactacatcagtgaggtagagagaacgttcgggaacctgcagctgaaggacagcaacgtgtaccaagatcactaccaccatcaccaccggccccatagtattggcagtgccagctccatcgatgggctctacgactgtgacaacccacccttcaccacccagtccaggtccatcagcaagaagcccctggacatcggcctcccctcctccaagcacagccagctcagtgacctgtacggcaaattctccttcaagagcgaccgctacagtggccacgacgacttgatccgctccgatgtctctgacatctcaacccacaccgtcacctatgggaacatcgagggcaatgccgccaagaggcgtaagcagcaatataaggacagcctgaagaagcggcctgcctcggccaagtcccgcagggagtttgacgagatcgagctggcctaccgtcgccgaccgccccgctcccctgaccacaagcgctacttcagggacaaggaagggctacgggacttctacctggaccagttccgaacaaaggagaactcaccccactgggagcacgtagacctgaccgacatctacaaggagcggagtgatgactttaagcgcgactccgtcagcggaggagggccctgtaccaacaggtctcacatcaagcacgggacgggcgacaaacacggcgtggtcagcggggtacctgcaccttgggagaagaacctgaccaacgtggagtgggaggaccggtccgggggcaacttctgccgcagctgtccctccaagctgcacaactactccacgacggtgacgggtcagaactcgggcaggcaggcgtgcatccggtgtgaggcttgcaagaaagcaggcaacctgtatgacatcagtgaggacaactccctgcaggaactggaccagccggctgccccagtggcggtgacgtcaaacgcctccaccactaagtaccctcagagcccgactaattccaaggcccagaagaagaaccggaacaaactgcgccggcagcactcctacgacaccttcgtggacctgcagaaggaagaagccgccctggccccgcgcagcgtaagcctgaaagacaagggccgattcatggatgggagcccctacgcccacatgtttgagatgtcagctggcgagagcacctttgccaacaacaagtcctcagtgcccactgccggacatcaccaccacaacaaccccggcggcgggtacatgctcagcaagtcgctctaccctgaccgggtcacgcaaaaccctttcatccccacttttggggacgaccagtgcttgctccatggcagcaaatcctacttcttcaggcagcccacggtggcgggggcgtcgaaagccaggccggacttccgggcccttgtcaccaacaagccggtggtctcggcccttcatggggccgtgccagcccgtttccagaaggacatctgtatagggaaccagtccaacccctgtgtgcctaacaacaaaaaccccagggctttcaatggctccagcaatgggcatgtttatgagaaa

SEQ ID NO: 8999 - DNA, 100 bp, Homo sapiens
  source 1..100: mol_type = unassigned DNA; mol_type = unassigned DNA
acaaggagaggaagtgggaaaggtttcattacaagctcctggaaagcagaatctgtgtatcccctaccgtatcccctgcaggatctcatacagagactgg

SEQ ID NO: 9000 - DNA, 139 bp, Homo sapiens
  source 1..139: mol_type = unassigned DNA; mol_type = unassigned DNA
cttcagtgaagatggctaccagatgcacccgaaactggtgataattcttctgaacaaggagaggaagtgggaaaggaaagagacaagagggtgttttataagcccactccctcttccctgcctccacctaccagaaaac

SEQ ID NO: 9001 - DNA, 830 bp, Homo sapiens
  source 1..830: mol_type = unassigned DNA; mol_type = unassigned DNA
gcttcgtgggtttctcctccccccggagtcagggtgtgcgaggaaatctcggggcttcgctctatcgagagtgctcgtcaagggtgattcttgatcaccaccatccagtagtgctggcgtccgaatgcatatccttttgccttgcaaagaagagtcatgaacttcaaaacccccgagacggatcattaatcctgctttgcaggaaaggaaaaccctccattcccagccaccggccacccctctccgcagactgcaaccgcggaggcgctcggagccggaaggggacgctttgggaatgaccatgctccaccgagggacggagccggcccccagcttctccacacagagcctcctccactaacgctccaaaaaccaaaaaccgtaattgccagaagaagcgttaaaaatctattccagccactaacctcacatgcacacggaataattactctggattctgcattgtgagctgctctccataccctgaattacctttgaattaaatctttttttttttgaatttgcatctcttcaagacacaagattaaaacaaaatttacgctaaattggattttaaattatcttccgttcatttatccttcgtctttcttatgtggatatgcaagcgagaagaagggactggacattcccaacatgctcactcccttaatctgtccgtctagaggtttggcttctacaaaccaagggagtcgacgagttgaagatgaagcccagagcggagtgctgttctcccaagttctggttggtgttggccgtcctggccgtgtcaggcagcagagctcgttctcagaagagcccccccagcattg

SEQ ID NO: 9002 - DNA, 595 bp, Homo sapiens
  source 1..595: mol_type = unassigned DNA; mol_type = unassigned DNA
gcttcgtgggtttctcctccccccggagtcagggtgtgcgaggaaggggacgctttgggaatgaccatgctccaccgagggacggagccggcccccagcttctccacacagagcctcctccactaacgctccaaaaaccaaaaaccgtaattgccagaagaagcgttaaaaatctattccagccactaacctcacatgcacacggaataattactctggattctgcattgtgagctgctctccataccctgaattacctttgaattaaatctttttttttttgaatttgcatctcttcaagacacaagattaaaacaaaatttacgctaaattggattttaaattatcttccgttcatttatccttcgtctttcttatgtggatatgcaagcgagaagaagggactggacattcccaacatgctcactcccttaatctgtccgtctagaggtttggcttctacaaaccaagggagtcgacgagttgaagatgaagcccagagcggagtgctgttctcccaagttctggttggtgttggccgtcctggccgtgtcaggcagcagagctcgttctcagaagagcccccccagcattg

SEQ ID NO: 9003 - DNA, 115 bp, Homo sapiens
  source 1..115: mol_type = unassigned DNA; mol_type = unassigned DNA
caacatgctcactcccttaatctgtccgtctagaggtttggcttctacaaaccaaggtgtggcagagcatggcggatctgtgaacacagagtgatgtggcagtttagagttaggt

SEQ ID NO: 9004 - DNA, 4261 bp, Homo sapiens
  source 1..4261: mol_type = unassigned DNA; mol_type = unassigned DNA
tgtccttgagccgcgggtgacggtggctctcgctgctcgcgccccctcctcccgcggggggagcctgatgccacgttccctatgaattatttatcgccggcctaaaaataccccgaacttcacagcccgagtgaccctccggtggacatgggtggggccctggggccggccctgttgctcacctcgctcttcggtgcctgggcagggctgggtccggggcagggcgagcagggcatgacggtggccgtggtgtttagcagctcagggccgccccaggcccagttccgtgcccgcctcaccccccagagcttcctggacctacccctggagatccagccgctcacagttggggtcaacaccaccaaccccagcagcctcctcacccagatctgcggcctcctgggtgctgcccacgtccacggcattgtctttgaggacaacgtggacaccgaggcggtggcccagatccttgacttcatctcctcccagacccatgtgcccatcctcagcatcagcggaggctctgctgtggtcctcacccccaaggagccgggctccgccttcctgcagctgggcgtgtccctggagcagcagctgcaggtgctgttcaaggtgctggaagagtacgactggagcgccttcgccgtcatcaccagcctgcacccgggccacgcgctcttcctggagggcgtgcgcgccgtcgccgacgccagccacgtgagttggcggctgctggacgtggtcacgctggagctgggcccgggagggccgcgcgcgcgcacgcagcgcctgctgcgccagctcgacgcgcccgtgtttgtggcctactgctcgcgcgaggaggccgaggtgctcttcgccgaggcggcgcaggccggtctggtggggcccggccacgtgtggctggtgcccaacctggcgctgggcagcaccgatgcgccccccgccaccttccccgtgggcctcatcagcgtcgtcaccgagagctggcgcctcagcctgcgccagaaggtgcgcgacggcgtggccattctggccctgggcgcccacagctactggcgccagcatggaaccctgccagccccggccggggactgccgtgttcaccctgggcccgtcagccctgcccgggaggccttctacaggcacctactgaatgtcacctgggagggccgagacttctccttcagccctggtgggtacctggtccagcccaccatggtggtgatcgccctcaaccggcaccgcctctgggagatggtggggcgctgggagcatggcgtcctatacatgaagtaccccgtgtggcctcgctacagtgcctctctgcagcctgtggtggacagtcggcacctgacggtggccacgctggaagagcggccctttgtcatcgtggagagccctgaccctggcacaggaggctgtgtccccaacaccgtgccctgccgcaggcagagcaaccacaccttcagcagcggggacgtggccccctacaccaagctctgctgtaagggattctgcatcgacatcctcaagaagctggccagagtggtcaaattctcctacgacctgtacctggtgaccaacggcaagcatggcaagcgggtgcgcggcgtatggaacggcatgattggggaggtgtactacaagcgggcagacatggccatcggctccctcaccatcaatgaggaacgctccgagatcgtagacttctctgtaccctttgtggagacgggcatcagtgtgatggtggctcgcagcaatggcaccgtctccccctcggccttcttggagccatatagccctgcagtgtgggtgatgatgtttgtcatgtgcctcactgtggtggccatcaccgtcttcatgttcgagtacttcagccctgtcagctacaaccagaacctcaccagaggcaagaagtccgggggcccagctttcactatcggcaagtccgtgtggctgctgtgggcgctggtcttcaacaactcagtgcccatcgagaacccgcggggcaccaccagcaagatcatggttctggtctgggccttctttgctgtcatcttcctcgccagctacacggccaacctggccgccttcatgatccaagagcaatacatcgacactgtgtcgggcctcagtgacaagaagtttcagcggcctcaagatcagtacccacctttccgcttcggcacggtgcccaacggcagcacggagcggaacatccgcagtaactaccgtgacatgcacacccacatggtcaagttcaaccagcgctcggtggaggacgcgctcaccagcctcaagatggggaagctggatgccttcatctatgatgctgctgtcctcaactacatggcaggcaaggacgagggctgcaagctggtcaccattgggtctggcaaggtctttgctaccactggctacggcatcgccatgcagaaggactcccactggaagcgggccatagacctggcgctcttgcagttcctgggggacggagagacacagaaactggagacagtgtggctctcagggatctgccagaatgagaagaacgaggtgatgagcagcaagctggacatcgacaacatggcaggcgtcttctacatgctgctggtggccatggggctggccctgctggtcttcgcctgggagcacctggtctactggaagctgcgccactcggtgcccaactcatcccagctggacttcctgctggctttcagcaggggcatctacagctgcttcagcggggtgcagagcctcgccagcccaccgcggcaggccagcccggacctcacggccagctcggcccaggccagcgtgctcaagatgctgcaggcagcccgcgacatggtgaccacggcgggcgtaagcagctccctggaccgcgccactcgcaccatcgagaattggggtggcggccgccgtgcgcccccaccgtccccctgcccgaccccgcggtctggccccagcccatgcctgcccacccccgacccgcccccagagccgagccccacgggctggggaccgccagacgggggtcgcgcggcgcttgtgcgcagggctccgcagcccccgggccgccccccgacgccggggccgcccctgtccgacgtctcccgagtgtcgcgccgcccagcctgggaggcgcggtggccggtgcggaccgggcactgcgggaggcacctctcggcctccgagcggcccctgtcgcccgcgcgctgtcactacagctcctttcctcgagccgaccgatccggccgccccttcctcccgctcttcccggagctggaggacctgccgctgctcggtccggagcagctggcccggcgggaggccctgctgcacgcggcctgggcccggggctcgcgcccgcgtcacgcttccctgcccagctccgtggccgaggccttcgctcggcccagctcgctgcccgctgggtgcaccggccccgcctgcgcccgccccgacggccactcggcctgcaggcgcttggcgcaggcgcagtcgatgtgcttgccgatctaccgggaggcctgccaggagggcgagcaggcaggggcccccgcctggcagcacagacagcacgtctgcctgcacgcccacgcccacctgccattttgctggggggctgtctgtcctcaccttccaccctgtgccagccacggctcctggctctccggggcctgggggcctctggggcacaggggcaggactctggggctgggcacaggctacagagacagtgggggactggacgagatcagcagggtagcccgtgggacgcaaggcttcccgggaccctgcacctggagacggatctccagtctggagtcagaagtgtgagttatcagccactcaggctccgagccagctggattctctgcctgccactgtcagggttaagcggcaggcaggattgggcttttctggcttctgccatgaaatcctggccatgggaccccagtgacagatgatgtcttccatggtcatcagtgacctcagtagcctcaaatcatggtgagggctgggcttttgctgtcctcttctcacgcagagttctgccaggagggtgtgctgtgggggtcagactcctgaggctctcccttccctggggctagccagttactggtcatggctgctgtgggcatggaggctggaacttgtggttgaggcagggccatcccgatccttgctctacctggctagagtttcttctcatcagagcactgggacattaaaccaaccttttacaaca

SEQ ID NO: 9005 - DNA, 6516 bp, Homo sapiens
  source 1..6516: mol_type = unassigned DNA; mol_type = unassigned DNA
ccttgagccgcgggtgacggtggctctcgctgctcgcgccccctcctcccgcggggggagcctgatgccacgttccctatgaattatttatcgccggcctaaaaataccccgaacttcacagcccgagtgaccctccggtggacatgggtggggccctggggccggccctgttgctcacctcgctcttcggtgcctgggcagggctgggtccggggcagggcgagcagggcatgacggtggccgtggtgtttagcagctcagggccgccccaggcccagttccgtgcccgcctcaccccccagagcttcctggacctacccctggagatccagccgctcacagttggggtcaacaccaccaaccccagcagcctcctcacccagatctgcggcctcctgggtgctgcccacgtccacggcattgtctttgaggacaacgtggacaccgaggcggtggcccagatccttgacttcatctcctcccagacccatgtgcccatcctcagcatcagcggaggctctgctgtggtcctcacccccaaggtgcatgtccaaactcatgtcccctcgtgcctcaggcctggaaccaggctggggtcgggggtgctttggttctgggaagctgggattagacgggatgggcagggaggtgggggctgagggcatgatgtgggtgatggggagatggttatgggaatgacatcccatgttctagaggagagatattctgggctgacctcacattgtgtctggatgaggggtgggcagggtgcaggcccaccctctggctgtggggctcaggccccagccctcctcctctctgcttccctcagcttcctaggtcagggtgaagacccagagggccagccgggcatggaggtggtgccatgccctctgggcagtggtagttgacctgtagggtgagcaccagggaaccctgggagccctgggggaggcagaaacggccctgcccttgcagggctcaggggagaacgttccaaacacacattcatcagcagttacaactaggacaagcgttctgaaggaaagacacaggatgctgtgagggagctcactcatggctcatgcatagggtgttggccagggaaagtctctggagaaatgatgtctaggctgagggcctaagggcgagccggtggggagggggagaggcccaggcagagaagcaggtgggatgaaggccccaaggcgaggaaggagctcagagctttggaggaatagagggaaaagcctggagaaggaggcgggggcctggccacctgggaagacatttgggcttttccctaagcaagtgagcagacagggcagcgcaagccggctgtgacagtggccgtggtctgtgcctgccttagccctgtgagcttcctggccctgcccctgttgatctagccactcagggaagagcggaggagagttgagggaagagactgatctgattcgcctttgtttcattaatttttatatgaagaattttgagtatacattaaaaagtataaggaagactcatatatcccccattcgccctggccatccaccccagcctcaccagcacccccttccccttcttctgtgttaatttgaatcaaagcccaggcatcctcttattccatccataaatatttcagtatgtatccctggcagataagggcttaagaacgtaaaaccaccatacattatcacgtctaaaaaataataaaaactccttcaaatatccaggcagtgttcaaatttccccattgtttcataactgtcataagtgtttattttgcagcctgtttgctcgaattaagagccaaatcgggtccacacgtgccggttggttggtgtggcttctgagtttctctcaacctctgggcccctcctctgtctgtctctcttttttccttgcaatttgtttattgaagaaactgcgttgcttggcctctgaattttcccttatttgcttttttaaaagattgggacagtggcagcagtgagaccagttacgaggggactgcgctggccccggtgccagccggcagtgccttgggtttttgtggtggcagaggggtggagaggaggagctttcccaccctcagggcttcaaccagggtggcgtttccccgtcctcttggggccccggcataagatctcaggacattggctctcaaccctcatcgtgctcttaggaaatacagacgcctggctttgcacctctggaattcagattcagttggtctggggcagcgcttctcagtctagcgggctcaaggatcggctgaagagcttgtgagaatacagatgccaggcggcatacccagcgactccgatccagtcggtgtggggtgcgacctgagaatctgcatttctgacaaactccccagtggtgctgatgctgcgggtctgcgggccagcgtggtgggctgggggccgggcatgaccatgctactaggcagcggggaaccacattggggcgggagggaggcgcaggccagagggctcccggaatgcggagcatccgccggcgcaagggcgcctgggagctgatggaggggccgaggtcggggaaggggcgggaggaggggctcggccctcccgccccgctcaggccccgcccgcccccaggagccgggctccgccttcctgcagctgggcgtgtccctggagcagcagctgcaggtgctgttcaaggtgctggaagagtacgactggagcgccttcgccgtcatcaccagcctgcacccgggccacgcgctcttcctggagggcgtgcgcgccgtcgccgacgccagccacgtgagttggcggctgctggacgtggtcacgctggagctgggcccgggagggccgcgcgcgcgcacgcagcgcctgctgcgccagctcgacgcgcccgtgtttgtggcctactgctcgcgcgaggaggccgaggtgctcttcgccgaggcggcgcaggccggtctggtggggcccggccacgtgtggctggtgcccaacctggcgctgggcagcaccgatgcgccccccgccaccttccccgtgggcctcatcagcgtcgtcaccgagagctggcgcctcagcctgcgccagaaggtgcgcgacggcgtggccattctggccctgggcgcccacagctactggcgccagcatggaaccctgccagccccggccggggactgccgtgttcaccctgggcccgtcagccctgcccgggaggccttctacaggtgggcacctgcccggggcataggggtagggaggtggggagcgcttcgggggagctggctggcagtgagtttgggctggccagccacacctcccactagctgcgtgcctggggccacattaccccacctgtctgggccttagtgtcctcatctgaacaaacagcaggtgtcagggtgtggcaaggatcgtggggccaatatagggaagcactttgaacaataaacacaatcaatgccacctgctgtcggtggcggcggtgaggcagaggcagggggtgcctggtccttggcagggctgcaggcatctctcccctctggcaggcacctactgaatgtcacctgggagggccgagacttctccttcagccctggtgggtacctggtccagcccaccatggtggtgatcgccctcaaccggcaccgcctctgggagatggtgagaagggggtgagcccaggggccctcagtgtcctcttattttgtccccgcctcctcttgtgcccacagctgagcagagagtccctctgtcccttatccaacccctcatcttccaggtctcagctgaaacaaacatctcctccactgggaagcctccaggtgccccggggtgggtgaggtgccctgctctgggctcccataacaccccggcttccctctactatagaacatttcaagcgctcctatctcctggtcctgcccctgcaggagtaacccatgaccatgctggccagacaggcttgtaaacaatatgcagggacaagtgcttgagtagacgtgtgcaaaagattgtgggattggagatgaggaacaggaattagttctgccttcaaaggaggaaactgggaaagaggtcccagaagatgggatatttgagctgggctgtggaggtttgagtaggagcccaccaggaagaggtgctagcctggaagagacagaggggcagaagggtttggagcatgaagggccttgagtgctcagctaaggacgttctgtcaaagtcaggggggaccagtacagtgagtgagacagggtcaggtctgggctttaggaagatgctgtgggtcagtgtggagctgtatgaacacagggacccgaggctgggggaggctgttgggagcagccctactctgacctgccccagcatccctaggtgagagagggagattcttggccctggcaggctccacctagagggtgggggctgtagggctggaggccccaggctgaggctgtcaccctccacaggtggggcgctgggagcatggcgtcctatacatgaagtaccccgtgtggcctcgctacagtgcctctctgcagcctgtggtggacagtcggcacctgacggtggccacgctggaagagcggccctttgtcatcgtggagagccctgaccctggcacaggaggctgtgtccccaacaccgtgccctgccgcaggcagagcaaccacaccttcagcagcggggacgtggccccctacaccaagctctgctgtaagggattctgcatcgacatcctcaagaagctggccagagtggtcaaattctcctacgacctgtacctggtgaccaacggcaagcatggcaagcgggtgcgcggcgtatggaacggcatgattggggaggtgtactacaagcgggcagacatggccatcggctccctcaccatcaatgaggaacgctccgagatcgtagacttctctgtaccctttgtggagacgggcatcagtgtgatggtggctcgcagcaatggcaccgtctccccctcggccttcttggagccatatagccctgcagtgtgggtgatgatgtttgtcatgtgcctcactgtggtggccatcaccgtcttcatgttcgagtacttcagccctgtcagctacaaccagaacctcaccagaggcaagaagtccgggggcccagctttcactatcggcaagtccgtgtggctgctgtgggcgctggtcttcaacaactcagtgcccatcgagaacccgcggggcaccaccagcaagatcatggttctggtctgggccttctttgctgtcatcttcctcgccagctacacggccaacctggccgccttcatgatccaagagcaatacatcgacactgtgtcgggcctcagtgacaagaaggttgtggggccatagctgctgggggtgggggggggcactgagggtggggacaggccgtgagtgggcaggccctggacagtcgagtctggggaatttgacctggaggctggggcaggaagaagcttcagggcctgctgagaaggggttgggggctggggcaagagatggctcagggccaccggctgagaggccttgggtaagtctctccctgtcttgggcctcagagtctccatttggaaaacacaggagtggcctggacagcctttaagaccttctgctctgactatgcaagtccacactggggctgggctctggggtgggtttggggctttggtgcctggaaggctggaggaagggttgtgactggctgctgccctccgcctgcagtttcagcggcctcaagatcagtacccacctttccgcttcggcacggtgcccaacggcagcacggagcggaacatccgcagtaactaccgtgacatgcacacccacatggtcaagttcaaccagcgctcggtggaggacgcgctcaccagcctcaagatggggaagctggatgccttcatctatgatgctgctgtcctcaactacatggcaggcaaggacgagggctgcaagctggtcaccattgggtctggcaaggtctttgctaccactggctacggcatcgccatgcagaaggactcccactggaagcgggccatagacctggcgctcttgcagttcctgggggacggagagacacagaaactggagacagtgtggctctcagggatctgccagaatgagaagaacgaggtgatgagcagcaagctggacatcgacaacatggcaggcgtcttctacatgctgctggtggccatggggctggccctgctggtcttcgcctgggagcacctggtctactggaagctgcgccactcggtgcccaactcatcccagctggacttcctgctggctttcagcaggggcatctacagctgcttcagcggggtgcagagcctcgccagcccaccgcggcaggccagcccggacctcacggccagctcggcccaggccagcgtgctcaagatgctgcaggcagcccgcgacatggtgaccacggcgggcgtaagcagctccctggaccgcgccactcgcaccatcgagaattggggtg

SEQ ID NO: 9006 - DNA, 2929 bp, Homo sapiens
  source 1..2929: mol_type = unassigned DNA; mol_type = unassigned DNA
cgcgggcagggcggggacacgcggagcaaaggcacccggcaacctgaacccccaggtgcgtcccgcgaccctgcaaggagctgctgggaccctccggtggacatgggtggggccctggggccggccctgttgctcacctcgctcttcggtgcctgggcagggctgggtccggggcagggcgagcagggcatgacggtggccgtggtgtttagcagctcagggccgccccaggcccagttccgtgcccgcctcaccccccagagcttcctggacctacccctggagatccagccgctcacagttggggtcaacaccaccaaccccagcagcctcctcacccagatctgcggcctcctgggtgctgcccacgtccacggcattgtctttgaggacaacgtggacaccgaggcggtggcccagatccttgacttcatctcctcccagacccatgtgcccatcctcagcatcagcggaggctctgctgtggtcctcacccccaaggagccgggctccgccttcctgcagctgggcgtgtccctggagcagcagctgcaggtgctgttcaaggtgctggaagagtacgactggagcgccttcgccgtcatcaccagcctgcacccgggccacgcgctcttcctggagggcgtgcgcgccgtcgccgacgccagccacgtgagttggcggctgctggacgtggtcacgctggagctgggcccgggagggccgcgcgcgcgcacgcagcgcctgctgcgccagctcgacgcgcccgtgtttgtggcctactgctcgcgcgaggaggccgaggtgctcttcgccgaggcggcgcaggccggtctggtggggcccggccacgtgtggctggtgcccaacctggcgctgggcagcaccgatgcgccccccgccaccttccccgtgggcctcatcagcgtcgtcaccgagagctggcgcctcagcctgcgccagaaggtgcgcgacggcgtggccattctggccctgggcgcccacagctactggcgccagcatggaaccctgccagccccggccggggactgccgtgttcaccctgggcccgtcagccctgcccgggaggccttctacaggcacctactgaatgtcacctgggagggccgagacttctccttcagccctggtgggtacctggtccagcccaccatggtggtgatcgccctcaaccggcaccgcctctgggagatggtggggcgctgggagcatggcgtcctatacatgaagtaccccgtgtggcctcgctacagtgcctctctgcagcctgtggtggacagtcggcacctgacggtggccacgctggaagagcggccctttgtcatcgtggagagccctgaccctggcacaggaggctgtgtccccaacaccgtgccctgccgcaggcagagcaaccacaccttcagcagcggggacgtggccccctacaccaagctctgctgtaagggattctgcatcgacatcctcaagaagctggccagagtggtcaaattctcctacgacctgtacctggtgaccaacggcaagcatggcaagcgggtgcgcggcgtatggaacggcatgattggggaggtgtactacaagcgggcagacatggccatcggctccctcaccatcaatgaggaacgctccgagatcgtagacttctctgtaccctttgtggagacgggcatcagtgtgatggtggctcgcagcaatggcaccgtctccccctcggccttcttggagccatatagccctgcagtgtgggtgatgatgtttgtcatgtgcctcactgtggtggccatcaccgtcttcatgttcgagtacttcagccctgtcagctacaaccagaacctcaccagaggcaagaagtccgggggcccagctttcactatcggcaagtccgtgtggctgctgtgggcgctggtcttcaacaactcagtgcccatcgagaacccgcggggcaccaccagcaagatcatggttctggtctgggccttctttgctgtcatcttcctcgccagctacacggccaacctggccgccttcatgatccaagagcaatacatcgacactgtgtcgggcctcagtgacaagaagtttcagcggcctcaagatcagtacccacctttccgcttcggcacggtgcccaacggcagcacggagcggaacatccgcagtaactaccgtgacatgcacacccacatggtcaagttcaaccagcgctcggtggaggacgcgctcaccagcctcaagatggggaagctggatgccttcatctatgatgctgctgtcctcaactacatggcaggcaaggacgagggctgcaagctggtcaccattgggtctggcaaggtctttgctaccactggctacggcatcgccatgcagaaggactcccactggaagcgggccatagacctggcgctcttgcagttcctgggggacggagagacacagaaactggagacagtgtggctctcagggatctgccagaatgagaagaacgaggtgatgagcagcaagctggacatcgacaacatggcaggcgtcttctacatgctgctggtggccatggggctggccctgctggtcttcgcctgggagcacctggtctactggaagctgcgccactcggtgcccaactcatcccagctggacttcctgctggctttcagcagggtgggtgcccacccctccccacacaggccaaagttttaagggcacctacccagataagtccgggctggccatggcccatttccagaggtaaaaccaaggttctggcccggctcatggctcacacctgtaatctcaacactttgagaggcttaggccagtggatcccttgagtccagaagtttgagaccagcctgggcaacatggcgaaaacccatctctacagaaaataaaagaattagctggg

SEQ ID NO: 9007 - DNA, 615 bp, Homo sapiens
  source 1..615: mol_type = unassigned DNA; mol_type = unassigned DNA
cgaggctctgggacagacaccgcgagggaggcggccggcgcgggctctcgtcgcgggcgcagcgccccttcccctcggagccgggctccgccttcctgcagctgggcgtgtccctggagcagcagctgcaggtgctgttcaaggtgctggaagagtacgactggagcgccttcgccgtcatcaccagcctgcacccgggccacgcgctcttcctggagggcgtgcgcgccgtcgccgacgccagccacgtgagttggcggctgctggacgtggtcacgctggagctgggcccgggagggccgcgcgcgcgcacgcagcgcctgctgcgccagctcgacgcgcccgtgtttgtggcctactgctcgcgcgaggaggccgaggtgctcttcgccgaggcggcgcaggccggtctggtggggcccggccacgtgtggctggtgcccaacctggcgctgggcagcaccgatgcgccccccgccaccttccccgtgggcctcatcagcgtcgtcaccgagagctggcgcctcagcctgcgccagaaggtgcgcgacggcgtggccattctggccctgggcgcccacagctactggcgccagcatggaaccctgccagccc

SEQ ID NO: 9008 - DNA, 1984 bp, Homo sapiens
  source 1..1984: mol_type = unassigned DNA; mol_type = unassigned DNA
gagtcccgcttcttccccttccagctctgccccatctcctttgccccagcctagctctctccttcctgcgacctgggagaatcggagtgggcttccagagtagtggcatcttgcagatgctggcccgtgcccggctcccgggcttccagagcgcaaagggaagggtaggcagagagggcactgggcgagcaagacctggcgctgggccctggctgcgcaccagccgcctgcgccggtctctgggggcttcgcccaggatccccgacggcggggaggggaagccccgagtctcctgtttcctgcctacgcgggcagggcggggacacgcggagcaaaggcacccggcaacctgaacccccaggtgcgtcccgcgaccctgcaaggagctgctgggaccctccggtggacatgggtggggccctggggccggccctgttgctcacctcgctcttcggtgcctgggcagggctgggtccggggcagggcgagcagggcatgacggtggccgtggtgtttagcagctcagggccgccccaggcccagttccgtgcccgcctcaccccccagagcttcctggacctacccctggagatccagccgctcacagttggggtcaacaccaccaaccccagcagcctcctcacccagatctgcggcctcctgggtgctgcccacgtccacggcattgtctttgaggacaacgtggacaccgaggcggtggcccagatccttgacttcatctcctcccagacccatgtgcccatcctcagcatcagcggaggctctgctgtggtcctcacccccaaggtgcatgtccaaactcatgtcccctcgtgcctcaggcctggaaccaggctggggtcgggggtgctttggttctgggaagctgggattagacgggatgggcagggaggtgggggctgagggcatgatgtgggtgatggggagatggttatgggaatgacatcccatgttctagaggagagatattctgggctgacctcacattgtgtctggatgaggggtgggcagggtgcaggcccaccctctggctgtggggctcaggccccagccctcctcctctctgcttccctcagcttcctaggtcagggtgaagacccagagggccagccgggcatggaggtggtgccatgccctctgggcagtggtagttgacctgtagggtgagcaccagggaaccctgggagccctgggggaggcagaaacggccctgcccttgcagggctcaggggagaacgttccaaacacacattcatcagcagttacaactaggacaagcgttctgaaggaaagacacaggatgctgtgagggagctcactcatggctcatgcatagggtgttggccagggaaagtctctggagaaatgatgtctaggctgagggcctaagggcgagccggtggggagggggagaggcccaggcagagaagcaggtgggatgaaggccccaaggcgaggaaggagctcagagctttggaggaatagagggaaaagcctggagaaggaggcgggggcctggccacctgggaagacatttgggcttttccctaagcaagtgagcagacagggcagcgcaagccggctgtgacagtggccgtggtctgtgcctgccttagccctgtgagcttcctggccctgcccctgttgatctagccactcagggaagagcggaggagagttgagggaagagactgatctgattcgcctttgtttcattaatttttatatgaagaattttgagtatacattaaaaagtataaggaagactcatatatcccccattcgccctggccatccaccccagcctcaccagcacccccttccccttcttctgtgttaatttgaatcaaagcccaggcatcctcttattccatccataaatatttcagtatgtatccctggcagataagggcttaagaacgtaaaaccaccatacattatcacgtctaaaaaataataaaaa

SEQ ID NO: 9009 - DNA, 5093 bp, Homo sapiens
  source 1..5093: mol_type = unassigned DNA; mol_type = unassigned DNA
ggacgccgggttccggtcctggcccccccgccatccccccaacagaacagggtcatgaaaagaggccgcccggcggggcccgcaggcgatgcgcggcgccggtggcccccgcggccctcggggccccgctaagatgctgctgctgctggcgctggcctgcgccagcccgttcccggaggaggcgccggggccgggcggggccggtgggcccggcggcggcctcggcggggcgcggccgctcaacgtggcgctcgtgttctcggggcccgcgtacgcggccgaggcggcacgcctgggcccggccgtggcggcggcggtgcgcagcccgggcctagacgtgcggcccgtggcgctggtgctcaacggctcggacccgcgcagcctcgtgctgcagctctgcgacctgctgtcggggttgcgcgtgcacggcgtggtcttcgaagacgactcgcgcgcgcccgccgtcgcgcccatcctcgacttcctgtcggcgcagacctcgctgcccatcgtggccgtgcacggcggcgccgcgctcgtgctcacgcccaaggagaagggctccaccttcctgcagctgggctcttccaccgagcaacagcttcaggtcatctttgaggtgctggaggagtatgactggacgtcctttgtagccgtgaccactcgtgcccctggccaccgggccttcctgtcctacattgaggtgctgactgacggtagtctggtgggctgggagcaccgcggagcgctgacgctggaccctggggcgggcgaggccgtgctcagtgcccagctccgcagtgtcagcgcgcagatccgcctgctcttctgcgcccgagaggaggccgagcccgtgttccgcgcagctgaggaggctggcctcactggatctggctacgtctggttcatggtggggccccagctggctggaggcgggggctctggggcccctggtgagccccctcttctgccaggaggcgcccccctgcctgccgggctgtttgcagtgcgctcggctggctggcgggatgacctggctcggcgagtggcagctggcgtggccgtagtggccagaggtgcccaggccctgctgcgtgattatggtttccttcctgagctcggccacgactgtcgcgcccagaaccgcacccaccgcggcgagagtctgcataggtacttcatgaacatcacgtgggataaccgggattactccttcaatgaggacggcttcctagtgaacccctccctggtggtcatctccctcaccagagacaggacgtgggaggtggtgggcagctgggagcagcagacgctccgcctcaagtacccgctgtggtcccgctatggtcgcttcctgcagccagtggacgacacgcagcacctcacggtggccacgctggaggaaaggccgtttgtcatcgtggagcctgcagaccctatcagcggcacctgcatccgagactccgtcccctgccggagccagctcaaccgaacccacagccctccaccggatgccccccgcccggaaaagcgctgctgcaagggtttctgcatcgacattctgaagcggctggcgcataccatcggcttcagctacgacctctacctggtcaccaatggcaagcacggaaagaagatcgatggcgtctggaacggcatgatcggggaggtgttctaccagcgcgcagacatggccatcggctccctcaccatcaacgaggagcgctccgagatcgtggacttctccgtccccttcgtggagaccggcatcagcgtcatggtggcgcgcagcaatggcacggtgtccccctcggccttcctcgagccctacagccccgccgtgtgggtgatgatgttcgtcatgtgcctcactgtggtcgccgtcactgttttcatcttcgagtacctcagtcctgttggttacaaccgcagcctggccacgggcaagcgccctggcggttcaaccttcaccattgggaaatccatctggctgctctgggccctggtgttcaataattcggtgcccgtggagaacccccggggaaccaccagcaaaatcatggtgctggtgtgggccttcttcgccgtcatcttcctcgccagctacacagccaacctggccgccttcatgatccaggaggagtacgtggatactgtgtctgggctcagtgaccgcaagttccagaggccccaggagcagtacccgcccctgaagtttgggaccgtgcccaacggctccacggagaagaacatccgcagcaactatcccgacatgcacagctacatggtgcgctacaaccagccccgcgtagaggaagcgctcactcagctcaaggcagggaagctggacgccttcatctacgatgctgcagtgctcaattacatggcccgcaaggacgagggctgcaagcttgtcaccatcggctccggcaaggtcttcgccacgacaggctatggcatcgccctgcacaagggctcccgctggaagcggcccatcgacctggcgttgctgcagttcctgggggatgatgagatcgagatgctggagcggctgtggctctctgggatctgccacaatgacaaaatcgaggtgatgagcagcaagctggacatcgacaacatggcgggcgtcttctacatgctcctggtggccatgggcctgtccctgctggtcttcgcctgggagcacctggtgtactggcgcctgcggcactgcctggggcccacccaccgcatggacttcctgctggccttctccaggggcatgtacagctgctgcagcgctgaggccgccccaccgcccgccaagcccccgccgccgccacagcccctgcccagccccgcgtaccccgcgccgcggccggctcccgggcccgcacctttcgtgccccgcgagcgcgcctcagtggaccgctggcgccggaccaagggcgcggggccgccggggggcgcgggcctggccgacggcttccaccgctactacggccccatcgagccgcagggcctaggcctcggcctgggcgaagcgcgcgcggcaccgcggggcgcagccgggcgcccgctgtccccgccggccgctcagcccccgcagaagccgccgccctcctatttcgccatcgtacgcgacaaggagccagccgagccccccgccggcgccttccccggcttcccgtcgccgcccgcgccccccgccgccgcggccaccgccgtcgggccgccactctgccgcttggccttcgaggacgagagcccgccggcgcccgcgcggtggccgcgctcggaccccgagagccaacccctgctggggccaggcgcgggcggcgcggggggcacggggggcgcaggcggaggagccccggccgctccgcccccgtgccgcgccgcgccgcccccgtgcccttacctcgatctcgagccgtcgccgtcggactcggaggactcggagagcctgggcggcgcgtcgctgggcggcctggagccctggtggttcgccgacttcccttacccgtatgccgagcgcctcgggccgccgcccggccgctactggtcggtcgacaagctcgggggctggcgcgccgggagctgggactacctgcccccgcgcagcggtccggccgcctggcactgtcggcactgcgccagcctggagctgctgccgccgccgcgccatctcagctgctcgcacgatggcctggacggcggctggtgggcgccaccgcctccaccctgggccgccgggcccctgccccgacgccgggcccgctgcgggtgcccgcggtcgcacccgcaccgcccgcgggcctcgcaccgcacgcccgccgccgccgcgccccaccaccacaggcaccggcgcgccgctgggggctgggacctcccgccgcccgcgcccacctcgcgctcgctcgaggacctcagctcgtgccctcgcgccgcccctgcgcgcaggcttaccgggccctcccgccacgctcgcaggtgtccgcacgccgcgcactgggggccgccgctgcccacagcttcccaccggagacaccggggcggggacctgggcacccgcaggggctcggcgcacttctctagcctcgagtccgaggtatgacgcggccccgggggccccaccgcccccttggtcagcgcaggccacggcccgagggggcgcccgcagtggacaggacccgcgtgggttgggaaggaaagcagtggaactggccggaccccgcctggagcagcgtcctgcgccccctggttctggaggaaccgcaagccggagaggatttggtccctcaactatcacccagcctgagaacgagggggcgggggccttggagcccaccggacttttttttaaacccgacaagggctttttaacgtcaccagatggggcgggaggtggggggttcacgccactcccgcgtcccacctccacgcccggggccgtggcccccacatcactgtgcagctccccggccccagccgcgcctccggggaagcccgtttttaacctttcatccattgggactcaaaactgtgagacgcgttcgccaaactgtgaccccagaccttggccccgccacacagaaacccctgacccagactgtgacatccgactcctaaaatggtcatccgactccagactgtgacccctgaccccaaactgtgacccgaaccccagactgtgccccgaccagactgtgacccttgacatcaaaccgtgacaccccctcctcctcttccaccctcggtcgcttttccctactctgacctaggacacgtccccaacggaagccccgccttcccttgcaccgcgatgaacccaacctccctgaagccaaaacttcccaccctgccgcacctccggaccaccccacttgccaccaagcacatcctctccaaatccaacccttatttgcgacccttcagtgatgacccagcagacctccaaaaagcctcctctgcccagatctccagccgggtctggggctgggttgcggaggggagggtctgggagtccacacttctccaccaacttcccttcccactctcttattccacattgcagtgtttggaataaaccatgtttttatgcctcctca

SEQ ID NO: 9010 - DNA, 4888 bp, Homo sapiens
  source 1..4888: mol_type = unassigned DNA; mol_type = unassigned DNA
ctgctgctgctgcagccaccagagcagagagccttgagtacactttgccacagaaagcagtgagcaagaatgatagctgtctcttttaaatgccgttgtcaaattctgaggcgacttactaaagatgagagtccctacactaaatccgccagccagacaaagccgcctgatggagcgttggctgtgaggagacagagcatcccagaggaattcaagggctccacagtcgtcgagctgatgaagaaggaaggcactaccctgggtctgacggtatcgggaggaattgataaggatggcaagccaagagtatctaatctgcggcaaggaggaattgctgctagaagtgaccagctggatgtgggtgactacatcaaagcagtgaatggaatcaacctggccaaattccgccatgacgagatcatcagcttgctgaagaatgtgggagaaagagtggttcttgaagtagagtacgagcttccaccggtctctgtgcaaggatcaagtgttattttccgaacagtggaggtcacattacataaagaaggcaatacctttggttttgtaattcgagggggagcacatgatgatagaaataaatctcgtccagttgtgataacatgtgttcgtcctggagggcctgctgacagagagggcacgatcaaacccggtgacaggttgctcagtgtggatggaattcggcttcttggaactacgcatgctgaagccatgagtattcttaaacaatgtggacaagaagcagcactgctgatagaatatgatgtctcagtaatggactctgtggcaacagcatccgggccactactagtcgaagttgccaaaactcctggtgccagccttggggttgccctaactacctcgatgtgctgtaacaaacaagtcattgtcatagacaaaatcaaatctgcaagtattgcagacagatgtggcgcattgcatgtgggagatcacatcctctccatcgatggaaccagcatggagtactgtacacttgcagaagcaacccagttcctggccaacaccactgaccaggtcaagcttgagatccttccccatcatcagacccggctggccctaaaggggcccgaccatgcagctttggtgtcttcatccttctctcctacctccatgagtgcatacagcctgagttccctgaacatggggactctacctcgaagcctctactccaccagcccacgtggaaccatgatgaggaggagactgaaaaagaaagacttcaaaagctcattgtccttagcctccagcacagtaggattggctgggcaggttgttcacacagaaaccacagaggttgtgctgacggcagatcctgtcacaggatttgggatccaactgcagggcagtgtgtttgccacagaaactctctcttctccacctctgatttcctatatcgaagctgacagcccagcagagagatgtggggtgctacagattggagacagagtgatggccatcaatggaattccaacagaagacagcaccttcgaagaagccagtcagctcctccgagactcttcaatcacgagcaaggtcacactggaaatcgagtttgatgttgcagagtctgtcatcccaagtagtggaacatttcatgtaaagctgcctaagaagcacaatgtggaacttggaataaccataagttcaccatccagtagaaaaccaggagaccccctcgtcatttcagatatcaagaaagggagtgtggcacacagaactgggaccctggaacttggggataaattgctcgcaatagataatatccggctggacaactgttccatggaagatgcagttcagatcctccagcaatgtgaagacctggtgaagctcaaaatccgcaaagatgaagataattcagatgagcaagaaagttccggagcaattatttacaccgtggagcttaaacgctacggggggccccttggcatcacaatttcaggaactgaagagccgtttgatcctataatcatttcaagcctcactaaagggggattagctgaaagaactggcgcaatccacataggagaccgaatcctagccatcaatagcagcagcttgaaagggaagcctctgagtgaagccatccatttgttacagatggcaggagagactgtcaccttgaaaattaagaaacagacagatgcccagtcagcatcgagccccaagaagttccctatttctagccatttgagtgacctgggggatgtggaggaggactcctcaccagcacagaagccaggcaagctctccgacatgtacccctccacggtgcccagtgtggacagtgctgtggattcatgggatgggtctgcaatagacaccagctatggaactcaaggcactagttttcaggcctcaggatacaatttcaacacctatgactggaggagtccaaaacagagaggcagcttgtccccagtcactaagcctcgaagccagacttacccagatgtggggctgagttatgaagactgggaccggtccacagccagtggttttgcaggggctgccgatagtgcagagacagaacaagaggagaacttctggtctcaagcgctggaggatttggaaacctgcggacagtcaggaattctgagagaactggaggagaaagctgacaggcgtgtgtctttgagaaacatgactctcttggcaacaatcatgtcggggagcacgatgagtttgaatcatgaggctccaacacctcgcagtcagctggggcgacaggccagcttccaggagcgcagcagctcgcggccgcactacagccaaacaactcggagcaacaccctgccttcagatgtgggtaggaagtcagtaaccctgagaaaaatgaaacaagaaataaaggagatcatgtctccaactcctgtggagctgcacaaggtgaccttgtacaaggactctgacatggaggactttgggttcagtgtagcagatggcttactggagaaaggagtgtatgtcaaaaatattcgcccagctgggccaggagatcttggtggcttaaagccctatgacaggctcttacaggtgaatcatgtccgaaccagagactttgactgctgccttgttgtgcccctcatagcagaatccgggaataagctggacctggttattagtagaaacccactggcttcacagaagtctatagaccaacagagtctaccaggagattggagtgaacagaacagtgcttttttccagcagcctagccacggtggtaatttggagacacgagaacccactaatacattatagcaacgctttttataaagcaggacaaaagacaatatctacatggtgctaaaaatcctttaagatttctgtgacctttgaagcacagataatcaatcaacgtggcattaactgcaagcacaggggtcttttaaatctctctcatggctcatgttcacttcccttttcaagttgaagaggtttcttttttggtgaccactatggtatatggtgggcaatgccctgccagtcccaacggtagagaaaaataggccgtcccccacaactctacaattaacatcagaggaaattttttacaagttcatcttactatcactttttaaaaagagaaacatctgtttgaaaatattctctgtgatgatttccttaattcactttgaaatcagtttcttactatgaagtcattaatgtaagaacttggccaacaaagcttttcttctcataggctggctctactaggggaactagtgtttggtaaactgctgggactaccacaatgggaggggtacaggtataaaattaagttatcttaaaatgtttcagcaatgatgcacgtaggagaccataataggtggtggtaaatgttttgcccacgtataggaatgattttaactaagatgtatgctattccctatgcaacaaattatcaaacaggatatgtcttgtgacctgttttttttttaaggacacatttttaatagctgaaaatctctgataatgaattagagtgtgtagtaaacatgagaattagttatattatcttatttttaaaattcaagactaagaacttcagagaatgaagagtctattaaaatgaggttcatcttaatgataggcaaaccaaactcatactgcttgacatgttttgaaaactggtaatattgagggtgtacagcacatgtacttaaaaatgacactggactatcttttgctctgagccatgccacttaccgaaattgtaaatacatttttcacaaatgcattgccaattattaccatccctcaaagcaataaattgtgacagttgctttaaatgtttgtcagcaactgttttcatttgttcagatattttgaatagctacactaataactgttattatttggtgaacataaaaaaataaatagatctgtatattgatggtagactctccatattgaaatgattattttccaaacattttcattttggtcaataattcaaactaccacttaggcaaagtattcgaacactgtgtcctttgtttaaggaaatataaaaaaaaaatcacctttctttttgtgcaaaaaaaatattatttcaatcacatttcagaaccgccagggcaagaaagtataaagcaggatcatgttaagaaaaaagaaaaaaagatcatgagtcacttaaatatgtatttttatttgtaacaaacaagtattaaactgtaaagtatttttgtacaaatttaatactttaatagcatggtatttatcgtctatgtatggttttggggaattcaaaattgttcaaatatttgtatggaaaaaaataaaaccctctaccaaatggaataaacagtgattttaaaaagccaaataaagaggatatgcatta

SEQ ID NO: 9011 - DNA, 2980 bp, Homo sapiens
  source 1..2980: mol_type = unassigned DNA; mol_type = unassigned DNA
gtcctggagggcctgctgacagagagggcacgatcaaacccggtgacaggttgctcagtgtggatggaattcggcttcttggaactacgcatgctgaagccatgagtattcttaaacaatgtggacaagaagcagcactgctgatagaatatgatgtctcagtaatggactctgtggcaacagcatccgggccactactagtcgaagttgccaaaactcctggtgccagccttggggttgccctaactacctcgatgtgctgtaacaaacaagtcattgtcatagacaaaatcaaatctgcaagtattgcagacagatgtggcgcattgcatgtgggagatcacatcctctccatcgatggaaccagcatggagtactgtacacttgcagaagcaacccagttcctggccaacaccactgaccaggtcaagcttgagatccttccccatcatcagacccggctggccctaaaggggcccgaccatgtgaaaattcagaggagcgacaggcaacttacctgggattcctgggccagcaaccacagcagccttcacaccaaccatcactataacacgtaccaccctgaccattgcagagtaccagccctgacattcccgaaagcacctcctccaaacagccctccagctttggtgtcttcatccttctctcctacctccatgagtgcatacagcctgagttccctgaacatggggactctacctcgaagcctctactccaccagcccacgtggaaccatgatgaggaggagactgaaaaagaaagacttcaaaagctcattgtccttagcctccagcacagtaggattggctgggcaggttgttcacacagaaaccacagaggttgtgctgacggcagatcctgtcacaggatttgggatccaactgcagggcagtgtgtttgccacagaaactctctcttctccacctctgatttcctatatcgaagctgacagcccagcagagagatgtggggtgctacagattggagacagagtgatggccatcaatggaattccaacagaagacagcaccttcgaagaagccagtcagctcctccgagactcttcaatcacgagcaaggtcacactggaaatcgagtttgatgttgcagagtctgtcatcccaagtagtggaacatttcatgtaaagctgcctaagaagcacaatgtggaacttggaataaccataagttcaccatccagtagaaaaccaggagaccccctcgtcatttcagatatcaagaaagggagtgtggcacacagaactgggaccctggaacttggggataaattgctcgcaatagataatatccggctggacaactgttccatggaagatgcagttcagatcctccagcaatgtgaagacctggtgaagctcaaaatccgcaaagatgaagataattcagatgagcaagaaagttccggagcaattatttacaccgtggagcttaaacgctacggggggccccttggcatcacaatttcaggaactgaagagccgtttgatcctataatcatttcaagcctcactaaagggggattagctgaaagaactggcgcaatccacataggagaccgaatcctagccatcaatagcagcagcttgaaagggaagcctctgagtgaagccatccatttgttacagatggcaggagagactgtcaccttgaaaattaagaaacagacagatgcccagtcagcatcgagccccaagaagttccctatttctagccatttgagtgacctgggggatgtggaggaggactcctcaccagcacagaagccaggcaagctctccgacatgtacccctccacggtgcccagtgtggacagtgctgtggattcatgggatgggtctgcaatagacaccagctatggaactcaaggcactagttttcaggcctcaggatacaatttcaacacctatgactggaggagtccaaaacagagaggcagcttgtccccagtcactaagcctcgaagccagacttacccagatgtggggctgagttatgaagactgggaccggtccacagccagtggttttgcaggggctgccgatagtgcagagacagaacaagaggagaacttctggtctcaagcgctggaggatttggaaacctgcggacagtcaggaattctgagagaactggaggcaacaatcatgtcggggagcacgatgagtttgaatcatgaggctccaacacctcgcagtcagctggggcgacaggccagcttccaggagcgcagcagctcgcggccgcactacagccaaacaactcggagcaacaccctgccttcagatgtgggtaggaagtcagtaaccctgagaaaaatgaaacaagaaataaaggagatcatgtctccaactcctgtggagctgcacaaggtgaccttgtacaaggactctgacatggaggactttgggttcagtgtagcagatggcttactggagaaaggagtgtatgtcaaaaatattcgcccagctgggccaggagatcttggtggcttaaagccctatgacaggctcttacaggtgaatcatgtccgaaccagagactttgactgctgccttgttgtgcccctcatagcagaatccgggaataagctggacctggttattagtagaaacccactggcttcacagaagtctatagaccaacagagtctaccaggagattggagtgaacagaacagtgcttttttccagcagcctagccacggtggtaatttggagacacgagaacccactaatacattatagcaacgctttttataaagcaggacaaaagacaatatctacatggtgctaaaaatcctttaagatttctgtgacctttgaagcacagataatcaatcaacgtggcattaactgcaagcacaggggtcttttaaatctctctcatggctcatgttcacttcccttttcaagttgaagaggtttcttttttggtgacc

SEQ ID NO: 9012 - DNA, 757 bp, Homo sapiens
  source 1..757: mol_type = unassigned DNA; mol_type = unassigned DNA
cttgaagtagagtacgagcttccaccggtctctgtgcaaggatcaagtgttattttccgaacagtggaggtcacattacataaagaaggcaatacctttggttttgtaattcgagggggagcacatgatgatagaaataaatctcgtccagttgtgataacatgtgttcgtcctggagggcctgctgacagagagggcacgatcaaacccggtgacaggttgctcagtgtggatggaattcggcttcttggaactacgcatgctgaagccatgagtattcttaaacaatgtggacaagaagcagcactgctgatagaatatgatgtctcagtaatgggtgaatcatgtccgaaccagagactttgactgctgccttgttgtgcccctcatagcagaatccgggaataagctggacctggttattagtagaaacccactggcttcacagaagtctatagaccaacagagtctaccaggagattggagtgaacagaacagtgcttttttccagcagcctagccacggtggtaatttggagacacgagaacccactaatacattatagcaacgctttttataaagcaggacaaaagacaatatctacatggtgctaaaaatcctttaagatttctgtgacctttgaagcacagataatcaatcaacgtggcattaactgcaagcacaggggtcttttaaatctctctcatggctcatgttcacttcccttttcaagttgaagaggtttcttttttggtga

SEQ ID NO: 9013 - DNA, 3410 bp, Homo sapiens
  source 1..3410: mol_type = unassigned DNA; mol_type = unassigned DNA
gtgattgtgaagggggaggaggctgtggcaggcaggggtggtagtagtagtgaatgacacagatttgccagatgacatgtagcggacctctgcatcagccaagaggaattaagctttgtcactccccactgggactacctttctcctggtatgtgcgcaaggaattcatatgctgctgctgctgcagccaccagagcagagagccttgagtacactttgccacagaaagcagtgagcaagaatgatagctgtctcttttaaatgccgttgtcaaattctgaggcgacttactaaagatgagagtccctacactaaatccgccagccagacaaagccgcctgatggagcgttggctgtgaggagacagagcatcccagaggaattcaagggctccacagtcgtcgagctgatgaagaaggaaggcactaccctgggtctgacggtatcgggaggaattgataaggatggcaagccaagagtatctaatctgcggcaaggaggaattgctgctagaagtgaccagctggatgtgggtgactacatcaaagcagtgaatggaatcaacctggccaaattccgccatgacgagatcatcagcttgctgaagaatgtgggagaaagagtggttcttgaagtagagtacgagcttccaccggtctctgtgcaaggatcaagtgttattttccgaacagtggaggtcacattacataaagaaggcaatacctttggttttgtaattcgagggggagcacatgatgatagaaataaatctcgtccagttgtgataacatgtgttcgtcctggagggcctgctgacagagagggcacgatcaaacccggtgacaggttgctcagtgtggatggaattcggcttcttggaactacgcatgctgaagccatgagtattcttaaacaatgtggacaagaagcagcactgctgatagaatatgatgtctcagtaatggactctgtggcaacagcatccgggccactactagtcgaagttgccaaaactcctggtgccagccttggggttgccctaactacctcgatgtgctgtaacaaacaagtcattgtcatagacaaaatcaaatctgcaagtattgcagacagatgtggcgcattgcatgtgggagatcacatcctctccatcgatggaaccagcatggagtactgtacacttgcagaagcaacccagttcctggccaacaccactgaccaggtcaagcttgagatccttccccatcatcagacccggctggccctaaaggggcccgaccatgcagctttggtgtcttcatccttctctcctacctccatgagtgcatacagcctgagttccctgaacatggggactctacctcgaagcctctactccaccagcccacgtggaaccatgatgaggaggagactgaaaaagaaagacttcaaaagctcattgtccttagcctccagcacagtaggattggctgggcaggttgttcacacagaaaccacagaggttgtgctgacggcagatcctgtcacaggatttgggatccaactgcagggcagtgtgtttgccacagaaactctctcttctccacctctgatttcctatatcgaagctgacagcccagcagagagatgtggggtgctacagattggagacagagtgatggccatcaatggaattccaacagaagacagcaccttcgaagaagccagtcagctcctccgagactcttcaatcacgagcaaggtcacactggaaatcgagtttgatgttgcagagtctgtcatcccaagtagtggaacatttcatgtaaagctgcctaagaagcacaatgtggaacttggaataaccataagttcaccatccagtagaaaaccaggagaccccctcgtcatttcagatatcaagaaagggagtgtggcacacagaactgggaccctggaacttggggataaattgctcgcaatagataatatccggctggacaactgttccatggaagatgcagttcagatcctccagcaatgtgaagacctggtgaagctcaaaatccgcaaagatgaagataattcagatgagcaagaaagttccggagcaattatttacaccgtggagcttaaacgctacggggggccccttggcatcacaatttcaggaactgaagagccgtttgatcctataatcatttcaagcctcactaaagggggattagctgaaagaactggcgcaatccacataggagaccgaatcctagccatcaatagcagcagcttgaaagggaagcctctgagtgaagccatccatttgttacagatggcaggagagactgtcaccttgaaaattaagaaacagacagatgcccagtcagcatcgagccccaagaagttccctatttctagccatttgagtgacctgggggatgtggaggaggactcctcaccagcacagaagccaggcaagctctccgacatgtacccctccacggtgcccagtgtggacagtgctgtggattcatgggatgggtctgcaatagacaccagctatggaactcaaggcactagttttcaggcctcaggatacaatttcaacacctatgactggaggagtccaaaacagagaggcagcttgtccccagtcactaagcctcgaagccagacttacccagatgtggggctgagttatgaagactgggaccggtccacagccagtggttttgcaggggctgccgatagtgcagagacagaacaagaggagaacttctggtctcaagcgctggaggatttggaaacctgcggacagtcaggaattctgagagaactggaggcaacaatcatgtcggggagcacgatgagtttgaatcatgaggctccaacacctcgcagtcagctggggcgacaggccagcttccaggagcgcagcagctcgcggccgcactacagccaaacaactcggagcaacaccctgccttcagatgtgggtaggaagtcagtaaccctgagaaaaatgaaacaagaaataaaggagatcatgtctccaactcctgtggagctgcacaaggtgaccttgtacaaggactctgacatggaggactttgggttcagtgtagcagatggcttactggagaaaggagtgtatgtcaaaaatattcgcccagctgggccaggagatcttggtggcttaaagccctatgacaggctcttacaggtgaatcatgtccgaaccagagactttgactgctgccttgttgtgcccctcatagcagaatccgggaataagctggacctggttattagtagaaacccactggcttcacagaagtctatagaccaacagagtctaccaggagattggagtgaacagaacagtgcttttttccagcagcctagccacggtggtaatttggagacacgagaac

SEQ ID NO: 9014 - DNA, 863 bp, Homo sapiens
  source 1..863: mol_type = unassigned DNA; mol_type = unassigned DNA
ggtgtccattgagaagttcttaattcgtttctgtaagatatattcaaggtggcctcatgaatcccatctgttagagcccactgagtggaaagtgaatgcttaaaatgtagtttacagtaagcaaatgttagagcatttcaatttgcctcaaaactgccaggggtggtatttgattaaataaactcaatggcttaagtacttaaattggatttgagatgtgcattataaatgtcacttgcaaagcattttccagactttcatagttcaattagtacatccattttccagcctttggttttgccctgaagagactgtatttttacctcgcagaaggagaaatgtgcttactgttgagcaccaaatcctttccttagtccatggcttaattgtttctaaaaattgtcaatgccacaggcaacaatcatgtcggggagcacgatgagtttgaatcatgaggctccaacacctcgcagtcagctggggcgacaggccagcttccaggagcgcagcagctcgcggccgcactacagccaaacaactcggagcaacaccctgccttcagatgtgggtaggaagtcagtaaccctgagaaaaatgaaacaagaaataaaggagatcatgtctccaactcctgtggagctgcacaaggtgaccttgtacaaggactctgacatggaggactttgggttcagtgtagcagatggcttactggagaaaggagtgtatgtcaaaaatattcgcccagctgggccaggagatcttggtggcttaaagccctatgacaggctcttacaggtgaatcatgtccgaaccagagactttgactgctgccttgttgtgcccctcatagcagaatccgggaa

SEQ ID NO: 9015 - DNA, 2843 bp, Homo sapiens
  source 1..2843: mol_type = unassigned DNA; mol_type = unassigned DNA
agaagaggattaccacgagggctatgaggatgtctattattacgcttcagagcattttcgaagtaagcgcttctctccatcctccggttccttctcgcatgctggggctaacaataaaccttgtgtggagccttaatcttaaatgcaaaaggtttctcagatggtgttctctgtgagcagtctaggaattcaagggctccacagtcgtcgagctgatgaagaaggaaggcactaccctgggtctgacggtatcgggaggaattgataaggatggcaagccaagagtatctaatctgcggcaaggaggaattgctgctagaagtgaccagctggatgtgggtgactacatcaaagcagtgaatggaatcaacctggccaaattccgccatgacgagatcatcagcttgctgaagaatgtgggagaaagagtggttcttgaagtagagtacgagcttccaccggtctctgtgcaaggatcaagtgttattttccgaacagtggaggtcacattacataaagaaggcaatacctttggttttgtaattcgagggggagcacatgatgatagaaataaatctcgtccagttgtgataacatgtgttcgtcctggagggcctgctgacagagagggcacgatcaaacccggtgacaggttgctcagtgtggatggaattcggcttcttggaactacgcatgctgaagccatgagtattcttaaacaatgtggacaagaagcagcactgctgatagaatatgatgtctcagtaatggactctgtggcaacagcatccgggccactactagtcgaagttgccaaaactcctggtgccagccttggggttgccctaactacctcgatgtgctgtaacaaacaagtcattgtcatagacaaaatcaaatctgcaagtattgcagacagatgtggcgcattgcatgtgggagatcacatcctctccatcgatggaaccagcatggagtactgtacacttgcagaagcaacccagttcctggccaacaccactgaccaggtcaagcttgagatccttccccatcatcagacccggctggccctaaaggggcccgaccatgcagctttggtgtcttcatccttctctcctacctccatgagtgcatacagcctgagttccctgaacatggggactctacctcgaagcctctactccaccagcccacgtggaaccatgatgaggaggagactgaaaaagaaagacttcaaaagctcattgtccttagcctccagcacagtaggattggctgggcaggttgttcacacagaaaccacagaggttgtgctgacggcagatcctgtcacaggatttgggatccaactgcagggcagtgtgtttgccacagaaactctctcttctccacctctgatttcctatatcgaagctgacagcccagcagagagatgtggggtgctacagattggagacagagtgatggccatcaatggaattccaacagaagacagcaccttcgaagaagccagtcagctcctccgagactcttcaatcacgagcaaggtcacactggaaatcgagtttgatgttgcagagtctgtcatcccaagtagtggaacatttcatgtaaagctgcctaagaagcacaatgtggaacttggaataaccataagttcaccatccagtagaaaaccaggagaccccctcgtcatttcagatatcaagaaagggagtgtggcacacagaactgggaccctggaacttggggataaattgctcgcaatagataatatccggctggacaactgttccatggaagatgcagttcagatcctccagcaatgtgaagacctggtgaagctcaaaatccgcaaagatgaagataattcagatgagcaagaaagttccggagcaattatttacaccgtggagcttaaacgctacggggggccccttggcatcacaatttcaggaactgaagagccgtttgatcctataatcatttcaagcctcactaaagggggattagctgaaagaactggcgcaatccacataggagaccgaatcctagccatcaatagcagcagcttgaaagggaagcctctgagtgaagccatccatttgttacagatggcaggagagactgtcaccttgaaaattaagaaacagacagatgcccagtcagcatcgagccccaagaagttccctatttctagccatttgagtgacctgggggatgtggaggaggactcctcaccagcacagaagccaggcaagctctccgacatgtacccctccacggtgcccagtgtggacagtgctgtggattcatgggatgggtctgcaatagacaccagctatggaactcaaggcactagttttcaggcctcaggatacaatttcaacacctatgactggaggagtccaaaacagagaggcagcttgtccccagtcactaagcctcgaagccagacttacccagatgtggggctgagttatgaagactgggaccggtccacagccagtggttttgcaggggctgccgatagtgcagagacagaacaagaggagaacttctggtctcaagcgctggaggatttggaaacctgcggacagtcaggaattctgagagaactggaggagaaagctgacaggcgtgtgtctttgagaaacatgactctcttggcaacaatcatgtcggggagcacgatgagtttgaatcatgaggctccaacacctcgcagtcagctggggcgacaggccagcttccaggagcgcagcagctcgcggccgcactacagccaaacaactcggagcaacaccctgccttcagatgtgggtaggaagtcagtaaccctg

SEQ ID NO: 9016 - DNA, 2491 bp, Homo sapiens
  source 1..2491: mol_type = unassigned DNA; mol_type = unassigned DNA
taaagtgatagtgcagaaagaagactggatgtggaatgagaactgaagttagagttttaagtcctcacaaaaggatttgcctgatacctgtccttagaggaattcaagggctccacagtcgtcgagctgatgaagaaggaaggcactaccctgggtctgacggtatcgggaggaattgataaggatggcaagccaagagtatctaatctgcggcaaggaggaattgctgctagaagtgaccagctggatgtgggtgactacatcaaagcagtgaatggaatcaacctggccaaattccgccatgacgagatcatcagcttgctgaagaatgtgggagaaagagtggttcttgaagtagagtacgagcttccaccggtctctgtgcaaggatcaagtgttattttccgaacagtggaggtcacattacataaagaaggcaatacctttggttttgtaattcgagggggagcacatgatgatagaaataaatctcgtccagttgtgataacatgtgttcgtcctggagggcctgctgacagagagggcacgatcaaacccggtgacaggttgctcagtgtggatggaattcggcttcttggaactacgcatgctgaagccatgagtattcttaaacaatgtggacaagaagcagcactgctgatagaatatgatgtctcagtaatggactctgtggcaacagcatccgggccactactagtcgaagttgccaaaactcctggtgccagccttggggttgccctaactacctcgatgtgctgtaacaaacaagtcattgtcatagacaaaatcaaatctgcaagtattgcagacagatgtggcgcattgcatgtgggagatcacatcctctccatcgatggaaccagcatggagtactgtacacttgcagaagcaacccagttcctggccaacaccactgaccaggtcaagcttgagatccttccccatcatcagacccggctggccctaaaggggcccgaccatgtgtccttagcctccagcacagtaggattggctgggcaggttgttcacacagaaaccacagaggttgtgctgacggcagatcctgtcacaggatttgggatccaactgcagggcagtgtgtttgccacagaaactctctcttctccacctctgatttcctatatcgaagctgacagcccagcagagagatgtggggtgctacagattggagacagagtgatggccatcaatggaattccaacagaagacagcaccttcgaagaagccagtcagctcctccgagactcttcaatcacgagcaaggtcacactggaaatcgagtttgatgttgcagagtctgtcatcccaagtagtggaacatttcatgtaaagctgcctaagaagcacaatgtggaacttggaataaccataagttcaccatccagtagaaaaccaggagaccccctcgtcatttcagatatcaagaaagggagtgtggcacacagaactgggaccctggaacttggggataaattgctcgcaatagataatatccggctggacaactgttccatggaagatgcagttcagatcctccagcaatgtgaagacctggtgaagctcaaaatccgcaaagatgaagataattcagatgagcaagaaagttccggagcaattatttacaccgtggagcttaaacgctacggggggccccttggcatcacaatttcaggaactgaagagccgtttgatcctataatcatttcaagcctcactaaagggggattagctgaaagaactggcgcaatccacataggagaccgaatcctagccatcaatagcagcagcttgaaagggaagcctctgagtgaagccatccatttgttacagatggcaggagagactgtcaccttgaaaattaagaaacagacagatgcccagtcagcatcgagccccaagaagttccctatttctagccatttgagtgacctgggggatgtggaggaggactcctcaccagcacagaagccaggcaagctctccgacatgtacccctccacggtgcccagtgtggacagtgctgtggattcatgggatgggtctgcaatagacaccagctatggaactcaaggcactagttttcaggcctcaggatacaatttcaacacctatgactggaggagtccaaaacagagaggcagcttgtccccagtcactaagcctcgaagccagacttacccagatgtggggctgagttatgaagactgggaccggtccacagccagtggttttgcaggggctgccgatagtgcagagacagaacaagaggagaacttctggtctcaagcgctggaggatttggaaacctgcggacagtcaggaattctgagagaactggaggcaacaatcatgtcggggagcacgatgagtttgaatcatgaggctccaacacctcgcagtcagctggggcgacaggccagcttccaggagcgcagcagctcgcggccgc

SEQ ID NO: 9017 - DNA, 558 bp, Homo sapiens
  source 1..558: mol_type = unassigned DNA; mol_type = unassigned DNA
gatacttaaactcctttcctgtctataaagcccagtcagcatcgagccccaagaagttccctatttctagccatttgagtgacctgggggatgtggaggaggactcctcaccagcacagaagccaggcaagctctccgacatgtacccctccacggtgcccagtgtggacagtgctgtggattcatgggatgggtctgcaatagacaccagctatggaactcaaggcactagttttcaggcctcaggatacaatttcaacacctatgactggaggagtccaaaacagagaggcagcttgtccccagtcactaagcctcgaagccagacttacccagatgtggggctgagttatgaagactgggaccggtccacagccagtggttttgcaggggctgccgatagtgcagagacagaacaagaggagaacttctggtctcaagcgctggaggatttggaaacctgcggacagtcaggaattctgagagaactggaggcaacaatcatgtcggggagcacgatgagtttgaatcatgaggctccaacacctcgcagtcagc

SEQ ID NO: 9018 - DNA, 200 bp, Homo sapiens
  source 1..200: mol_type = unassigned DNA; mol_type = unassigned DNA
ctctttcaatgatatgaagttaaaaccagaactgggaccctggaacttggggataaattgctcgcaatagataatatccggctggacaactgttccatggaagatgcagttcagatcctccagcaatgtgaagacctggtgaagctcaaaatccgcaaagatgaagataattcagatgagcaagaaagttccggagcaat

SEQ ID NO: 9019 - DNA, 848 bp, Homo sapiens
  source 1..848: mol_type = unassigned DNA
tgtgataacatgtgttcgtcctggagggcctgctgacagagagggcacgatcaaacccggtgacaggttgctcagtgtggatggaattcggcttcttggaactacgcatgctgaagccatgagtattcttaaacaatgtggacaagaagcagcactgctgatagaatatgatgtctcagtaatggactctgtggcaacagcatccgggccactactagtcgaagttgccaaaactcctggtgccagccttggggttgccctaactacctcgatgtgctgtaacaaacaagtcattgtcatagacaaaatcaaatctgcaagtattgcagacagatgtggcgcattgcatgtgggagatcacatcctctccatcgatggaaccagcatggagtactgtacacttgcagaagcaacccagttcctggccaacaccactgaccaggtcaagcttgagatccttccccatcatcagacccggctggccctaaaggggcccgaccatgctttggtgtcttcatccttctctcctacctccatgagtgcatacagcctgagttccctgaacatggggactctacctcgaagcctctactccaccagcccacgtggaaccatgatgaggaggagactgaaaaagaaagacttcaaaagctcattgtccttagcctccagcacagtaggattggctgggcaggttgttcacacagaaaccacagaggttgtgctgacggcagatcctgtcacaggatttgggatccaactgcagggcagtgtgtttgccacagaaactctctcttctccacctctgatttcctatatcgaagctgacagcccagcagagagatgtg

SEQ ID NO: 9020 - DNA, 573 bp, Homo sapiens
  source 1..573: mol_type = unassigned DNA
actctgtggcaacagcatccgggccactactagtcgaagttgccaaaactcctggtgccagccttggggttgccctaactacctcgatgtgctgtaacaaacaagtcattgtcatagacaaaatcaaatctgcaagtattgcagacagtgaaaattcagaggagcgacaggcaacttacctgggattcctgggccagcaaccacagcagccttcacaccaaccatcactataacacgtaccaccctgaccattgcagagtaccagccctgacattcccgaaagcacctcctccaaacagccctccagctttggtgtcttcatccttctctcctacctccatgagtgcatacagcctgagttccctgaacatggggactctacctcgaagcctctactccaccagcccacgtggaaccatgatgaggaggagactgaaaaagaaagacttcaaaagctcattgtccttagcctccagcacagtaggattggctgggcaggttgttcacacagaaaccacagaggttgtgctgacggcagatcctgtcacaggatttgggatccaactgcagggc

SEQ ID NO: 9021 - DNA, 662 bp, Homo sapiens
  source 1..662: mol_type = unassigned DNA
acactttgccacagaaagcagtgagcaagaatgatagctgtctcttttaaatgccgttgtcaaattctgaggcgacttactaaagaggaattcaagggctccacagtcgtcgagctgatgaagaaggaaggcactaccctgggtctgacggtatcgggaggaattgataaggatggcaagccaagagtatctaatctgcggcaaggaggaattgctgctagaagtgaccagctggatgtgggtgactacatcaaagcagtgaatggaatcaacctggccaaattccgccatgacgagatcatcagcttgctgaagaatgtgggagaaagagtggttcttgaagtagagtacgagcttccaccggtctctgtgcaaggatcaagtgttattttccgaacagtggaggtcacattacataaagaaggcaatacctttggttttgtaattcgagggggagcacatgatgatagaaataaatctcgtccagttgtgataacatgtgttcgtcctggagggcctgctgacagagagggcacgatcaaacccggtgacaggttgctcagtgtggatggaattcggcttcttggaactacgcatgctgaagccatgagtattcttaaacaatgtggacaagaagcagcactgctgatagaatatgatgt

SEQ ID NO: 9022 - DNA, 592 bp, Homo sapiens
  source 1..592: mol_type = unassigned DNA
atgtccacctaaatttcaaagggctgaaaaaatgagagtccctacactaaatccgccagccagacaaagccgcctgatggagcgttggctgtgaggagacagagcatcccagaggaattcaagggctccacagtcgtcgagctgatgaagaaggaaggcactaccctgggtctgacggtatcgggaggaattgataaggatggcaagccaagagtatctaatctgcggcaaggaggaattgctgctagaagtgaccagctggatgtgggtgactacatcaaagcagtgaatggaatcaacctggccaaattccgccatgacgagatcatcagcttgctgaagaatgtgggagaaagagtggttcttgaagtagagtacgagcttccaccggtctctgtgcaaggatcaagtgttattttccgaacagtggaggtcacattacataaagaaggcaatacctttggttttgtaattcgagggggagcacatgatgatagaaataaatctcgtccagttgtgataacatgtgttcgtcctggagggcctgctgacagagagggcacgatcaaacccggtgacaggttgctcagtg

SEQ ID NO: 9023 - DNA, 524 bp, Homo sapiens
  source 1..524: mol_type = unassigned DNA
aatcttaaatgcaaaaggtttctcagatggtgttctctgtgagcagtctatgagagtccctacactaaatccgccagccagacaaagccgcctgatggagcgttggctgtgaggagacagagcatcccagaggaattcaagggctccacagtcgtcgagctgatgaagaaggaaggcactaccctgggtctgacggtatcgggaggaattgataaggatggcaagccaagagtatctaatctgcggcaaggaggaattgctgctagaagtgaccagctggatgtgggtgactacatcaaagcagtgaatggaatcaacctggccaaattccgccatgacgagatcatcagcttgctgaagaatgtgggagaaagagtggttcttgaagtagagtacgagcttccaccggtctctgtgcaaggatcaagtgttattttccgaacagtggaggtcacattacataaagaaggcaatacctttggttttgtaattcgagggggagcacatgatgatagaaataaatc

SEQ ID NO: 9024 - DNA, 567 bp, Homo sapiens
  source 1..567: mol_type = unassigned DNA
gatggaccgcttcctgggttttgtcaaggcgataagaagatctaggagaagaaaggggaaaaagtaccgaccagaagaggattaccacgagggctatgaggatgtctattattacgcttcagagcattttcgaaatgagagtccctacactaaatccgccagccagacaaagccgcctgatggagcgttggctgtgaggagacagagcatcccagaggaattcaagggctccacagtcgtcgagctgatgaagaaggaaggcactaccctgggtctgacggtatcgggaggaattgataaggatggcaagccaagagtatctaatctgcggcaaggaggaattgctgctagaagtgaccagctggatgtgggtgactacatcaaagcagtgaatggaatcaacctggccaaattccgccatgacgagatcatcagcttgctgaagaatgtgggagaaagagtggttcttgaagtagagtacgagcttccaccggtctctgtgcaaggatcaagtgttattttccgaacagtggaggtcacattacataaagaaggcaatacctttgg

SEQ ID NO: 9025 - DNA, 600 bp, Homo sapiens
  source 1..600: mol_type = unassigned DNA
gatggaccgcttcctgggttttgtcaaggcgataagaagatctaggagaagaaaggggaaaaagtaccgaccagaagaggattaccacgagggctatgaggatgtctattattacgcttcagagcattttcgaaagtctcgctctgttgcccgggctggagtgtggtggcttgatcctggttcaacctctgcctcccaggttcaaggagtctcgtgcctcagcctcctaagtacctgggattacagagtcatttctacagaaagaagcaggactgtttctcatcaggattctatgctcgtgtccagaactgtgaaatgaggagtggtgacgctgactatacctccttttaattgagacagtaaggccttctcaccttccccagcttactggggatgggaacagaacataagacaccagcagaaagagaagccaagagaaaatgagagtccctacactaaatccgccagccagacaaagccgcctgatggagcgttggctgtgaggagacagagcatcccagaggaattcaagggctccacagtcgtcgagctgatgaagaaggaaggcactaccctgggtctgacggtatcgggaggaat

SEQ ID NO: 9026 - DNA, 5216 bp, Homo sapiens
  source 1..5216: mol_type = unassigned DNA
gtgattgtgaagggggaggaggctgtggcaggcaggggtggtagtagtagtgaatgacacagatttgccagatgacatgtagcggacctctgcatcagccaagaggaattaagctttgtcactccccactgggactacctttctcctggtatgtgcgcaaggaattcatatgctgctgctgctgcagccaccagagcagagagccttgagtacactttgccacagaaagcagtgagcaagaatgatagctgtctcttttaaatgccgttgtcaaattctgaggcgacttactaaagatgagagtccctacactaaatccgccagccagacaaagccgcctgatggagcgttggctgtgaggagacagagcatcccagaggaattcaagggctccacagtcgtcgagctgatgaagaaggaaggcactaccctgggtctgacggtatcgggaggaattgataaggatggcaagccaagagtatctaatctgcggcaaggaggaattgctgctagaagtgaccagctggatgtgggtgactacatcaaagcagtgaatggaatcaacctggccaaattccgccatgacgagatcatcagcttgctgaagaatgtgggagaaagagtggttcttgaagtagagtacgagcttccaccggtctctgtgcaaggatcaagtgttattttccgaacagtggaggtcacattacataaagaaggcaatacctttggttttgtaattcgagggggagcacatgatgatagaaataaatctcgtccagttgtgataacatgtgttcgtcctggagggcctgctgacagagagggcacgatcaaacccggtgacaggttgctcagtgtggatggaattcggcttcttggaactacgcatgctgaagccatgagtattcttaaacaatgtggacaagaagcagcactgctgatagaatatgatgtctcagtaatggactctgtggcaacagcatccgggccactactagtcgaagttgccaaaactcctggtgccagccttggggttgccctaactacctcgatgtgctgtaacaaacaagtcattgtcatagacaaaatcaaatctgcaagtattgcagacagatgtggcgcattgcatgtgggagatcacatcctctccatcgatggaaccagcatggagtactgtacacttgcagaagcaacccagttcctggccaacaccactgaccaggtcaagcttgagatccttccccatcatcagacccggctggccctaaaggggcccgaccatgtgaaaattcagaggagcgacaggcaacttacctgggattcctgggccagcaaccacagcagccttcacaccaaccatcactataacacgtaccaccctgaccattgcagagtaccagccctgacattcccgaaagcacctcctccaaacagccctccagctttggtgtcttcatccttctctcctacctccatgagtgcatacagcctgagttccctgaacatggggactctacctcgaagcctctactccaccagcccacgtggaaccatgatgaggaggagactgaaaaagaaagacttcaaaagctcattgtccttagcctccagcacagtaggattggctgggcaggttgttcacacagaaaccacagaggttgtgctgacggcagatcctgtcacaggatttgggatccaactgcagggcagtgtgtttgccacagaaactctctcttctccacctctgatttcctatatcgaagctgacagcccagcagagagatgtggggtgctacagattggagacagagtgatggccatcaatggaattccaacagaagacagcaccttcgaagaagccagtcagctcctccgagactcttcaatcacgagcaaggtcacactggaaatcgagtttgatgttgcagagtctgtcatcccaagtagtggaacatttcatgtaaagctgcctaagaagcacaatgtggaacttggaataaccataagttcaccatccagtagaaaaccaggagaccccctcgtcatttcagatatcaagaaagggagtgtggcacacagaactgggaccctggaacttggggataaattgctcgcaatagataatatccggctggacaactgttccatggaagatgcagttcagatcctccagcaatgtgaagacctggtgaagctcaaaatccgcaaagatgaagataattcagatgagcaagaaagttccggagcaattatttacaccgtggagcttaaacgctacggggggccccttggcatcacaatttcaggaactgaagagccgtttgatcctataatcatttcaagcctcactaaagggggattagctgaaagaactggcgcaatccacataggagaccgaatcctagccatcaatagcagcagcttgaaagggaagcctctgagtgaagccatccatttgttacagatggcaggagagactgtcaccttgaaaattaagaaacagacagatgcccagtcagcatcgagccccaagaagttccctatttctagccatttgagtgacctgggggatgtggaggaggactcctcaccagcacagaagccaggcaagctctccgacatgtacccctccacggtgcccagtgtggacagtgctgtggattcatgggatgggtctgcaatagacaccagctatggaactcaaggcactagttttcaggcctcaggatacaatttcaacacctatgactggaggagtccaaaacagagaggcagcttgtccccagtcactaagcctcgaagccagacttacccagatgtggggctgagttatgaagactgggaccggtccacagccagtggttttgcaggggctgccgatagtgcagagacagaacaagaggagaacttctggtctcaagcgctggaggatttggaaacctgcggacagtcaggaattctgagagaactggaggagaaagctgacaggcgtgtgtctttgagaaacatgactctcttggcaacaatcatgtcggggagcacgatgagtttgaatcatgaggctccaacacctcgcagtcagctggggcgacaggccagcttccaggagcgcagcagctcgcggccgcactacagccaaacaactcggagcaacaccctgccttcagatgtgggtaggaagtcagtaaccctgagaaaaatgaaacaagaaataaaggagatcatgtctccaactcctgtggagctgcacaaggtgaccttgtacaaggactctgacatggaggactttgggttcagtgtagcagatggcttactggagaaaggagtgtatgtcaaaaatattcgcccagctgggccaggagatcttggtggcttaaagccctatgacaggctcttacaggtgaatcatgtccgaaccagagactttgactgctgccttgttgtgcccctcatagcagaatccgggaataagctggacctggttattagtagaaacccactggcttcacagaagtctatagaccaacagagtctaccaggagattggagtgaacagaacagtgcttttttccagcagcctagccacggtggtaatttggagacacgagaacccactaatacattatagcaacgctttttataaagcaggacaaaagacaatatctacatggtgctaaaaatcctttaagatttctgtgacctttgaagcacagataatcaatcaacgtggcattaactgcaagcacaggggtcttttaaatctctctcatggctcatgttcacttcccttttcaagttgaagaggtttcttttttggtgaccactatggtatatggtgggcaatgccctgccagtcccaacggtagagaaaaataggccgtcccccacaactctacaattaacatcagaggaaattttttacaagttcatcttactatcactttttaaaaagagaaacatctgtttgaaaatattctctgtgatgatttccttaattcactttgaaatcagtttcttactatgaagtcattaatgtaagaacttggccaacaaagcttttcttctcataggctggctctactaggggaactagtgtttggtaaactgctgggactaccacaatgggaggggtacaggtataaaattaagttatcttaaaatgtttcagcaatgatgcacgtaggagaccataataggtggtggtaaatgttttgcccacgtataggaatgattttaactaagatgtatgctattccctatgcaacaaattatcaaacaggatatgtcttgtgacctgttttttttttaaggacacatttttaatagctgaaaatctctgataatgaattagagtgtgtagtaaacatgagaattagttatattatcttatttttaaaattcaagactaagaacttcagagaatgaagagtctattaaaatgaggttcatcttaatgataggcaaaccaaactcatactgcttgacatgttttgaaaactggtaatattgagggtgtacagcacatgtacttaaaaatgacactggactatcttttgctctgagccatgccacttaccgaaattgtaaatacatttttcacaaatgcattgccaattattaccatccctcaaagcaataaattgtgacagttgctttaaatgtttgtcagcaactgttttcatttgttcagatattttgaatagctacactaataactgttattatttggtgaacataaaaaaataaatagatctgtatattgatggtagactctccatattgaaatgattattttccaaacattttcattttggtcaataattcaaactaccacttaggcaaagtattcgaacactgtgtcctttgtttaaggaaatataaaaaaaaaatcacctttctttttgtgcaaaaaaaatattatttcaatcacatttcagaaccgccagggcaagaaagtataaagcaggatcatgttaagaaaaaagaaaaaaagatcatgagtcacttaaatatgtatttttatttgtaacaaacaagtattaaactgtaaagtatttttgtacaaatttaatactttaatagcatggtatttatcgtctatgtatggttttggggaattcaaaattgttcaaatatttgtatggaaaaaaataaaaccctctaccaaatggaataaacagtgattttaaaaagccaaataaagaggatatgcatta

SEQ ID NO: 9027 - DNA, 9103 bp, Homo sapiens
  source 1..9103: mol_type = unassigned DNA
ggccggctacagcctgcggcgcgcgcagagcgctagtggggcgcgcggcgcgcgcgcggggcgggggcgcgcggaggggggggctgccccggggcggcccccccaggtcggggcgcggcgggcggcggcggcgggcgcgcgtcccgtccaggtccggagtaaccgccgccgccgccgccaaagctcgccaacatggcggacctggaggctgtgctggccgatgtcagttacctgatggccatggagaagagcaaggcgaccccggccgcccgcgccagcaagaggatcgtcctgccggagcccagtatccggagtgtgatgcagaagtaccttgcagagagaaatgaaataacctttgacaagattttcaatcagaaaattggtttcttgctatttaaagatttttgtttgaatgaaattaatgaagctgtacctcaggtgaagttttatgaagagataaaggaatatgaaaaacttgataatgaggaagaccgcctttgcagaagtcgacaaatttatgatgcctacatcatgaaggaacttctttcctgttcacatcctttctcaaagcaagctgtagaacacgtacaaagtcatttatccaagaaacaagtgacatcaactctttttcagccatacatagaagaaatttgtgaaagccttcgaggtgacatttttcaaaaatttatggaaagtgacaagttcactagattttgtcagtggaaaaacgttgaattaaatatccatttgaccatgaatgagttcagtgtgcataggattattggacgaggaggattcggggaagtttatggttgcaggaaagcagacactggaaaaatgtatgcaatgaaatgcttagataagaagaggatcaaaatgaaacaaggagaaacattagccttaaatgaaagaatcatgttgtctcttgtcagcacaggagactgtcctttcattgtatgtatgacctatgccttccataccccagataaactctgcttcatcctggatctgatgaacgggggcgatttgcactaccacctttcacaacacggtgtgttctctgagaaggagatgcggttttatgccactgaaatcattctgggtctggaacacatgcacaatcggtttgttgtctacagagatttgaagccagcaaatattctcttggatgaacatggacacgcaagaatatcagatcttggtcttgcctgcgatttttccaaaaagaagcctcatgcgagtgttggcacccatgggtacatggctcccgaggtgctgcagaaggggacggcctatgacagcagtgccgactggttctccctgggctgcatgcttttcaaacttctgagaggtcacagccctttcagacaacataaaaccaaagacaagcatgaaattgaccgaatgacactcaccgtgaatgtggaacttccagacaccttctctcctgaactgaagtcccttttggagggcttgcttcagcgagacgttagcaagcggctgggctgtcacggaggcggctcacaggaagtaaaagagcacagctttttcaaaggtgttgactggcagcatgtctacttacaaaagtacccaccacccttgattcctccccggggagaagtcaatgctgctgatgcctttgatattggctcatttgatgaagaggataccaaagggattaagctacttgattgcgaccaagaactctacaagaacttccctttggtcatctctgaacgctggcagcaagaagtaacggaaacagtttatgaagcagtaaatgcagacacagataaaatcgaggccaggaagagagctaaaaataagcaacttggccacgaagaagattacgctctggggaaggactgtattatgcacgggtacatgctgaaactgggaaacccatttctgactcagtggcagcgtcgctatttttacctctttccaaatagacttgaatggagaggagagggagagtcccggcaaaatttactgacaatggaacagattctctctgtggaagaaactcaaattaaagacaaaaaatgcattttgttcagaataaaaggagggaaacaatttgtcttgcaatgtgagagtgatccagagtttgtgcagtggaagaaagagttgaacgaaaccttcaaggaggcccagcggctattgcgtcgtgccccgaagttcctcaacaaacctcggtcaggtactgtggagctcccaaagccatccctctgtcacagaaacagcaacggcctctagcacccagaaacagggagggtcctcgaggaggacacaccagggtctcagccttttggggtgaacgaggatgaggcatctgatctattcgctaccgggactcctccaggctcccgagaggagtcgggacccttcggcttggggtcagctcagctccctgccttgtcacatttgtctgcattagaaactactgaagaaataaaagttctttttctttgctacacactttggtacctatgaacctagaacttgaagtgactcctacttatcacgtaaatttttatgtctgatatcaaacacatcttagactccccagaatggaatttaaagatgttcagtgttgggtaacagattgccctaagcattgccacatattctgtctagtcactgctgattttctatgtctttgctccatactgctgggggatgggagagccacagtgtgtttcttttgtgcacttcgcaactgacttcttgtcctggggttaaaagttgaagatattttctgatgatattaaaagttgaagatatttctgcacttgggccctcctctgggagccgcacccacatgactgccctgcctctgaccagtctgttccggggccccctcagccaggtgggaatgacggacacgtactatccaagtgtatgggattaactaatcattgaaggcattcatccgtccatcattggaaagatttacagtgattctgaaggacaggccgtggagttttaggtttcaggggcaagagcagttttcaaaagtctttgagtccagtgtgcacgagtcgacaagcagtacctggcatgcaggagcactcatgggtgagtccgtctcaggtctcgacaattagcagttgtgtgacagtcattctggttccttctgcctgaccctgggagacatatcagtaatggatgtacaaaagcaggtctgttttatgtcttagtataatttcagatgaattgtattgaaaaaatgctgaggaatgaatgtgtcaaaatgggttaactgtgtatattgactttcatgtcgtcatgcatctgtcatgaatgaatgatactttgcactgggctgtacgacagtgaggaccttagggcatgaagcctttttcctggtcccagcagcatctgccctgtgaagtttgttttctcccactgcctccaggccccactgatacccccaaatagatgctgggttatgagaaccagcgaaatcccccatgtcatcagtcttaaaaaaaaaattttacaaatccacgtatttgtcccattcttggagtagttttagtgtatgtctttacattaactactaacagtataaataacttgacatcgtaattgtctgcatcctgtccttgatatttttagcagttccaaatctttgtttttgtatttgtttgctgtgttcatgggcaaagtaagtactttttaatgcagttattttgagagtttggaagataattaccaaaagggtccattatttcataagagttactttgcaaaaaaaaaaatgtgggtttttttttttgtctatctcaactactagttggggtttaaattaacatacattttctactatctgttatttccagtgtgggaggagggatgtactacttacatgcattctccttatttaaaaaggaagaatagtattcaaattctgttgaaacacacacacacacacacacacacacacacacacactccagaagcagaaaagccattgttcttaaagagtgaatgtcttcccagccctggttaattatagctgtgactgatgccgttcccgtctgcatctcaagctcataggttctcagcatgtgcagttgaggatgcgctgggcctcatgcctgttctagatctccaggataaagggcctgctgttgactccaccagggtctgggcttagcgtctaatatctcgtacctagggcgtgagctgcacaaacgtgttcagaaagattattcaactttcccatacttgttctaaaattgagctgatccgcatctctttcaaaaactagaatttctgctctaagaatagaacataaggctccactcccttttagaaaagatatatgaattggaaaatgctctgaaagtccttttgcttcaaacaaaagtgtaaacttttacacttccccaactcacatttgatttgtaatgatatggttgagaagtacatctagatgtcatttattaaaagtgctttgtaagactagattgagctgtttctgagggcggtcaccagttgtgttggggtctggtttgagtgccttctgccaaaatgttgtgatggaggtgtttctgcgaccagacacaggataccgctgtgtctgcacccggttgcctgcatggccagaggaaaagtcagttggattaaacatcatggtatacttggctgttgtttttttttaattttttaattttttgggatagggcctcgctctgtcacccaggctggagaacagtgggatgatcatggctcactgcagccttgaattcctaggttcaagcaatcctcccacgtcagcctcctgagtagctaggactacaggtgcatgccacctttcctggctaatttattttttgggtagagatggggtcttgaactcttaggctcaagtgatcctccttccttggcctcccaaaatgctggaattagagatgtaagccaccatgcccagccatagtacttggatgttttagaaggttttccaagtattacataattcctagatgttcacccttattacactccaactattaaaaaggtcaaaattcagcctattttttttcattattttagattcctgtggttgggatattttaacattgatgagaaaaataattgaggttgatatttttacaaaatcatgcggtaataagtcttgatttcatgattcaaaagaatcaataaagcctaaaaataatagattactttaagctgctatgtaagatatatatggaataaattaaaaacctttgtgaattcaggtttattatttttaacctaaaacattctctttggttcattcatcccctcatgtcatgggggctcattggttttccttctttgtcatatttaagtatgatttttcaacaaaacttctagaagtcagcttattatgtcaccattcatgcaaagtgctcatgcctctgattggtccattcactgacgtgacaatttcaggtcctatgtttaaaaagaaggggctggccgggcacgatggctcacgcctataatcccagcactttgggaggccgagaggggcggttcacgaggtcaggagattgagaccatcctggttagcagagtgaaaccccgtctctactaaaaatacaaataaaaattagccgggcgtggtggcgggcgcctgtagtcccagctacttgggaggctgaggcaggagaatggcatgaacccgggaggcagagcttgcagtgagccgagattgcgccactgcactccagcctgggcgacagagcgagactctgtctcaaaaaaaaaaaggaggggggctaaatatccagtgagatgcactgaggaaaggaagcattttgctgaagacagcagcagcaacaaacaatggtctgtttgttgcaaacaagatgtagcttgatttctggtctgacatatgccatatacagatattagaaacgactgtttgaaggccacactggtcatctacaaagtaatgtttaccaattgacgacagggatttaactagattaaaaagatcaaagtgtggtttttctctgctttttaaaatttcactcggaatttgtagctgggccaattcaacacattttacttttcagtggaattgatttttctaatgtttcagaattttaacatatcaagaagaaaacaacgttctcaaagtctggcctctttagcatgatgtaaacctatagaaatgctttgaaatgtgctggtgtaagataagagttatcttgtatgatttaatcatatgcagtgttgtctcagttacgttcagggaaatgtttctgtgtcattcagagatgcttgatgaattaacacctcccaccctgagtgaggggttgacttgttgggagatgatttgggcttcactgggatctgtgacaggtgggggctgggctgggtgtcacaaagagaatagtggtagaaatcgggcgaaggaagaaagaagttactggtaaaaatcattacaccataaagcaccaaggaaataactgagttaaaataggtgaagtttcttttttcccccctgtaacaggagagttttccttatgataattattctgagacttggtcactttgtttttgaatgtggagctgctgaactcattcagaagccatttgctgcctatcaggactttctgaagaagttcttttgcctctgcctaccctctggcaccctcccatggaggcacaggggacccagagctaaagcattaccaggccatctccaaaacaccccgtgtgtgtgtgtgtgtgtgtgtgtgtgtgtgtgtgtgtgtgtgtgcactttgcagcccccgaggtggagaggcagtgtctggatcactgtgaatgcattgccccattggtcagttggggacactgttacaaatccactgaagtcctggtaaaactgtcaagagtaacaggcctcttctgttctaccctgctcacttccacggtgagttaccagcctgggcaacacagcaagaccccatctctacaaaaaaaatttttttaagtaattaaccgtttaaattttttcctaaagatttaacatgatttttccctcctatgtaaagtttactggagagacttgaattacttaaattcatgttaatatgatttttttttaatccaggtcacattttaacaaagtttattatgaaacaaatgaaatttgaactctaaaatggtactccttggcttcctcaagtcacaatgaactttatattttctttgtccttaaggactaagatagttgttttatttcagccgaatcacagagataaccactcctgcaggcccccacagctggcccaaaggggctgtctttctgacctggctgtgttagcactgattgagaaacgcaggctcccaaattttaaattgcctttattaaaaacacaaactacagaaaatgggttaagagtatacgcatttcatcaaacacatataggggaaaaaatccttcaatttagagttaaataactcagctttgtatagtagagttagcgctccagtatctaacaatctcagaatcatctctgaaaactggtaactatgcttccatttttaattttgtcctaaatatcagatgtctttgatgtaagggtagggaatggagaaatattttcaattgtgtatttgtattacaaagaacttgaaatttactttcttagttgattatattaaatgatgtatatattatatgtggtttataagctcaacactggccatttttttagttttattgttaaatggtatttttctatgtttaattataatagatctggctttttctggatagcataaagatcactgaactatatatatataagaaacaagagttctattttagcacaaaggcattttatattatttattgaatccataagtttgttttcgtcaaaaacattccatattatttctgctcctttttatttgtatagtttgttatttaaagaaatggcagtccttcctgttcttaatacaataaaattgaaataatgcacctagtaatgtggccgacatctcttctcaccaccatggactgttttcaacaacagttgatcttctggtctgtgctgagaggcgcatgcatgtctttcgtcacgtcgggcagcacacctgctgtgaaatactgctttcatctacctcttcagaaggcttcttgcttgttgacaagtaccgcaaaggctttattctggactggctatctcataaaaggatttctgtaagactttgcagtgtcattccctcagaacctaggtttgtttctaaagccacggtattgtccaggagcccctgtgtgtggggcaggtagctatccctcccatgtcattagtaatcctttaggatttaaggtacaactggacagcatcattccttccccttattgtgccaaatccccaccatcagccttgccattgccttaagatttgattattgcacccaattacctaaccactaaacagaaaggccaccttcactctttgaaaaaggcaagctgtgcttagaaacactgcttttaagagtagcacatttgagtgtgactttttccccccttcactatttcaaaatggttttgaaatggggtcttaaaggtaagcgccctcatacatgactgaaactttgtgagaggtcttatatttgaatggacccttaatgatttatgtgaaatagaatgaagtcctgtctctgtgagagaacgtgcctcctcactcatttgtctctgtctgttttcatagccatcaatatagtaacatatttactatattcttgaatacccttgaagaaagaaatccgttttctattgtgcattgctatacgaagtgaagccagtaaactagatactgtaaatctagatattgtacctagacaaaatatcattggttctatctctttttgtatctgttgtgccagggaaggtttataatcccttctcagtatacactcactagtgcacgtctgaaatagtatcccacgggagatgctgctccacgtctgaggtcacctgccctgtgtggggcacaccaccgtcagcaccaccgtttttacagttactttggagctgctagactggttttctgtgttggtaaattgcctatataaatctgaataaaaaggatctgtacaaaga

SEQ ID NO: 9028 - DNA, 657 bp, Homo sapiens
  source 1..657: mol_type = unassigned DNA
accccggccgcccgcgccagcaagaggatcgtcctgccggagcccagtatccggagtgtgatgcagaagtaccttgcagagagaaatgaaataacctttgacaagattttcaatcagaaaattgataaaggaatatgaaaaacttgataatgaggaagaccgcctttgcagaagtcgacaaatttatgatgcctacatcatgaaggaacttctttcctgttcacatcctttctcaaagcaagctgtagaacacgtacaaagtcatttatccaagaaacaagtgacatcaactctttttcagccatacatagaagaaatttgtgaaagccttcgaggtgacatttttcaaaaatttatggaaagtgacaagttcactagattttgtcagtggaaaaacgttgaattaaatatccatttgaccatgaatgagttcagtgtgcataggattattggacgaggaggattcggggaagtttatggttgcaggaaagcagacactggaaaaatgtatgcaatgaaatgcttagataagaagaggatcaaaatgaaacaaggagaaacattagccttaaatgaaagaatcatgttgtctcttgtcagcacaggatgtttcaaaacaacgccacaaataacattcctccctccctgacccgtgct

SEQ ID NO: 9029 - DNA, 2873 bp, Homo sapiens
  source 1..2873: mol_type = unassigned DNA
ggggcgcgcggaggggggggctgccccggggcggcccccccaggtcggggcgcggcgggcggcggcgccgccgccaaagctcgccaacatggcggacctggaggctgtgctggccgatgtcagttacctgatggccatggagaagagcaaggcgaccccggccgcccgcgccagcaagaggatcgtcctgccggagcccagtatccggagtgtgatgcagaagtaccttgcagagagaaatgaaataacctttgacaagattttcaatcagaaaattggtttcttgctatttaaagatttttgtttgaatgaaattaatgaagctgtacctcaggtgaagttttatgaagagataaaggaatatgaaaaacttgataatgaggaagaccgcctttgcagaagtcgacaaatttatgatgcctacatcatgaaggaacttctttcctgttcacatcctttctcaaagcaagctgtagaacacgtacaaagtcatttatccaagaaacaagtgacatcaactctttttcagccatacatagaagaaatttgtgaaagccttcgaggtgacatttttcaaaaatttatggaaagtgacaagttcactagattttgtcagtggaaaaacgttgaattaaatatccatttgaccatgaatgagttcagtgtgcataggattattggacgaggaggattcggggaagtttatggttgcaggaaagcagacactggaaaaatgtatgcaatgaaatgcttagataagaagaggatcaaaatgaaacaaggagaaacattagccttaaatgaaagaatcatgttgtctcttgtcagcacaggagactgtcctttcattgtatgtatgacctatgccttccataccccagataaactctgcttcatcctggatctgatgaacgggggcgatttgcactaccacctttcacaacacggtgtgttctctgagaaggagatgcggttttatgccactgaaatcattctgggtctggaacacatgcacaatcggtttgttgtctacagagatttgaagccagcaaatattctcttggatgaacatggacacgcaagaatatcagatcttggtcttgcctgcgatttttccaaaaagaagcctcatgcgagtgttggcacccatgggtacatggctcccgaggtgctgcagaaggggacggcctatgacagcagtgccgactggttctccctgggctgcatgcttttcaaacttctgagaggatgaagaattgatactgaaggtttctatgtggctgacagtcactaaaccaacaagtcacaacttgaacccagcttttctgactctggagtcgggttctgcacagggaaaacaggaagcgctcagagctgtggagaatctgctggtgcacgtcacagccctttcagacaacataaaaccaaagacaagcatgaaattgaccgaatgacactcaccgtgaatgtggaacttccagacaccttctctcctgaactgaagtcccttttggagggcttgcttcagcgagacgttagcaagcggctgggctgtcacggaggcggctcacaggaagtaaaagagcacagctttttcaaaggtgttgactggcagcatgtctacttacaaaagtacccaccacccttgattcctccccggggagaagtcaatgctgctgatgcctttgatattggctcatttgatgaagaggataccaaagggattaagctacttgattgcgaccaagaactctacaagaacttccctttggtcatctctgaacgctggcagcaagaagtaacggaaacagtttatgaagcagtaaatgcagacacagataaaatcgaggccaggaagagagctaaaaataagcaacttggccacgaagaagattacgctctggggaaggactgtattatgcacgggtacatgctgaaactgggaaacccatttctgactcagtggcagcgtcgctatttttacctctttccaaatagacttgaatggagaggagagggagagtcccggcaaaatttactgacaatggaacagattctctctgtggaagaaactcaaattaaagacaaaaaatgcattttgttcagaataaaaggagggaaacaatttgtcttgcaatgtgagagtgatccagagtttgtgcagtggaagaaagagttgaacgaaaccttcaaggaggcccagcggctattgcgtcgtgccccgaagttcctcaacaaacctcggtcaggtactgtggagctcccaaagccatccctctgtcacagaaacagcaacggcctctagcacccagaaacagggagggtcctcgaggaggacacaccagggtctcagccttttggggtgaacgaggatgaggcatctgatctattcgctaccgggactcctccaggctcccgagaggagtcgggacccttcggcttggggtcagctcagctccctgccttgtcacatttgtctgcattagaaactactgaagaaataaaagttctttttctttgctacacactttggtacctatgaacctagaacttgaagtgactcctacttatcacgtaaatttttatgtctgatatcaaacacatcttagactccccagaatggaatttaaagatgttcagtgttgggtaacagattgccctaagcattgccacatattctgtctagtcactgctgattttctatgtctttgctccatactgctgggggatgggagagccacagtgtgtttcttttgtgcacttcgcaactgacttcttgtcctggggttaaaagttgaagatattttctgatgatattaaaagttgaagatatttctgcacttgggccctcctctgggagccgcacccacatg

SEQ ID NO: 9030 - DNA, 2068 bp, Homo sapiens
  source 1..2068: mol_type = unassigned DNA
ttcagctaagccgttagcgccgagcccgcccgggagcgggtcgccggccgcggcgggcgcccctgccagtgagcccctgtccgaagtgagccacggcattgactcggggctgcccgggggcagggcactgaggagggagttgcgcgcgcgaggcgagggcgatggggccaagaagaaccggggcgatagcgcggcagcggtgacagctgggacccgccgcggtcgggctgccccctcccctcgccccgaccgctcccctgctggtgagggcctgcggaggcggcggcggcggcgcccttggtggcagtggtggcggcggagcagcctcccgggatcgtgtccggagctcgaggagagggtggtgcccggcgagctatgcacgggggcggcggcgtctcctcctgttccgcctcctcagtctcctcggtctcgcagaatccgccggcggcggcggcgccaggacatggagctcgagaacatcgtggccaactcgctgctgctgaaagcgcgtcaagaaaaggattatagcagtctttgtgacaagcaaccgataggaagacgtctcttcaggcagttctgtgataccaaacccactctaaagaggcacattgaattcttggatgcagtggcagaatatgaagttgccgatgatgaggaccgaagtgattgtggactgtcaatcttagatagattcttcaatgataagttggcagcccctttaccagaaatacctccagatgttgtgacagaatgtagattgggactgaaggaggagaacccttccaaaaaagcctttgaggaatgtactagagttgcccataactacctaagaggggaaccatttgaagaataccaagaaagctcatatttttctcagtttttacaatggaaatggctggaaaggcaacccgtaacaaagaacacatttagacattacagagttctaggaaaaggcggatttggagaggtttgcgcctgtcaagtgcgagccacaggaaaaatgtatgcctgcaaaaagctacaaaaaaaaagaataaagaagaggaaaggtgaagctatggctctaaatgagaaaagaattctggagaaagtgcaaagtagattcgtagttagtttagcctacgcttatgaaaccaaagatgccttgtgcttggtgctcaccattatgaatggaggggatttgaagtttcacatttacaacctgggcaatcccggctttgatgagcagagagccgttttctatgctgcagagctgtgttgcggcttggaagatttacagagggaaagaattgtatacagagacttgaagcctgagaatattctccttgatgatcgtggacacatccggatttcagacctcggtttggccacagagatcccagaaggacagagggttcgaggaagagttggaacagtcggctacatggcacctgaagttgtcaataatgaaaagtatacgtttagtcccgattggtggggacttggctgtctgatctatgaaatgattcagggacattctccattcaaaaaatacaaagagaaagtcaaatgggaggaggtcgatcaaagaatcaagaatgataccgaggagtattctgagaagttttcagaggatgccaaatctatctgcaggatgttactcaccaagaatccaagcaagcggctgggctgcaggggcgagggagcggctggggtgaagcagcaccccgtgttcaaggacatcaacttcaggaggctggaggcaaacatgctggagccccctttctgtcctgatcctcatgccgtttactgtaaggacgtcctggatatcgagcagttctcggtggtgaaagggatctacctggacaccgcagatgaagacttctatgctcggtttgctaccgggtgtgtctccatcccctggcagaatgagggctgcctgaccatggtccccagtgagaaggaagtggaacccaagcaatgctgagcaccccggtgcggaccacagagcagaccctggcgccaggaaggagcatgtgttagcgtctcgtcccacctggaattgtaataaatacatctaaataaaaca

SEQ ID NO: 9031 - DNA, 2136 bp, Homo sapiens
  source 1..2136: mol_type = unassigned DNA
cgcccgggagcgggtcgccggccgcggcgggcgcccctgccagtgagcccctgtccgaagtgagccacggcattgactcggggctgcccgggggcagggcactgaggagggagttgcgcgcgcgaggcgagggcgatggggccaagaagaaccggggcgatagcgcggcagcggtgacagctgggacccgccgcggtcgggctgccccctcccctcgccccgaccgctcccctgctggtgagggcctgcggaggcggcggcggcggcgcccttggtggcagtggtggcggcggagcagcctcccgggatcgtgtccggagctcgaggagagggtggtgcccggcgagctatgcacgggggcggcggcgtctcctcctgttccgcctcctcagtctcctcggtctcgcagaatccgccggcggcggcggcgccaggacatggagctcgagaacatcgtggccaactcgctgctgctgaaagcgcgtcaagtcctctgcatcccgccacaaaagcatcagttggtccagcccttcagcgggagacccccacaatcctctgtgcaatcctctgtctcggacctcatgtctcccttgcctgcgtctcaagagagctggcgacagagcctcggacctcaagtccctgtgctagccacggtagttcttcacaccccgtcactcttacggaattgctgatttcctctatttccttgcgtgatggagcagctctgctcggactgtgctccaggacagtgtaaatgccgactgaagatgccacagcagccggcgatgcatatttaaaggacagtctggagccgaaggtggcggccacgcttgtagtcccagctactctggaagctgaggtggaaggctcacttgggcccaggagagtccagcctgggcaaaacacagcaagaccatctctttaaaaaagtctaaaacaaagacttcatcttctcagtatttttgtgcaccaactcacactattttgaatagaagaactgagaatgggtgggaagagaatgggatctttttcccttaagataatcagggagtcccagagcagtatgcgttctcagcagccattttcagtggagcatttgactgtgcctcttatccctgactgtgaactccaaataggtcatggaaaataatcatccttagtggaagtcagattgaagctaagccagttttctttttacactaccttcctatctgcatgtaatttacaaaaaggaactataccaagccgccttccttataatgctgcagagattagataatgagataaatacaagtgctctataaatgctaaataacataaaaccagattctgtcacaaaacctaagaccacagtgatagtttgaaaaatgaaagttttggccgggcacggtggctcacagctgtaatcccagcacttttggaggccgaggcgggcggatcacaaggtcaggagattgagaccatcctggctaacatggtgaaaccccgtctctactaaaaatacaaaaattagccgggcgtggtggcgggcgcctgtagtcccagctacatgggaggctgaggcaggagaatggcgtgaaccctggaggcagagcttgcagtgagccgagatcgcgccacggcactccagcctgggtgacagagcgagactccgtctcgaaaaaaaaaaaaaagaaagttttaattttttccctgaaatatctcatattaactccacagtagtgtgattatgaggcctgtccccattgagtgagagtatttgctcctgtggtcagaaagcatcattatgtatagcttgattaatggttagagaagttgaatatataatattagatatacatggatacatgctgagtattggttataatttagggctttttcccaagttgatgactgtgtttgttactttaaagtatctcccaggaagtaccaggaggtgtcttcttggacacataacttcatggacagctccttgtttagcttcactggctcatatactagaaaattaacctttgaaatgaatgaacgtagcacaagagttatattctggtcctgagaagcgcaatgttgatttaatattattagtgagtccggtcatttcctggatttatttcaaatagaatcagtcagtctcaa

SEQ ID NO: 9032 - DNA, 2202 bp, Homo sapiens
  source 1..2202: mol_type = unassigned DNA
cagggcactgaggagggagttgcgcgcgcgaggcgagggcgatggggccaagaagaaccggggcgatagcgcggcagcggtgacagctgggacccgccgcggtcgggctgccccctcccctcgccccgaccgctcccctgctggtgagggcctgcggaggcggcggcggcggcgcccttggtggcagtggtggcggcggagcagcctcccgggatcgtgtccggagctcgaggagagggtggtgcccggcgagctatgcacgggggcggcggcgtctcctcctgttccgcctcctcagtctcctcggtctcgcagaatccgccggcggcggcggcgccaggacatggagctcgagaacatcgtggccaactcgctgctgctgaaagcgcgtcaaggaggatatggcaaaaaaagtggtcgtagtaaaaaatggaaggagatactgacactgcctcctgtcagccagtgcagtgagcttagacattccattgaaaaggattatagcagtctttgtgacaagcaaccgataggaagacgtctcttcaggcagttctgtgataccaaacccactctaaagaggcacattgaattcttggatgcagtggcagaatatgaagttgccgatgatgaggaccgaagtgattgtggactgtcaatcttagatagattcttcaatgataagttggcagcccctttaccagaaatacctccagatgttgtgacagaatgtagattgggactgaaggaggagaacccttccaaaaaagcctttgaggaatgtactagagttgcccataactacctaagaggggaaccatttgaagaataccaagaaagctcatatttttctcagtttttacaatggaaatggctggaaaggcaacccgtaacaaagaacacatttagacattacagagttctaggaaaaggcggatttggagaggtttgcgcctgtcaagtgcgagccacaggaaaaatgtatgcctgcaaaaagctacaaaaaaaaagaataaagaagaggaaaggtgaagctatggctctaaatgagaaaagaattctggagaaagtgcaaagtagattcgtagttagtttagcctacgcttatgaaaccaaagatgccttgtgcttggtgctcaccattatgaatggaggggatttgaagtttcacatttacaacctgggcaatcccggctttgatgagcagagagccgttttctatgctgcagagctgtgttgcggcttggaagatttacagagggaaagaattgtatacagagacttgaagcctgagaatattctccttgatgatcgtggacacatccggatttcagacctcggtttggccacagagatcccagaaggacagagggttcgaggaagagttggaacagtcggctacatggcacctgaagttgtcaataatgaaaagtatacgtttagtcccgattggtggggacttggctgtctgatctatgaaatgattcagggacattctccattcaaaaaatacaaagagaaagtcaaatgggaggaggtcgatcaaagaatcaagaatgataccgaggagtattctgagaagttttcagaggatgccaaatctatctgcaggatgttactcaccaagaatccaagcaagcggctgggctgcaggggcgagggagcggctggggtgaagcagcaccccgtgttcaaggacatcaacttcaggaggctggaggcaaacatgctggagccccctttctgtcctgatcctcatgccgtttactgtaaggacgtcctggatatcgagcagttctcggtggtgaaagggatctacctggacaccgcagatgaagacttctatgctcggtttgctaccgggtgtgtctccatcccctggcagaatgagatgatcgaatctgggtgtttcaaagacatcaacaaaagtgaaagtgaggaagctttgccattagatctagacaagaacatacataccccggtttccagaccaaacagaggcttcttctatagactcttcagaagagggggctgcctgaccatggtccccagtgagaaggaagtggaacccaagcaatgctgagcaccccggtgcggaccacagagcagaccctggcgccaggaaggagcatgtgttagcgtctcgtcccacctggaattgtaataaatacatctaaataaaacatgccttgggagtgtacagac

SEQ ID NO: 9033 - DNA, 2013 bp, Homo sapiens
  source 1..2013: mol_type = unassigned DNA
ccgccgcggtcgggctgccccctcccctcgccccgaccgctcccctgctggtgagggcctgcggaggcggcggcggcggcgcccttggtggcagtggtggcggcggagcagcctcccgggatcgtgtccggagctcgaggagagggtggtgcccggcgagctatgcacgggggcggcggcgtctcctcctgttccgcctcctcagtctcctcggtctcgcagaatccgccggcggcggcggcgccaggacatggagctcgagaacatcgtggccaactcgctgctgctgaaagcgcgtcaagaaaaggattatagcagtctttgtgacaagcaaccgataggaagacgtctcttcaggcagttctgtgataccaaacccactctaaagaggcacattgaattcttggatgcagtggcagaatatgaagttgccgatgatgaggaccgaagtgattgtggactgtcaatcttagatagattcttcaatgataagttggcagcccctttaccagaaatacctccagatgttgtgacagaatgtagattgggactgaaggaggagaacccttccaaaaaagcctttgaggaatgtactagagttgcccataactacctaagaggggaaccatttgaagaataccaagaaagctcatatttttctcagtttttacaatggaaatggctggaaaggcaacccgtaacaaagaacacatttagacattacagagttctaggaaaaggcggatttggagaggtttgcgcctgtcaagtgcgagccacaggaaaaatgtatgcctgcaaaaagctacaaaaaaaaagaataaagaagaggaaaggtgaagctatggctctaaatgagaaaagaattctggagaaagtgcaaagtagattcgtagttagtttagcctacgcttatgaaaccaaagatgccttgtgcttggtgctcaccattatgaatggaggggatttgaagtttcacatttacaacctgggcaatcccggctttgatgagcagagagccgttttctatgctgcagagctgtgttgcggcttggaagatttacagagggaaagaattgtatacagagacttgaagcctgagaatattctccttgatgatcgtggacacatccggatttcagacctcggtttggccacagagatcccagaaggacagagggttcgaggaagagttggaacagtcggctacatggcacctgaagttgtcaataatgaaaagtatacgtttagtcccgattggtggggacttggctgtctgatctatgaaatgattcagggacattctccattcaaaaaatacaaagagaaagtcaaatgggaggaggtcgatcaaagaatcaagaatgataccgaggagtattctgagaagttttcagaggatgccaaatctatctgcaggatgttactcaccaagaatccaagcaagcggctgggctgcaggggcgagggagcggctggggtgaagcagcaccccgtgttcaaggacatcaacttcaggaggctggaggcaaacatgctggagccccctttctgtcctgatcctcatgccgtttactgtaaggacgtcctggatatcgagcagttctcggtggtgaaagggatctacctggacaccgcagatgaagacttctatgctcggtttgctaccgggtgtgtctccatcccctggcagaatgagatgatcgaatctgggtgtttcaaagacatcaacaaaagtgaaagtgaggaagctttgccattagatctagacaagaacatacataccccggtttccagaccaaacagaggcttcttctatagactcttcagaagagggggctgcctgaccatggtccccagtgagaaggaagtggaacccaagcaatgctgagcaccccggtgcggaccacagagcagaccctggcgccaggaaggagcatgtgttagcgtctcgtcccacctggaattgtaataaatacatctaaataaaacatgccttgggagtgtacagac

SEQ ID NO: 9034 - DNA, 1971 bp, Homo sapiens
  source 1..1971: mol_type = unassigned DNA
ccgccgcggtcgggctgccccctcccctcgccccgaccgctcccctgctggtgagggcctgcggaggcggcggcggcggcgcccttggtggcagtggtggcggcggagcagcctcccgggatcgtgtccggagctcgaggagagggtggtgcccggcgagctatgcacgggggcggcggcgtctcctcctgttccgcctcctcagtctcctcggtctcgcagaatccgccggcggcggcggcgccaggacatggagctcgagaacatcgtggccaactcgctgctgctgaaagcgcgtcaaggaggatatggcaaaaaaagtggtcgtagtaaaaaatggaaggagatactgacactgcctcctgtcagccagtgcagtgagcttagacattccattgaaaaggattatagcagtctttgtgacaagcaaccgataggaagacgtctcttcaggcagttctgtgataccaaacccactctaaagaggcacattgaattcttggatgcagtggcagaatatgaagttgccgatgatgaggaccgaagtgattgtggactgtcaatcttagatagattcttcaatgataagttggcagcccctttaccagaaatacctccagatgttgtgacagaatgtagattgggactgaaggaggagaacccttccaaaaaagcctttgaggaatgtactagagttgcccataactacctaagaggggaaccatttgaagaataccaagaaagctcatatttttctcagtttttacaatggaaatggctggaaaggcaacccgtaacaaagaacacatttagacattacagagttctaggaaaaggcggatttggagaggtttgcgcctgtcaagtgcgagccacaggaaaaatgtatgcctgcaaaaagctacaaaaaaaaagaataaagaagaggaaaggtgaagctatggctctaaatgagaaaagaattctggagaaagtgcaaagtagattcgtagttagtttagcctacgcttatgaaaccaaagatgccttgtgcttggtgctcaccattatgaatggaggggatttgaagtttcacatttacaacctgggcaatcccggctttgatgagcagagagccgttttctatgctgcagagctgtgttgcggcttggaagatttacagagggaaagaattgtatacagagacttgaagcctgagaatattctccttgatgatcgtggacacatccggatttcagacctcggtttggccacagagatcccagaaggacagagggttcgaggaagagttggaacagtcggctacatggcacctgaagttgtcaataatgaaaagtatacgtttagtcccgattggtggggacttggctgtctgatctatgaaatgattcagggacattctccattcaaaaaatacaaagagaaagtcaaatgggaggaggtcgatcaaagaatcaagaatgataccgaggagtattctgagaagttttcagaggatgccaaatctatctgcaggatgttactcaccaagaatccaagcaagcggctgggctgcaggggcgagggagcggctggggtgaagcagcaccccgtgttcaaggacatcaacttcaggaggctggaggcaaacatgctggagccccctttctgtcctgatcctcatgccgtttactgtaaggacgtcctggatatcgagcagttctcggtggtgaaagggatctacctggacaccgcagatgaagacttctatgctcggtttgctaccgggtgtgtctccatcccctggcagaatgagggctgcctgaccatggtccccagtgagaaggaagtggaacccaagcaatgctgagcaccccggtgcggaccacagagcagaccctggcgccaggaaggagcatgtgttagcgtctcgtcccacctggaattgtaataaatacatctaaataaaacatgccttgggagtgtacagac

SEQ ID NO: 9035 - DNA, 394 bp, Homo sapiens
  source 1..394: mol_type = unassigned DNA
cactggatagaggagcgattgcagagaatcctcaaagttgcctttgaaattccctagctgaggaaattaaaagactgctctttctagtcttgaactcctgacctcaaatgatccacccgccttgcccttccaaattgttgggattccaggtgtgagccaccgcgcctggccaaaagaatgttcttgagctttatattttgacccaaattaggcaatagttaccttaaagaaaaatgatacagtcaaaatcattttggctttattaaagctcctcaaaaaactctagaattagggctttcttaagttactttttagcagaaacatttacggtattttgtacatatgtgtgcaaagttgcttattaacatttatgtcatggtcataaagactaatt

SEQ ID NO: 9036 - DNA, 515 bp, Homo sapiens
  source 1..515: mol_type = unassigned DNA
agagacttgaagcctgagaatattctccttgatgatcgtggacacatccggatttcagacctcggtttggccacagagatcccagaaggacagagggttcgaggaagagttggaacagtcggctacatggcacctgaagttgtcaataatgaaaagtatacgtttagtcccgattggtggggacttggctgtctgatctatgaaatgattcagggacattctccattcaaaaaatacaaagagaaagtcaaatgggaggaggtcgatcaaagaatcaagaatgataccgaggagtattctgagaagttttcagaggatgccaaatctatctgcaggatgggctgcctgaccatggtccccagtgagaaggaagtggaacccaagcaatgctgagcaccccggtgcggaccacagagcagaccctggcgccaggaaggagcatgtgttagcgtctcgtcccacctggaattgtaataaatacatctaaataaaacatgccttgggagtgtacagac

SEQ ID NO: 9037 - DNA, 831 bp, Homo sapiens
  source 1..831: mol_type = unassigned DNA
ggacacatccggatttcagacctcggtttggccacagagatcccagaaggacagagggttcgaggaagagttggaacagtcggctacatggcacctgaagttgtcaataatgaaaagtatacgtttagtcccgattggtggggacttggctgtctgatctatgaaatgattcagggacattctccattcaaaaaatacaaagagaaagtcaaatgggaggaggtcgatcaaagaatcaagaatgataccgaggagtattctgagaagttttcagaggatgccaaatctatctgcaggatgcctcatgccgtttactgtaaggacgtcctggatatcgagcagttctcggtggtgaaagggatctacctggacaccgcagatgaagacttctatgctcggtttgctaccgggtgtgtctccatcccctggcagaatgagatgatcgaatctgggtgtttcaaagacatcaacaaaagtgaaagtgaggaagctttgccattagatctagacaagaacatacataccccggtttccagaccaaacagaggcttcttctatagactcttcagaagaggggcagttttatacagtctgagagccacatggtgctaggtggaggccagccagaacaatgagaacaccctcgcagtgaggtttgttgctgggatgaagactgttctgatccaaaacaggactaccttccagcatttacaaacaggttcccgtgtcgctgacaaaatagtttacactgggctcagaaatcggcatcctgtggaaccttcgtcagatggcactcacagtgcatctctccctgctctggctcttagactc

SEQ ID NO: 9038 - DNA, 614 bp, Homo sapiens
  source 1..614: mol_type = unassigned DNA
ggacacatccggatttcagacctcggtttggccacagagatcccagaaggacagagggttcgaggaagagttggaacagtcggctacatggcacctgaagttgtcaataatgaaaagtatacgtttagtcccgattggtggggacttggctgtctgatctatgaaatgattcagggacattctccattcaaaaaatacaaagagaaagtcaaatgggaggaggtcgatcaaagaatcaagaatgataccgaggagtattctgagaagttttcagaggatgccaaatctatctgcaggatgcctcatgccgtttactgtaaggacgtcctggatatcgagcagttctcggtggtgaaagggatctacctggacaccgcagatgaagacttctatgctcggtttgctaccgggtgtgtctccatcccctggcagaatgagggctgcctgaccatggtccccagtgagaaggaagtggaacccaagcaatgctgagcaccccggtgcggaccacagagcagaccctggcgccaggaaggagcatgtgttagcgtctcgtcccacctggaattgtaataaatacatctaaataaaacatgccttgggagtgtacagac

SEQ ID NO: 9039 - DNA, 428 bp, Homo sapiens
  source 1..428: mol_type = unassigned DNA
tgggaggaggtcgatcaaagaatcaagaatgataccgaggagtattctgagaagttttcagaggatgccaaatctatctgcaggatgcctcatgccgtttactgtaaggacgtcctggatatcgagcagttctcggtggtgaaagggatctacctggacaccgcagatgaagacttctatgctcggtttgctaccgggtgtgtctccatcccctggcagaatgagatgatcgaatctgggtgtttcaaagacatcaacaaaagtgaaagtgaggaagctttgccattagatctagacaagaacatacataccccggtttccagaccaaacagaggcttcttctatagactcttcagaagaggggtaaaaagacttaaaaactaatatatgtgtgtgtatgtgaaaaaaaaaaaaacatactgactgcc

SEQ ID NO: 9040 - DNA, 2654 bp, Homo sapiens
  source 1..2654: mol_type = unassigned DNA
aaagcatccgagggagccggaggggaggagaatggagtgacagagacacgcggagggtggggggtgggggggagcgtgttgagggaggggggaggggggacacagagggaggaagaagcggcggcggcggcggcggcggcggcggctcctctttgcagagggggaaactcttgggctgagagcaggaataatgcggtaggcaaggcgggctgctggctcccccggctccggcagcagcggcggcagcccgagcagcggcagcagcagcggcagcaccccaggcgctgacagccccgccggccggctccgttgctgaccgccgactgtcaatggagctggaaaacatcgtggccaacacggtcttgctgaaagccagggaagggggcggaggaaagcgcaaagggaaaagcaagaagtggaaagaaatcctgaagttccctcacattagccagtgtgaagacctccgaaggaccatagacagagattactgcagtttatgtgacaagcagccaatcgggaggctgcttttccggcagttttgtgaaaccaggcctgggctggagtgttacattcagttcctggactccgtggcagaatatgaagttactccagatgaaaaactgggagagaaagggaaggaaattatgaccaagtacctcaccccaaagtcccctgttttcatagcccaagttggccaagacctggtctcccagacggaggagaagctcctacagaagccgtgcaaagaactcttttctgcctgtgcacagtctgtccacgagtacctgaggggagaaccattccacgaatatctggacagcatgttttttgaccgctttctccagtggaagtggttggaaaggcaaccggtgaccaaaaacactttcaggcagtatcgagtgctaggaaaagggggcttcggggaggtctgtgcctgccaggttcgggccacgggtaaaatgtatgcctgcaagcgcttggagaagaagaggatcaaaaagaggaaaggggagtccatggccctcaatgagaagcagatcctcgagaaggtcaacagtcagtttgtggtcaacctggcctatgcctacgagaccaaggatgcactgtgcttggtcctgaccatcatgaatgggggtgacctgaagttccacatctacaacatgggcaaccctggcttcgaggaggagcgggccttgttttatgcggcagagatcctctgcggcttagaagacctccaccgtgagaacaccgtctaccgagatctgaaacctgaaaacatcctgttagatgattatggccacattaggatctcagacctgggcttggctgtgaagatccccgagggagacctgatccgcggccgggtgggcactgttggctacatggctccagaggtcctgaacaaccagaggtacggcctgagccccgactactggggccttggctgcctcatctatgagatgatcgagggccagtcgccgttccgcggccgcaaggagaaggtgaagcgggaggaggtggaccgccgggtcctggagacggaggaggtgtactcccacaagttctccgaggaggccaagtccatctgcaagatgctgctcacgaaagatgcgaagcagaggctgggctgccaggaggagggggctgcagaggtcaagagacaccccttcttcaggaacatgaacttcaagcgcttagaagccgggatgttggaccctcccttcgttccagacccccgcgctgtgtactgtaaggacgtgctggacatcgagcagttctccactgtgaagggcgtcaatctggaccacacagacgacgacttctactccaagttctccacgggctctgtgtccatcccatggcaaaacgagatgatagaaacagaatgctttaaggagctgaacgtgtttggacctaatggtaccctcccgccagatctgaacagaaaccaccctccggaaccgcccaagaaagggctgctccagagactcttcaagcggcagcatcagaacaattccaagagttcgcccagctccaagaccagttttaaccaccacataaactcaaaccatgtcagctcgaactccaccggaagcagctagtttcggctctggcctccaagtccacagtggaaccagcccagacccttctccttagaagtggaagtagtggagcccctgctctggtggggctgccaggggagaccccgggagccggggaaggaggccgtccatcccgtcgacgtagaacctcgaggtttctcaaagaaatttccactcaggtctgttttccgaggcggccccggccggggtggattggatttgtctttggtgaacattgcaatagaaatccaattggatacgacaacttgcacgtattttaatagcgtcataactagaactgaattttgtctttatgatttttaaagaaaagttttgtaaatttctctactgtctcagtttacattttgtatatttgtatttaaatgaaagtgagactttgagggtgtatattttctgtgcagccactgttaagccatgtgttccaaggcattttagcggggagggggttatcaaaaaaaaaaaaatgtgactcaagacttccagagcctcaaatgagaaaatgtctttattaaatgtagaaagtgatccata

SEQ ID NO: 9041 - DNA, 5267 bp, Homo sapiens
  source 1..5267: mol_type = unassigned DNA
catcatctgaggtggacaggaagcccagccaagccactggggccgacccctcccctggactcacctgcatctgagccacacaccctccagccactacccatagcagttctgggggtgtgtcctgggaagactcccttctgctccccaaaaccccaaggcctggctcggggccactggagccgcaggcgggacatatgtgtgaccggccctctgcccctggcagccccgcgctgtgtactgtaaggacgtgctggacatcgagcagttctccactgtgaagggcgtcaatctggaccacacagacgacgacttctactccaagttctccacgggctctgtgtccatcccatggcaaaacgagatgatagaaacagaatgctttaaggagctgaacgtgtttggacctaatggtaccctcccgccagatctgaacagaaaccaccctccggaaccgcccaagaaagggctgctccagagactcttcaagcggcagcatcagaacaattccaagagttcgcccagctccaagaccagttttaaccaccacataaactcaaaccatgtcagctcgaactccaccggaagcagctagtttcggctctggcctccaagtccacagtggaaccagcccagacccttctccttagaagtggaagtagtggagcccctgctctggtggggctgccaggggagaccccgggagccggggaaggaggccgtccatcccgtcgacgtagaacctcgaggtttctcaaagaaatttccactcaggtctgttttccgaggcggccccggccggggtggattggatttgtctttggtgaacattgcaatagaaatccaattggatacgacaacttgcacgtattttaatagcgtcataactagaactgaattttgtctttatgatttttaaagaaaagttttgtaaatttctctactgtctcagtttacattttgtatatttgtatttaaatgaaagtgagactttgagggtgtatattttctgtgcagccactgttaagccatgtgttccaaggcattttagcggggagggggttatcaaaaaaaaaaaaatgtgactcaagacttccagagcctcaaatgagaaaatgtctttattaaatgtagaaagtgatccatacttcacctttgaaggattggttgtatttacccacatctatctctggagccatttcctcacattggtgtcacccttctgtcggcttggaacaatctgaattaaatgttccagacacacgtgggacttccccctcccagccagaatgtcctctcctggggccctcggagtcgcctaggctgagcccttctcctcgaggggcacgccgagccactgtcgcacccacctctgtctgctcttccttcaggaaggcggctggcacgcggatctaggtgtttgcagcctggtgggcgatgggcctctttccttctaagcaggtcctgactgctaaagccagtcatttgcaagaggtttgcattgggggatttttgctctatttttaacagaagcataggaccgtaaagatgtgtcatgaaaccccaagtgtcccaaagcctcggggcccacaggagcatcgggaagtgaggcagtgcgctcatcctgacggagcagcgtcgtgtctgtagcggggagggaggctggcccaggggcccggcatgttcctgaagcgttcacagggttttgagaccttcacagccccatcaatgtgctggcccatgtggcatggatggggtagtctctctgggcaaatgagaggcccaaggagagaccaagccaccaaagggctcaagacaaagtcactgttccttccccaggaaggtggggcagaggcaagatctatcggacatttcaaagtttcaggcaggagctcctagaggacttggtggctttgccagcccaggggcctctgaaggcagcccccagacccttgtagcagggctgtccatccccagggagcagctggccacctcctcctgcctcgaagaagtgaccaggggccaatctgctcccacctcccgtccaggacagggtgaacatttgacctcactgtcccctgcccggctgagtccctgatgtctgactgtgccacccagcagctgccagggtctctcaccatgtggaccctgccctagctgcagctgcacctcctgtcaaaagtgcagactcgcaggttccaccccaaaccacagaatgggaatgcctgggagcccacccctgctgtgggctctcagcggggctttgggggtgatcatcccaaacacatttctctggatgacgcaggcagcattggagcatgagccgtggggaggacagtcgtgagcacaccagctgtgaggcccggtttccatgcctaacccccggactctacccctgggtcctggggcgtaccgctaaaagggtcctggcctttgggactgatcattttgaggcccttttacaaagaaatgggggagaagaaatagctgggcttccctcaaatctttttaatgtgcagtatttttttgttcaagaccagctcttgttttatgaggctccttccattacctttcttgggctgaatgcaaaacaaatacagccacattcaagtcttccaaggaagtagaaaactctttgaatggtatcttaagatccttaagctcttgctgaacttcctttttcaatgaaaagaaggaccatcatcctaggatggtcaccagcccaagccaccaccccagccacccatccaggaggttggttccttttgcccagttcatagcagctcagtccttaccagatggattcttggtgttgggaagcagcctctttttattcctgaaaggcaatgccctgtccgtttgcagtagagaatccccagggagcaagaaagatgacagaagtgtggctgccgtgtttctaggtcatgagagctctggcgatactaccacaaggcctgcacgtggactctatgataacttgagtcttccatcatgtttgccaccagccctccctgagtgcccagaggagatgggggcagagtcacttggcctactaaagcctcctgttccttctggctcatgcattgctttgtggtaagagaaaggaagtctttagaacagcgcctgggaatcagcccttctccctactgagtccccagtcctgtcccttccctgactcgctcctcctccaaccttggtttctatagctgcatttttttttttttttttttttgagacaagatctcattgtgttccccaggctgaagtgcagtggcatgattctggctcactgcagcctcaaactcctgagtccaagctatcctcctgcctcagcctccgaggtagctgggaccataggcgtgcaccaccatactcagctaatttttaaaattttttgtagagatggggggggggtctccccatgttgcccaggctggcctcgaattcctgagcccaagctatcctcctgcctcagcctcccaaagtgctgaggttataggtgtgagccactgtccctggcctatacggtcattttttaaaagatattttaaaattaaaagcaaacaacactgtccacccatctacctgtccaggataaggcatatttggacggtgaacggatttactctcgttcatgcatttgagcgcttcacagaagagtctttcttgctccaggcatgacattttttttcaccagacgttcactgacttcgtgactttgaggtgagacatgggatctctcagaagcgtctctgcatctgcatttcaggagatgagctgctgtccctggtggacagaggcggtctctgccatggtcaccatgatgccctacaagtgtttattgagtcccctggggggcacccagaataccacccaaaatagcaagaagacccggtccccgccttgcggacgatgcactcacatgccacagcaacccattctcgcctcttccttggccgggaacccggggctctagggctgctcgctgctgctgtggcctgcgcagccacgggaggcttcctgaaaggcattgctcggaggggcgggggcggggaggcctagcctgccccacagacacagctgtgaggcctgggtcatacacataccagcaagcagctgccgagacaaatggtggtgggaagtcctgggaacacacacagcctttgcattgacagcacaagtaggatcagagcccaggtgagcccctgaggataccgaggccttccctccctgaggcccgcaagtctccatgcgtctcccgggagcctggccccgctgcagaaatcccttctcttcctccacaccctgtcctttccccaaaggctcgtgttatcagttccagctacccatcgactttcccaccgagccgctgccctcaaaacggagggggcaccgcagcctccttgagcctggcatcccaggccttgccaaaggggacggtggcttcctggataattggaaatctctgagaagaagaggaaacacctgagtgacactcagctgtcctctggggtcccctggtgtgcatgcacgtcctcctgaatacctgtacttccaagaggtggtctcctgttttcataacccaacactctgagataggatcttccaactttttagccccggctgtggaaagatagtgagtatgaagtctttgtgcatttggaagtgacatcgctgtgtggattatgaatacagagagctgccatcttcctgatcacaatagaccacgattgcaaagcctcctctcccagagaccccttctgcgcctgccctccccacccaccacccagctgttgaagctcagcgtgtgcaagtcagaccctgcacaggccgggggtgtctcacctggcctaaacgtaaaggcttgtgccggagacagtgattgaaaacatttgaaaagccagctctccctggcagagaaagacacttcccccccaaagtggaatttagatgtctttccctagtccatcaagaagtcatttttgtaacagtccctaagcgagtgttctcaattagaagagtttagtggcttttggtgttgttaaaataataagaatccttctagcatccaaagctttctaatttttttcagggagatttggacattaatgaatggaaacttccacagtggcggtcactcctgaaggcagcggcttctgttctcccgctgctgtaactctgtgtgttccgtctatcgcgtcacagtgccgctggatctagatggagccactgttgttgtttttaaaagagaaataaattccttaatggaa

SEQ ID NO: 9042 - DNA, 1515 bp, Homo sapiens
  source 1..1515: mol_type = unassigned DNA
agtgctgaagaaagagggcactagtgtacagcccagatcgcatccttgcaccgtctggattagagctgaggcgtctgcaagccgagcgtggccacggtcctctggccccgggaccatagcgctgtctaccccgactcaggtactcagcagcatctagctcaccgctgccaacacgacttccactgtactcttgatcaatttaccttgatgcactaccggtgaagaacggggactcgaattcccttacaaacgcctccagcttgtagaggcggtcgtggaggacccagaggaggagacgaaggggaaggaggcggtggtggaggaggcaaaggccttggacgaccattgttggcgaggggcaccactccgggagaggcggcgctgggcgtcttgggggtgcgcgccgggagcctgcagcgggaccagcgtgggaacgcggctggcaggctgtggacctcgtcctcaccaccatggtcgggctccttttgttttttttcccagcgatctttttggaggtgtcccttctccccagaagccccggcaggaaagtgttgctggcaggagcgtcgtctcagcgctcggtggccagaatggacggagatgtcatcattggagccctcttctcagtccatcaccagcctccggccgagaaagtgcccgagaggaagtgtggggagatcagggagcagtatggcatccagagggtggaggccatgttccacacgttggataagatcaacgcggacccggtcctcctgcccaacatcaccctgggcagtgagatccgggactcctgctggcactcttccgtggctctggaacagagcattgagttcattagggactctctgatttccattcgagatgagaaggatgggatcaaccggtgtctgcctgacggccagtccctccccccaggcaggactaagaagcccattgcgggagtgatcggtcccggctccagctctgtagccattcaagtgcagaacctgctccagctcttcgacatcccccagatcgcttattcagccacaagcatcgacctgagtgacaaaactttgtacaaatacttcctgagggttgtcccttctgacactttgcaggcaagggccatgcttgacatagtcaaacgttacaattggacctatgtctctgcagtccacacggaagggaattatggggagagcggaatggacgctttcaaagagctggctgcccaggaaggcctctgtatcgcccattctgacaaaatctacagcaacgctggggagaagagctttgaccgactcttgcgcaaactccgagagaggcttcccaaggctagagtggtggtctgcttctgtgaaggcatgacagtgcgaggactcctgagcgccatgcggcgccttggcgtcgtgggcgagttctcactcattggaaggtaagtttctctctctctctctctctctctctctctctctctctcacacacacacatgcacacacacactttgaaacacatatgcttgctttcac

SEQ ID NO: 9043 - DNA, 1654 bp, Homo sapiens
  source 1..1654: mol_type = unassigned DNA
gattagagctgaggcgtctgcaagccgagcgtggccacggtcctctggccccgggaccatagcgctgtctaccccgactcaggtactcagcatctagctcaccgctgccaacacgacttccactgtactcttgatcaatttaccttgatgcactaccggtgaagaacggggactcgaattcccttacaaacgcctccagcttgtagaggcggtcgtggaggacccagaggaggagacgaaggggaaggaggcggtggtggaggaggcaaaggccttggacgaccattgttggcgaggggcaccactccgggagaggcggcgctgggcgtcttgggggtgcgcgccgggagcctgcagcgggaccagcgtgggaacgcggctggcaggctgtggacctcgtcctcaccaccatggtcgggctccttttgttttttttcccagcgatctttttggaggtgtcccttctccccagaagccccggcaggaaagtgttgctggcaggagcgtcgtctcagcgctcggtggccagaatggacggagatgtcatcattggagccctcttctcagtccatcaccagcctccggccgagaaagtgcccgagaggaagtgtggggagatcagggagcagtatggcatccagagggtggaggccatgttccacacgttggataagatcaacgcggacccggtcctcctgcccaacatcaccctgggcagtgagatccgggactcctgctggcactcttccgtggctctggaacagagcattgagttcattagggactctctgatttccattcgagatgagaaggatgggatcaaccggtgtctgcctgacggccagtccctccccccaggcaggactaagaagcccattgcgggagtgatcggtcccggctccagctctgtagccattcaagtgcagaacctgctccagctcttcgacatcccccagatcgcttattcagccacaagcatcgacctgagtgacaaaactttgtacaaatacttcctgagggttgtcccttctgacactttgcaggcaagggccatgcttgacatagtcaaacgttacaattggacctatgtctctgcagtccacacggaagggaattatggggagagcggaatggacgctttcaaagagctggctgcccaggaaggcctctgtatcgcccattctgacaaaatctacagcaacgctggggagaagagctttgaccgactcttgcgcaaactccgagagaggcttcccaaggctagagtggtggtctgcttctgtgaaggcatgacagtgcgaggactcctgagcgccatgcggcgccttggcgtcgtgggcgagttctcactcattggaaggtaagtttctctctctctctctctctctctctctctctctctctcacacacacacatgcacacacacactttgaaacacatatgcttgctttcacaaaactagacttgctaactccaaagtgggagagatgtgcagtgctgagctgaacattagttctggatctcactgttaatgtgaatattggcatcttcctgctaaacaacagcagaacaaggctcaggagggaggattggttaagcccaggagtttgaggttacagtgagctatgattggtgccactgcattctagtctt

SEQ ID NO: 9044 - DNA, 6836 bp, Homo sapiens
  source 1..6836: mol_type = unassigned DNA
caggtactcaggtatgtctcaagtccatgtcctccaaacagactcagcatctagctcaccgctgccaacacgacttccactgtactcttgatcaatttaccttgatgcactaccggtgaagaacggggactcgaattcccttacaaacgcctccagcttgtagaggcggtcgtggaggacccagaggaggagacgaaggggaaggaggcggtggtggaggaggcaaaggccttggacgaccattgttggcgaggggcaccactccgggagaggcggcgctgggcgtcttgggggtgcgcgccgggagcctgcagcgggaccagcgtgggaacgcggctggcaggctgtggacctcgtcctcaccaccatggtcgggctccttttgttttttttcccagcgatctttttggaggtgtcccttctccccagaagccccggcaggaaagtgttgctggcaggagcgtcgtctcagcgctcggtggccagaatggacggagatgtcatcattggagccctcttctcagtccatcaccagcctccggccgagaaagtgcccgagaggaagtgtggggagatcagggagcagtatggcatccagagggtggaggccatgttccacacgttggataagatcaacgcggacccggtcctcctgcccaacatcaccctgggcagtgagatccgggactcctgctggcactcttccgtggctctggaacagagcattgagttcattagggactctctgatttccattcgagatgagaaggatgggatcaaccggtgtctgcctgacggccagtccctccccccaggcaggactaagaagcccattgcgggagtgatcggtcccggctccagctctgtagccattcaagtgcagaacctgctccagctcttcgacatcccccagatcgcttattcagccacaagcatcgacctgagtgacaaaactttgtacaaatacttcctgagggttgtcccttctgacactttgcaggcaagggccatgcttgacatagtcaaacgttacaattggacctatgtctctgcagtccacacggaagggaattatggggagagcggaatggacgctttcaaagagctggctgcccaggaaggcctctgtatcgcccattctgacaaaatctacagcaacgctggggagaagagctttgaccgactcttgcgcaaactccgagagaggcttcccaaggctagagtggtggtctgcttctgtgaaggcatgacagtgcgaggactcctgagcgccatgcggcgccttggcgtcgtgggcgagttctcactcattggaagtgatggatgggcagacagagatgaagtcattgaaggttatgaggtggaagccaacgggggaatcacgataaagctgcagtctccagaggtcaggtcatttgatgattatttcctgaaactgaggctggacactaacacgaggaatccctggttccctgagttctggcaacatcggttccagtgccgccttccaggacaccttctggaaaatcccaactttaaacgaatctgcacaggcaatgaaagcttagaagaaaactatgtccaggacagtaagatggggtttgtcatcaatgccatctatgccatggcacatgggctgcagaacatgcaccatgccctctgccctggccacgtgggcctctgcgatgccatgaagcccatcgacggcagcaagctgctggacttcctcatcaagtcctcattcattggagtatctggagaggaggtgtggtttgatgagaaaggagacgctcctggaaggtatgatatcatgaatctgcagtacactgaagctaatcgctatgactatgtgcacgttggaacctggcatgaaggagtgctgaacattgatgattacaaaatccagatgaacaagagtggagtggtgcggtctgtgtgcagtgagccttgcttaaagggccagattaaggttatacggaaaggagaagtgagctgctgctggatttgcacggcctgcaaagagaatgaatatgtgcaagatgagttcacctgcaaagcttgtgacttgggatggtggcccaatgcagatctaacaggctgtgagcccattcctgtgcgctatcttgagtggagcaacatcgaatccattatagccatcgccttttcatgcctgggaatccttgttaccttgtttgtcaccctaatctttgtactgtaccgggacacaccagtggtcaaatcctccagtcgggagctctgctacatcatcctagctggcatcttccttggttatgtgtgcccattcactctcattgccaaacctactaccacctcctgctacctccagcgcctcttggttggcctctcctctgcgatgtgctactctgctttagtgactaaaaccaatcgtattgcacgcatcctggctggcagcaagaagaagatctgcacccggaagcccaggttcatgagtgcctgggctcaggtgatcattgcctcaattctgattagtgtgcaactaaccctggtggtaaccctgatcatcatggaaccccctatgcccattctgtcctacccaagtatcaaggaagtctaccttatctgcaataccagcaacctgggtgtggtggcccctttgggctacaatggactcctcatcatgagctgtacctactatgccttcaagacccgcaacgtgcccgccaacttcaacgaggccaaatatatcgcgttcaccatgtacaccacctgtatcatctggctagcttttgtgcccatttactttgggagcaactacaagatcatcacaacttgctttgcagtgagtctcagtgtaacagtggctctggggtgcatgttcactcccaagatgtacatcattattgccaagcctgagaggaatgtccgcagtgccttcaccacctctgatgttgtccgcatgcatgttggcgatggcaagctgccctgccgctccaacactttcctcaacatcttccgaagaaagaaggcaggggcagggaatgccaagaagaggcagccagaattctcgcccaccagccaatgtccgtcggcacatgtgcagctttgaaaacccccacactgcagtgaatgtttctaatggcaagtctgtgtcatggtctgaaccaggtggaggacaggtgcccaagggacagcatatgtggcaccgcctctctgtgcacgtgaagaccaatgagacggcctgcaaccaaacagccgtcatcaagcccctcactaaaagttaccaaggctctggcaagagcctgaccttttcagataccagcaccaagaccctttacaacgtagaggaggaggaggatgcccagccgattcgctttagcccgcctggtagcccttccatggtggtgcacaggcgcgtgccaagcgcggcgaccactccgcctctgccgtcccacctgaccgcagaggagacccccctcttcctggccgaaccagccctccccaagggcttgccccctcctctccagcagcagcagcaaccccctccacagcagaaatcgctgatggaccagctccagggagtggtcagcaacttcagtaccgcgatcccggattttcacgcggtgctggcaggccccggtggtcccgggaacgggctgcggtccctgtacccgcccccgccacctccgcagcacctgcagatgctgccgctgcagctgagcacctttggggaggagctggtctccccgcccgcggacgacgacgacgacagcgagaggtttaagctcctccaggagtacgtgtatgagcacgagcgggaagggaacacggaagaagacgaactggaagaggaggaggaggacctgcaggcggccagcaaactgaccccggatgattcgcctgcgctgacgcctccgtcgcctttccgcgactcggtggcctcgggcagctcggtgcccagctcccccgtgtccgagtcggtgctctgcacccctcccaacgtatcctacgcctctgtcattctgcgggactacaagcaaagctcttccaccctgtaagggggaagggtccacatagaaaagcaagacaagccagagatctcccacacctccagagatgtgcaaacagctgggaggaaaagcctgggagtggggggcctcgtcgggaggacaggagaccgctgctgctgctgccgctactgctgctgctgccttaagtaggaagagagggaaggacaccaagcaaaaaatgttccaggccaggattcggattcttgaattactcgaagccttctctgggaagaaagggaattctgacaaagcacaattccatatggtatgtaacttttatcacaaatcaaatagtgacatcacaaacataatgtcctcttttgcacaattgtgcatagatatatatatgcccacacacactgggccatgcttgccaaggaacagcccacgtggacatgccagtcggatcatgagttcacctgatggcattcggagtgagctggtggagccagacagagcaggtgcggggaagggaagggcccaggccagacccatcccaaacggatgatgggatgatgggacagcagctccttgctcagaagcccttctccccgctgggctgacagactcctcatcttcaggagactcaggaatggagcggcacaggggtctctcttcatccactgcaacccatccagtgccagctttgagattgcacttgaagaaaggtgcatggaccccctgctgctctgcagattccctttatttaggaaaacaggaataagagcaaaattatcaccaaaaagtgcttcatcaggcgtgctacaggaggaaggagctagaaatagaacaatccatcagcatgagactttgaaaaaaaaacacatgatcagcttctcatgttccatattcacttattggcgatttggggaaaaggccggaacaagagattgttacgagagtggcagaaacccttttgtagattgacttgtgtttgtgccaagcgggctttccattgaccttcagttaaagaacaaaccatgtgacaaaattgttaccttccacttactgtagcaaataatacctacaagttgaacttctaagatgcgtatatgtacaatttggtgccattatttctcctacgtattagagaaacaaatccatctttgaatctaatggtgtactcatagcaactattactggtttaaatgacaaataattctatcctattgtcactgaagtccttgtaactagcgagtgaatgtgttcctgtgtccttgtatatgtgcgatcgtaaaatttgtgcaatgtaatgtcaaattgactggtcaatgtcaacctagtagtcaatctaactgcaattagaaattgtcttttgaatatactatatatattttttatgttccaataatgttttgtacatcattgtcatcaatatctacagaagctctttgacggtttgaatactatggctcaaggttttcatatgcagctcggatggacatttttcttctaagatggaacttatttttcagatattttctgatgtggagatatgttattaatgaagtggtttgaaaatttgttatattaaaagtgcacaaaaactgagagtgaaaataaaaggtacattttataagcttgcacacattattaacacataagattgaacaaagcatttagattattccaggttatatcatttttttaaagattttccacagctacttgagtgtctaacatacagtaacatctaactcagctaataatttgtaaaatctttatcaatcacattttgccttcttttaatttttatgttcatggacttttattcctgtgtcttggctgtcataactttttatttctgctatttgctgttgtgtaatatccatggacatgtaatccacttactccatctttacaatccctttttaccaccaataaaaggatttttcttgctgttttgatttcttctattatttgtggaatgaattataccccccttaaatatctttgtttatgccttatgttcagtcatattttaatatgcttccttcatattgaagctgctgatttctcagccaaaaatcatcttagaatctttaaatatccattgcatcatttgttcagaatttaacatccattccaatgttggaggcttgtattacttatatttcatcatattctattgccaagtttagtcagttccacaccaagaatgaactgcatttcctttaaaaattattttaaaacacctttattgaaaagatctcatgactgagatgtggactttggttccatgttttcattgtaagaaagcagagagcggaaaatcaatggctccagtgattaatagatgggtttttagtaattgacaaattcatgagggaaagcatatgatctctttattagtgaatcatgcttattttttactcttaatgccactaatatacatccctaatatcacagggcttgtgcattcagatttttaaaaaattaggatagataaggaaacaacttatattcaagtgtaagatgatatcaggttggtctaagacttttggtgaacacgttcattcaactgtgatcactttattactctgaatgcctactattatcctgattatggggtctcctgaataaatagagtattagtccttatgtcatcattgttcaaaattggagatgtacacatacataccctataccaagagggccgaaactcttcaccttgatgtatgttctgatacaagttgttcagcttcttgtaaatgtgttttccttcggcttgttactgccttttgtcaaataatcttgacaatgctgtataataaatattttctattt

SEQ ID NO: 9045 - DNA, 3874 bp, Homo sapiens
  source 1..3874: mol_type = unassigned DNA
gaattcccttacaaacgcctccagcttgtagaggcggtcgtggaggacccagaggaggagacgaaggggaaggaggcggtggtggaggaggcaaaggccttggacgaccattgttggcgaggggcaccactccgggagaggcggcgctgggcgtcttgggggtgcgcgccgggagcctgcagcgggaccagcgtgggaacgcggctggcaggctgtggacctcgtcctcaccaccatggtcgggctccttttgttttttttcccagcgatctttttggaggtgtcccttctccccagaagccccggcaggaaagtgttgctggcaggagcgtcgtctcagcgctcggtggccagaatggacggagatgtcatcattggagccctcttctcagtccatcaccagcctccggccgagaaagtgcccgagaggaagtgtggggagatcagggagcagtatggcatccagagggtggaggccatgttccacacgttggataagatcaacgcggacccggtcctcctgcccaacatcaccctgggcagtgagatccgggactcctgctggcactcttccgtggctctggaacagagcattgagttcattagggactctctgatttccattcgagatgagaaggatgggatcaaccggtgtctgcctgacggccagtccctccccccaggcaggactaagaagcccattgcgggagtgatcggtcccggctccagctctgtagccattcaagtgcagaacctgctccagctcttcgacatcccccagatcgcttattcagccacaagcatcgacctgagtgacaaaactttgtacaaatacttcctgagggttgtcccttctgacactttgcaggcaagggccatgcttgacatagtcaaacgttacaattggacctatgtctctgcagtccacacggaagggaattatggggagagcggaatggacgctttcaaagagctggctgcccaggaaggcctctgtatcgcccattctgacaaaatctacagcaacgctggggagaagagctttgaccgactcttgcgcaaactccgagagaggcttcccaaggctagagtggtggtctgcttctgtgaaggcatgacagtgcgaggactcctgagcgccatgcggcgccttggcgtcgtgggcgagttctcactcattggaagtgatggatgggcagacagagatgaagtcattgaaggttatgaggtggaagccaacgggggaatcacgataaagctgcagtctccagaggtcaggtcatttgatgattatttcctgaaactgaggctggacactaacacgaggaatccctggttccctgagttctggcaacatcggttccagtgccgccttccaggacaccttctggaaaatcccaactttaaacgaatctgcacaggcaatgaaagcttagaagaaaactatgtccaggacagtaagatggggtttgtcatcaatgccatctatgccatggcacatgggctgcagaacatgcaccatgccctctgccctggccacgtgggcctctgcgatgccatgaagcccatcgacggcagcaagctgctggacttcctcatcaagtcctcattcattggagtatctggagaggaggtgtggtttgatgagaaaggagacgctcctggaaggtatgatatcatgaatctgcagtacactgaagctaatcgctatgactatgtgcacgttggaacctggcatgaaggagtgctgaacattgatgattacaaaatccagatgaacaagagtggagtggtgcggtctgtgtgcagtgagccttgcttaaagggccagattaaggttatacggaaaggagaagtgagctgctgctggatttgcacggcctgcaaagagaatgaatatgtgcaagatgagttcacctgcaaagcttgtgacttgggatggtggcccaatgcagatctaacaggctgtgagcccattcctgtgcgctatcttgagtggagcaacatcgaatccattatagccatcgccttttcatgcctgggaatccttgttaccttgtttgtcaccctaatctttgtactgtaccgggacacaccagtggtcaaatcctccagtcgggagctctgctacatcatcctagctggcatcttccttggttatgtgtgcccattcactctcattgccaaacctactaccacctcctgctacctccagcgcctcttggttggcctctcctctgcgatgtgctactctgctttagtgactaaaaccaatcgtattgcacgcatcctggctggcagcaagaagaagatctgcacccggaagcccaggttcatgagtgcctgggctcaggtgatcattgcctcaattctgattagtgtgcaactaaccctggtggtaaccctgatcatcatggaaccccctatgcccattctgtcctacccaagtatcaaggaagtctaccttatctgcaataccagcaacctgggtgtggtggcccctttgggctacaatggactcctcatcatgagctgtacctactatgccttcaagacccgcaacgtgcccgccaacttcaacgaggccaaatatatcgcgttcaccatgtacaccacctgtatcatctggctagcttttgtgcccatttactttgggagcaactacaagatcatcacaacttgctttgcagtgagtctcagtgtaacagtggctctggggtgcatgttcactcccaagatgtacatcattattgccaagcctgagaggaatgtccgcagtgccttcaccacctctgatgttgtccgcatgcatgttggcgatggcaagctgccctgccgctccaacactttcctcaacatcttccgaagaaagaaggcaggggcagggaatgccaagtggaggacaggtgcccaagggacagcatatgtggcaccgcctctctgtgcacgtgaagaccaatgagacggcctgcaaccaaacagccgtcatcaagcccctcactaaaagttaccaaggctctggcaagagcctgaccttttcagataccagcaccaagaccctttacaacgtagaggaggaggaggatgcccagccgattcgctttagcccgcctggtagcccttccatggtggtgcacaggcgcgtgccaagcgcggcgaccactccgcctctgccgtcccacctgaccgcagaggagacccccctcttcctggccgaaccagccctccccaagggcttgccccctcctctccagcagcagcagcaaccccctccacagcagaaatcgctgatggaccagctccagggagtggtcagcaacttcagtaccgcgatcccggattttcacgcggtgctggcaggccccggtggtcccgggaacgggctgcggtccctgtacccgcccccgccacctccgcagcacctgcagatgctgccgctgcagctgagcacctttggggaggagctggtctccccgcccgcggacgacgacgacgacagcgagaggtttaagctcctccaggagtacgtgtatgagcacgagcgggaagggaacacggaagaagacgaactggaagaggaggaggaggacctgcaggcggccagcaaactgaccccggatgattcgcctgcgctgacgcctccgtcgcctttccgcgactcggtggcctcgggcagctcggtgcccagctcccccgtgtccgagtcggtgctctgcacccctcccaacgtatcctacgcctctgtcattctgcgggactacaagcaaagctcttccaccctgtaagggggaagggtccacatagaaaagcaagacaagccagagatctcccacacctccagagatgtgcaaacagctgggaggaaaagcctggg

SEQ ID NO: 9046 - DNA, 6622 bp, Homo sapiens
  source 1..6622: mol_type = unassigned DNA
gaattcccttacaaacgcctccagcttgtagaggcggtcgtggaggacccagaggaggagacgaaggggaaggaggcggtggtggaggaggcaaaggccttggacgaccattgttggcgaggggcaccactccgggagaggcggcgctgggcgtcttgggggtgcgcgccgggagcctgcagcgggaccagcgtgggaacgcggctggcaggctgtggacctcgtcctcaccaccatggtcgggctccttttgttttttttcccagcgatctttttggaggtgtcccttctccccagaagccccggcaggaaagtgttgctggcaggagcgtcgtctcagcgctcggtggccagaatggacggagatgtcatcattggagccctcttctcagtccatcaccagcctccggccgagaaagtgcccgagaggaagtgtggggagatcagggagcagtatggcatccagagggtggaggccatgttccacacgttggataagatcaacgcggacccggtcctcctgcccaacatcaccctgggcagtgagatccgggactcctgctggcactcttccgtggctctggaacagagcattgagttcattagggactctctgatttccattcgagatgagaaggatgggatcaaccggtgtctgcctgacggccagtccctccccccaggcaggactaagaagcccattgcgggagtgatcggtcccggctccagctctgtagccattcaagtgcagaacctgctccagctcttcgacatcccccagatcgcttattcagccacaagcatcgacctgagtgacaaaactttgtacaaatacttcctgagggttgtcccttctgacactttgcaggcaagggccatgcttgacatagtcaaacgttacaattggacctatgtctctgcagtccacacggaagggaattatggggagagcggaatggacgctttcaaagagctggctgcccaggaaggcctctgtatcgcccattctgacaaaatctacagcaacgctggggagaagagctttgaccgactcttgcgcaaactccgagagaggcttcccaaggctagagtggtggtctgcttctgtgaaggcatgacagtgcgaggactcctgagcgccatgcggcgccttggcgtcgtgggcgagttctcactcattggaagtgatggatgggcagacagagatgaagtcattgaaggttatgaggtggaagccaacgggggaatcacgataaagctgcagtctccagaggtcaggtcatttgatgattatttcctgaaactgaggctggacactaacacgaggaatccctggttccctgagttctggcaacatcggttccagtgccgccttccaggacaccttctggaaaatcccaactttaaacgaatctgcacaggcaatgaaagcttagaagaaaactatgtccaggacagtaagatggggtttgtcatcaatgccatctatgccatggcacatgggctgcagaacatgcaccatgccctctgccctggccacgtgggcctctgcgatgccatgaagcccatcgacggcagcaagctgctggacttcctcatcaagtcctcattcattggagtatctggagaggaggtgtggtttgatgagaaaggagacgctcctggaaggtatgatatcatgaatctgcagtacactgaagctaatcgctatgactatgtgcacgttggaacctggcatgaaggagtgctgaacattgatgattacaaaatccagatgaacaagagtggagtggtgcggtctgtgtgcagtgagccttgcttaaagggccagattaaggttatacggaaaggagaagtgagctgctgctggatttgcacggcctgcaaagagaatgaatatgtgcaagatgagttcacctgcaaagcttgtgacttgggatggtggcccaatgcagatctaacaggctgtgagcccattcctgtgcgctatcttgagtggagcaacatcgaatccattatagccatcgccttttcatgcctgggaatccttgttaccttgtttgtcaccctaatctttgtactgtaccgggacacaccagtggtcaaatcctccagtcgggagctctgctacatcatcctagctggcatcttccttggttatgtgtgcccattcactctcattgccaaacctactaccacctcctgctacctccagcgcctcttggttggcctctcctctgcgatgtgctactctgctttagtgactaaaaccaatcgtattgcacgcatcctggctggcagcaagaagaagatctgcacccggaagcccaggttcatgagtgcctgggctcaggtgatcattgcctcaattctgattagtgtgcaactaaccctggtggtaaccctgatcatcatggaaccccctatgcccattctgtcctacccaagtatcaaggaagtctaccttatctgcaataccagcaacctgggtgtggtggcccctttgggctacaatggactcctcatcatgagctgtacctactatgccttcaagacccgcaacgtgcccgccaacttcaacgaggccaaatatatcgcgttcaccatgtacaccacctgtatcatctggctagcttttgtgcccatttactttgggagcaactacaagatcatcacaacttgctttgcagtgagtctcagtgtaacagtggctctggggtgcatgttcactcccaagatgtacatcattattgccaagcctgagaggaatgtccgcagtgccttcaccacctctgatgttgtccgcatgcatgttggcgatggcaagctgccctgccgctccaacactttcctcaacatcttccgaagaaagaaggcaggggcagggaatgccaattctaatggcaagtctgtgtcatggtctgaaccaggtggaggacaggtgcccaagggacagcatatgtggcaccgcctctctgtgcacgtgaagaccaatgagacggcctgcaaccaaacagccgtcatcaagcccctcactaaaagttaccaaggctctggcaagagcctgaccttttcagataccagcaccaagaccctttacaacgtagaggaggaggaggatgcccagccgattcgctttagcccgcctggtagcccttccatggtggtgcacaggcgcgtgccaagcgcggcgaccactccgcctctgccgtcccacctgaccgcagaggagacccccctcttcctggccgaaccagccctccccaagggcttgccccctcctctccagcagcagcagcaaccccctccacagcagaaatcgctgatggaccagctccagggagtggtcagcaacttcagtaccgcgatcccggattttcacgcggtgctggcaggccccggtggtcccgggaacgggctgcggtccctgtacccgcccccgccacctccgcagcacctgcagatgctgccgctgcagctgagcacctttggggaggagctggtctccccgcccgcggacgacgacgacgacagcgagaggtttaagctcctccaggagtacgtgtatgagcacgagcgggaagggaacacggaagaagacgaactggaagaggaggaggaggacctgcaggcggccagcaaactgaccccggatgattcgcctgcgctgacgcctccgtcgcctttccgcgactcggtggcctcgggcagctcggtgcccagctcccccgtgtccgagtcggtgctctgcacccctcccaacgtatcctacgcctctgtcattctgcgggactacaagcaaagctcttccaccctgtaagggggaagggtccacatagaaaagcaagacaagccagagatctcccacacctccagagatgtgcaaacagctgggaggaaaagcctgggagtggggggcctcgtcgggaggacaggagaccgctgctgctgctgccgctactgctgctgctgccttaagtaggaagagagggaaggacaccaagcaaaaaatgttccaggccaggattcggattcttgaattactcgaagccttctctgggaagaaagggaattctgacaaagcacaattccatatggtatgtaacttttatcacaaatcaaatagtgacatcacaaacataatgtcctcttttgcacaattgtgcatagatatatatatgcccacacacactgggccatgcttgccaaggaacagcccacgtggacatgccagtcggatcatgagttcacctgatggcattcggagtgagctggtggagccagacagagcaggtgcggggaagggaagggcccaggccagacccatcccaaacggatgatgggatgatgggacagcagctccttgctcagaagcccttctccccgctgggctgacagactcctcatcttcaggagactcaggaatggagcggcacaggggtctctcttcatccactgcaacccatccagtgccagctttgagattgcacttgaagaaaggtgcatggaccccctgctgctctgcagattccctttatttaggaaaacaggaataagagcaaaattatcaccaaaaagtgcttcatcaggcgtgctacaggaggaaggagctagaaatagaacaatccatcagcatgagactttgaaaaaaaaacacatgatcagcttctcatgttccatattcacttattggcgatttggggaaaaggccggaacaagagattgttacgagagtggcagaaacccttttgtagattgacttgtgtttgtgccaagcgggctttccattgaccttcagttaaagaacaaaccatgtgacaaaattgttaccttccacttactgtagcaaataatacctacaagttgaacttctaagatgcgtatatgtacaatttggtgccattatttctcctacgtattagagaaacaaatccatctttgaatctaatggtgtactcatagcaactattactggtttaaatgacaaataattctatcctattgtcactgaagtccttgtaactagcgagtgaatgtgttcctgtgtccttgtatatgtgcgatcgtaaaatttgtgcaatgtaatgtcaaattgactggtcaatgtcaacctagtagtcaatctaactgcaattagaaattgtcttttgaatatactatatatattttttatgttccaataatgttttgtacatcattgtcatcaatatctacagaagctctttgacggtttgaatactatggctcaaggttttcatatgcagctcggatggacatttttcttctaagatggaacttatttttcagatattttctgatgtggagatatgttattaatgaagtggtttgaaaatttgttatattaaaagtgcacaaaaactgagagtgaaaataaaaggtacattttataagcttgcacacattattaacacataagattgaacaaagcatttagattattccaggttatatcatttttttaaagattttccacagctacttgagtgtctaacatacagtaacatctaactcagctaataatttgtaaaatctttatcaatcacattttgccttcttttaatttttatgttcatggacttttattcctgtgtcttggctgtcataactttttatttctgctatttgctgttgtgtaatatccatggacatgtaatccacttactccatctttacaatccctttttaccaccaataaaaggatttttcttgctgttttgatttcttctattatttgtggaatgaattataccccccttaaatatctttgtttatgccttatgttcagtcatattttaatatgcttccttcatattgaagctgctgatttctcagccaaaaatcatcttagaatctttaaatatccattgcatcatttgttcagaatttaacatccattccaatgttggaggcttgtattacttatatttcatcatattctattgccaagtttagtcagttccacaccaagaatgaactgcatttcctttaaaaattattttaaaacacctttattgaaaagatctcatgactgagatgtggactttggttccatgttttcattgtaagaaagcagagagcggaaaatcaatggctccagtgattaatagatgggtttttagtaattgacaaattcatgagggaaagcatatgatctctttattagtgaatcatgcttattttttactcttaatgccactaatatacatccctaatatcacagggcttgtgcattcagatttttaaaaaattaggatagataaggaaacaacttatattcaagtgtaagatgatatcaggttggtctaagacttttggtgaacacgttcattcaactgtgatcactttattactctgaatgcctactattatcctgattatggggtctcctgaataaatagagtattagtccttatgtcatcattgttcaaaattggagatgtacacatacataccctataccaagagggccgaaactcttcaccttgatgtatgttctgatacaagttgttcagcttcttgtaaatgtgttttccttcggcttgttactgccttttgtcaaataatcttgacaatgctgtataataaatattttctatttatt

SEQ ID NO: 9047 - DNA, 3756 bp, Homo sapiens
  source 1..3756: mol_type = unassigned DNA
gctggcaggctgtggacctcgtcctcaccaccatggtcgggctccttttgttttttttcccagcgatctttttggaggtgtcccttctccccagaagccccggcaggaaagtgttgctggcaggagcgtcgtctcagcgctcggtggccagaatggacggagatgtcatcattggagccctcttctcagtccatcaccagcctccggccgagaaagtgcccgagaggaagtgtggggagatcagggagcagtatggcatccagagggtggaggccatgttccacacgttggataagatcaacgcggacccggtcctcctgcccaacatcaccctgggcagtgagatccgggactcctgctggcactcttccgtggctctggaacagagcattgagttcattagggactctctgatttccattcgagatgagaaggatgggatcaaccggtgtctgcctgacggccagtccctccccccaggcaggactaagaagcccattgcgggagtgatcggtcccggctccagctctgtagccattcaagtgcagaacctgctccagctcttcgacatcccccagatcgcttattcagccacaagcatcgacctgagtgacaaaactttgtacaaatacttcctgagggttgtcccttctgacactttgcaggcaagggccatgcttgacatagtcaaacgttacaattggacctatgtctctgcagtccacacggaagggaattatggggagagcggaatggacgctttcaaagagctggctgcccaggaaggcctctgtatcgcccattctgacaaaatctacagcaacgctggggagaagagctttgaccgactcttgcgcaaactccgagagaggcttcccaaggctagagtggtggtctgcttctgtgaaggcatgacagtgcgaggactcctgagcgccatgcggcgccttggcgtcgtgggcgagttctcactcattggaagtgatggatgggcagacagagatgaagtcattgaaggttatgaggtggaagccaacgggggaatcacgataaagctgcagtctccagaggtcaggtcatttgatgattatttcctgaaactgaggctggacactaacacgaggaatccctggttccctgagttctggcaacatcggttccagtgccgccttccaggacaccttctggaaaatcccaactttaaacgaatctgcacaggcaatgaaagcttagaagaaaactatgtccaggacagtaagatggggtttgtcatcaatgccatctatgccatggcacatgggctgcagaacatgcaccatgccctctgccctggccacgtgggcctctgcgatgccatgaagcccatcgacggcagcaagctgctggacttcctcatcaagtcctcattcattggagtatctggagaggaggtgtggtttgatgagaaaggagacgctcctggaaggtatgatatcatgaatctgcagtacactgaagctaatcgctatgactatgtgcacgttggaacctggcatgaaggagtgctgaacattgatgattacaaaatccagatgaacaagagtggagtggtgcggtctgtgtgcagtgagccttgcttaaagggccagattaaggttatacggaaaggagaagtgagctgctgctggatttgcacggcctgcaaagagaatgaatatgtgcaagatgagttcacctgcaaagcttgtgacttgggatggtggcccaatgcagatctaacaggctgtgagcccattcctgtgcgctatcttgagtggagcaacatcgaatccattatagccatcgccttttcatgcctgggaatccttgttaccttgtttgtcaccctaatctttgtactgtaccgggacacaccagtggtcaaatcctccagtcgggagctctgctacatcatcctagctggcatcttccttggttatgtgtgcccattcactctcattgccaaacctactaccacctcctgctacctccagcgcctcttggttggcctctcctctgcgatgtgctactctgctttagtgactaaaaccaatcgtattgcacgcatcctggctggcagcaagaagaagatctgcacccggaagcccaggttcatgagtgcctgggctcaggtgatcattgcctcaattctgattagtgtgcaactaaccctggtggtaaccctgatcatcatggaaccccctatgcccattctgtcctacccaagtatcaaggaagtctaccttatctgcaataccagcaacctgggtgtggtggcccctttgggctacaatggactcctcatcatgagctgtacctactatgccttcaagacccgcaacgtgcccgccaacttcaacgaggccaaatatatcgcgttcaccatgtacaccacctgtatcatctggctagcttttgtgcccatttactttgggagcaactacaagatcatcacaacttgctttgcagtgagtctcagtgtaacagtggctctggggtgcatgttcactcccaagatgtacatcattattgccaagcctgagaggaatgtccgcagtgccttcaccacctctgatgttgtccgcatgcatgttggcgatggcaagctgccctgccgctccaacactttcctcaacatcttccgaagaaagaaggcaggggcagggaatgccaagaagaggcagccagaattctcgcccaccagccaatgtccgtcggcacatgtgcagctttgaaaacccccacactgcagtgaatgtgtggaggacaggtgcccaagggacagcatatgtggcaccgcctctctgtgcacgtgaagaccaatgagacggcctgcaaccaaacagccgtcatcaagcccctcactaaaagttaccaaggctctggcaagagcctgaccttttcagataccagcaccaagaccctttacaacgtagaggaggaggaggatgcccagccgattcgctttagcccgcctggtagcccttccatggtggtgcacaggcgcgtgccaagcgcggcgaccactccgcctctgccgtcccacctgaccgcagaggagacccccctcttcctggccgaaccagccctccccaagggcttgccccctcctctccagcagcagcagcaaccccctccacagcagaaatcgctgatggaccagctccagggagtggtcagcaacttcagtaccgcgatcccggattttcacgcggtgctggcaggccccggtggtcccgggaacgggctgcggtccctgtacccgcccccgccacctccgcagcacctgcagatgctgccgctgcagctgagcacctttggggaggagctggtctccccgcccgcggacgacgacgacgacagcgagaggtttaagctcctccaggagtacgtgtatgagcacgagcgggaagggaacacggaagaagacgaactggaagaggaggaggaggacctgcaggcggccagcaaactgaccccggatgattcgcctgcgctgacgcctccgtcgcctttccgcgactcggtggcctcgggcagctcggtgcccagctcccccgtgtccgagtcggtgctctgcacccctcccaacgtatcctacgcctctgtcattctgcgggactacaagcaaagctcttccaccctgtaagggggaagggtccacatagaaaagcaagacaagccagagatctcccacacctccagagatgtgcaaacagctgggaggaaaagcctggg

SEQ ID NO: 9048 - DNA, 6754 bp, Homo sapiens
  source 1..6754: mol_type = unassigned DNA
caggtactcaggtatgtctcaagtccatgtcctccaaacagactcagcatctagctcaccgctgccaacacgacttccactgtactcttgatcaatttaccttgatgcactaccggtgaagaacggggactcgaattcccttacaaacgcctccagcttgtagaggcggtcgtggaggacccagaggaggagacgaaggggaaggaggcggtggtggaggaggcaaaggccttggacgaccattgttggcgaggggcaccactccgggagaggcggcgctgggcgtcttgggggtgcgcgccgggagcctgcagcgggaccagcgtgggaacgcggctggcaggctgtggacctcgtcctcaccaccatggtcgggctccttttgttttttttcccagcgatctttttggaggtgtcccttctccccagaagccccggcaggaaagtgttgctggcaggagcgtcgtctcagcgctcggtggccagaatggacggagatgtcatcattggagccctcttctcagtccatcaccagcctccggccgagaaagtgcccgagaggaagtgtggggagatcagggagcagtatggcatccagagggtggaggccatgttccacacgttggataagatcaacgcggacccggtcctcctgcccaacatcaccctgggcagtgagatccgggactcctgctggcactcttccgtggctctggaacagagcattgagttcattagggactctctgatttccattcgagatgagaaggatgggatcaaccggtgtctgcctgacggccagtccctccccccaggcaggactaagaagcccattgcgggagtgatcggtcccggctccagctctgtagccattcaagtgcagaacctgctccagctcttcgacatcccccagatcgcttattcagccacaagcatcgacctgagtgacaaaactttgtacaaatacttcctgagggttgtcccttctgacactttgcaggcaagggccatgcttgacatagtcaaacgttacaattggacctatgtctctgcagtccacacggaagggaattatggggagagcggaatggacgctttcaaagagctggctgcccaggaaggcctctgtatcgcccattctgacaaaatctacagcaacgctggggagaagagctttgaccgactcttgcgcaaactccgagagaggcttcccaaggctagagtggtggtctgcttctgtgaaggcatgacagtgcgaggactcctgagcgccatgcggcgccttggcgtcgtgggcgagttctcactcattggaagtgatggatgggcagacagagatgaagtcattgaaggttatgaggtggaagccaacgggggaatcacgataaagctgcagtctccagaggtcaggtcatttgatgattatttcctgaaactgaggctggacactaacacgaggaatccctggttccctgagttctggcaacatcggttccagtgccgccttccaggacaccttctggaaaatcccaactttaaacgaatctgcacaggcaatgaaagcttagaagaaaactatgtccaggacagtaagatggggtttgtcatcaatgccatctatgccatggcacatgggctgcagaacatgcaccatgccctctgccctggccacgtgggcctctgcgatgccatgaagcccatcgacggcagcaagctgctggacttcctcatcaagtcctcattcattggagtatctggagaggaggtgtggtttgatgagaaaggagacgctcctggaaggtatgatatcatgaatctgcagtacactgaagctaatcgctatgactatgtgcacgttggaacctggcatgaaggagtgctgaacattgatgattacaaaatccagatgaacaagagtggagtggtgcggtctgtgtgcagtgagccttgcttaaagggccagattaaggttatacggaaaggagaagtgagctgctgctggatttgcacggcctgcaaagagaatgaatatgtgcaagatgagttcacctgcaaagcttgtgacttgggatggtggcccaatgcagatctaacaggctgtgagcccattcctgtgcgctatcttgagtggagcaacatcgaatccattatagccatcgccttttcatgcctgggaatccttgttaccttgtttgtcaccctaatctttgtactgtaccgggacacaccagtggtcaaatcctccagtcgggagctctgctacatcatcctagctggcatcttccttggttatgtgtgcccattcactctcattgccaaacctactaccacctcctgctacctccagcgcctcttggttggcctctcctctgcgatgtgctactctgctttagtgactaaaaccaatcgtattgcacgcatcctggctggcagcaagaagaagatctgcacccggaagcccaggttcatgagtgcctgggctcaggtgatcattgcctcaattctgattagtgtgcaactaaccctggtggtaaccctgatcatcatggaaccccctatgcccattctgtcctacccaagtatcaaggaagtctaccttatctgcaataccagcaacctgggtgtggtggcccctttgggctacaatggactcctcatcatgagctgtacctactatgccttcaagacccgcaacgtgcccgccaacttcaacgaggccaaatatatcgcgttcaccatgtacaccacctgtatcatctggctagcttttgtgcccatttactttgggagcaactacaagatcatcacaacttgctttgcagtgagtctcagtgtaacagtggctctggggtgcatgttcactcccaagatgtacatcattattgccaagcctgagaggaatgtccgcagtgccttcaccacctctgatgttgtccgcatgcatgttggcgatggcaagctgccctgccgctccaacactttcctcaacatcttccgaagaaagaaggcaggggcagggaatgccaattctaatggcaagtctgtgtcatggtctgaaccaggtggaggacaggtgcccaagggacagcatatgtggcaccgcctctctgtgcacgtgaagaccaatgagacggcctgcaaccaaacagccgtcatcaagcccctcactaaaagttaccaaggctctggcaagagcctgaccttttcagataccagcaccaagaccctttacaacgtagaggaggaggaggatgcccagccgattcgctttagcccgcctggtagcccttccatggtggtgcacaggcgcgtgccaagcgcggcgaccactccgcctctgccgtcccacctgaccgcagaggagacccccctcttcctggccgaaccagccctccccaagggcttgccccctcctctccagcagcagcagcaaccccctccacagcagaaatcgctgatggaccagctccagggagtggtcagcaacttcagtaccgcgatcccggattttcacgcggtgctggcaggccccggtggtcccgggaacgggctgcggtccctgtacccgcccccgccacctccgcagcacctgcagatgctgccgctgcagctgagcacctttggggaggagctggtctccccgcccgcggacgacgacgacgacagcgagaggtttaagctcctccaggagtacgtgtatgagcacgagcgggaagggaacacggaagaagacgaactggaagaggaggaggaggacctgcaggcggccagcaaactgaccccggatgattcgcctgcgctgacgcctccgtcgcctttccgcgactcggtggcctcgggcagctcggtgcccagctcccccgtgtccgagtcggtgctctgcacccctcccaacgtatcctacgcctctgtcattctgcgggactacaagcaaagctcttccaccctgtaagggggaagggtccacatagaaaagcaagacaagccagagatctcccacacctccagagatgtgcaaacagctgggaggaaaagcctgggagtggggggcctcgtcgggaggacaggagaccgctgctgctgctgccgctactgctgctgctgccttaagtaggaagagagggaaggacaccaagcaaaaaatgttccaggccaggattcggattcttgaattactcgaagccttctctgggaagaaagggaattctgacaaagcacaattccatatggtatgtaacttttatcacaaatcaaatagtgacatcacaaacataatgtcctcttttgcacaattgtgcatagatatatatatgcccacacacactgggccatgcttgccaaggaacagcccacgtggacatgccagtcggatcatgagttcacctgatggcattcggagtgagctggtggagccagacagagcaggtgcggggaagggaagggcccaggccagacccatcccaaacggatgatgggatgatgggacagcagctccttgctcagaagcccttctccccgctgggctgacagactcctcatcttcaggagactcaggaatggagcggcacaggggtctctcttcatccactgcaacccatccagtgccagctttgagattgcacttgaagaaaggtgcatggaccccctgctgctctgcagattccctttatttaggaaaacaggaataagagcaaaattatcaccaaaaagtgcttcatcaggcgtgctacaggaggaaggagctagaaatagaacaatccatcagcatgagactttgaaaaaaaaacacatgatcagcttctcatgttccatattcacttattggcgatttggggaaaaggccggaacaagagattgttacgagagtggcagaaacccttttgtagattgacttgtgtttgtgccaagcgggctttccattgaccttcagttaaagaacaaaccatgtgacaaaattgttaccttccacttactgtagcaaataatacctacaagttgaacttctaagatgcgtatatgtacaatttggtgccattatttctcctacgtattagagaaacaaatccatctttgaatctaatggtgtactcatagcaactattactggtttaaatgacaaataattctatcctattgtcactgaagtccttgtaactagcgagtgaatgtgttcctgtgtccttgtatatgtgcgatcgtaaaatttgtgcaatgtaatgtcaaattgactggtcaatgtcaacctagtagtcaatctaactgcaattagaaattgtcttttgaatatactatatatattttttatgttccaataatgttttgtacatcattgtcatcaatatctacagaagctctttgacggtttgaatactatggctcaaggttttcatatgcagctcggatggacatttttcttctaagatggaacttatttttcagatattttctgatgtggagatatgttattaatgaagtggtttgaaaatttgttatattaaaagtgcacaaaaactgagagtgaaaataaaaggtacattttataagcttgcacacattattaacacataagattgaacaaagcatttagattattccaggttatatcatttttttaaagattttccacagctacttgagtgtctaacatacagtaacatctaactcagctaataatttgtaaaatctttatcaatcacattttgccttcttttaatttttatgttcatggacttttattcctgtgtcttggctgtcataactttttatttctgctatttgctgttgtgtaatatccatggacatgtaatccacttactccatctttacaatccctttttaccaccaataaaaggatttttcttgctgttttgatttcttctattatttgtggaatgaattataccccccttaaatatctttgtttatgccttatgttcagtcatattttaatatgcttccttcatattgaagctgctgatttctcagccaaaaatcatcttagaatctttaaatatccattgcatcatttgttcagaatttaacatccattccaatgttggaggcttgtattacttatatttcatcatattctattgccaagtttagtcagttccacaccaagaatgaactgcatttcctttaaaaattattttaaaacacctttattgaaaagatctcatgactgagatgtggactttggttccatgttttcattgtaagaaagcagagagcggaaaatcaatggctccagtgattaatagatgggtttttagtaattgacaaattcatgagggaaagcatatgatctctttattagtgaatcatgcttattttttactcttaatgccactaatatacatccctaatatcacagggcttgtgcattcagatttttaaaaaattaggatagataaggaaacaacttatattcaagtgtaagatgatatcaggttggtctaagacttttggtgaacacgttcattcaactgtgatcactttattactctgaatgcctactattatcctgattatggggtctcctgaataaatagagtattagtccttatgtcatcattgttcaaaattggagatgtacacatacataccctataccaagagggccgaaactcttcaccttgatgtatgttctgatacaagttgttcagcttcttgtaaatgtgttttccttcggcttgttactgccttttgtcaaataatcttgacaatgctgtataataaatattttctatttatt

SEQ ID NO: 9049 - DNA, 4153 bp, Homo sapiens
  source 1..4153: mol_type = unassigned DNA
ttttctgggtgtgtgttagggaggctatgttcctgaccctccccctctggggtgagaaggggtccccgccatgtcctcggggttggtaggaggagaggattggagctgttttctccttgatgccaagatacgccaagctaggagcattctgccctttccacagtcatccaccgagaacaggcctgcaggacgggacaaggatcagagccttcctgcaaccccggccactgcctgctgtctgtgggcctggactgtgcgggcaactgtgcttggcccgagtgacaaggaggtgggagagggtagcagcatgggctacgcggttggctgccctcagtccccctgctgctgaagctgccctgcccatgcccacccaggccgtggggccaggggcctgccagggctaggagtgggcctgccgttcatgggtctctagggatttccgagatgcctgggaagagaggcttgggctggtggtgggcccggctgcccctttgcctgctcctcagcctttacggcccctggatgccttcctccctgggaaagcccaaaggccaccctcacatgaattccatccgcatagatggggacatcacactgggaggcctgttcccggtgcatggccggggctcagagggcaagccctgtggagaacttaagaaggaaaagggcatccaccggctggaggccatgctgttcgccctggatcgcatcaacaacgacccggacctgctgcctaacatcacgctgggcgcccgcattctggacacctgctccagggacacccatgccctcgagcagtcgctgacctttgtgcaggcgctcatcgagaaggatggcacagaggtccgctgtggcagtggcggcccacccatcatcaccaagcctgaacgtgtggtgggtgtcatcggtgcttcagggagctcggtctccatcatggtggccaacatccttcgcctcttcaagataccccagatcagctacgcctccacagcgccagacctgagtgacaacagccgctacgacttcttctcccgcgtggtgccctcggacacgtaccaggcccaggccatggtggacatcgtccgtgccctcaagtggaactatgtgtccacagtggcctcggagggcagctatggtgagagcggtgtggaggccttcatccagaagtcccgtgaggacgggggcgtgtgcatcgcccagtcggtgaagataccacgggagcccaaggcaggcgagttcgacaagatcatccgccgcctcctggagacttcgaacgccagggcagtcatcatctttgccaacgaggatgacatcaggcgtgtgctggaggcagcacgaagggccaaccagacaggccatttcttctggatgggctctgacagctggggctccaagattgcacctgtgctgcacctggaggaggtggctgagggtgctgtcacgatcctccccaagaggatgtccgtacgaggcttcgaccgctacttctccagccgcacgctggacaacaaccggcgcaacatctggtttgccgagttctgggaggacaacttccactgcaagctgagccgccacgccctcaagaagggcagccacgtcaagaagtgcaccaaccgtgagcgaattgggcaggattcagcttatgagcaggaggggaaggtgcagtttgtgatcgatgccgtgtacgccatgggccacgcgctgcacgccatgcaccgtgacctgtgtcccggccgcgtggggctctgcccgcgcatggaccctgtagatggcacccagctgcttaagtacatccgaaacgtcaacttctcaggcatcgcagggaaccctgtgaccttcaatgagaatggagatgcgcctgggcgctatgacatctaccaataccagctgcgcaacgattctgccgagtacaaggtcattggctcctggactgaccacctgcaccttagaatagagcggatgcactggccggggagcgggcagcagctgccccgctccatctgcagcctgccctgccaaccgggtgagcggaagaagacagtgaagggcatgccttgctgctggcactgcgagccttgcacagggtaccagtaccaggtggaccgctacacctgtaagacgtgtccctatgacatgcggcccacagagaaccgcacgggctgccggcccatccccatcatcaagcttgagtggggctcgccctgggccgtgctgcccctcttcctggccgtggtgggcatcgctgccacgttgttcgtggtgatcacctttgtgcgctacaacgacacgcccatcgtcaaggcctcgggccgtgaactgagctacgtgctgctggcaggcatcttcctgtgctatgccaccaccttcctcatgatcgctgagcccgaccttggcacctgctcgctgcgccgaatcttcctgggactagggatgagcatcagctatgcagccctgctcaccaagaccaaccgcatctaccgcatcttcgagcagggcaagcgctcggtcagtgccccacgcttcatcagccccgcctcacagctggccatcaccttcagcctcatctcgctgcagctgctgggcatctgtgtgtggtttgtggtggacccctcccactcggtggtggacttccaggaccagcggacactcgacccccgcttcgccaggggtgtgctcaagtgtgacatctcggacctgtcgctcatctgcctgctgggctacagcatgctgctcatggtcacgtgcaccgtgtatgccatcaagacacgcggcgtgcccgagaccttcaatgaggccaagcccattggcttcaccatgtacaccacttgcatcgtctggctggccttcatccccatcttctttggcacctcgcagtcggccgacaagctgtacatccagacgacgacgctgacggtctcggtgagtctgagcgcctcggtgtccctgggaatgctctacatgcccaaagtctacatcatcctcttccacccggagcagaacgtgcccaagcgcaagcgcagcctcaaagccgtcgttacggcggccaccatgtccaacaagttcacgcagaagggcaacttccggcccaacggagaggccaagtctgagctctgcgagaaccttgaggccccagcgctggccaccaaacagacttacgtcacttacaccaaccatgcaatctagcgagtccatggagctgagcagcaggaggaggagccgtgaccctgtggaaggtgcgtcgggccagggccacacccaagggcccagctgtcttgcctgcccgtgggcacccacggacgtggcttggtgctgaggatagcagagcccccagccatcactgctggcagcctgggcaaaccgggtgagcaacaggaggacgaggggccggggcggtgccaggctaccacaagaacctgcgtcttggaccattgcccctcccggccccaaaccacaggggctcaggtcgtgtgggccccagtgctagatctctccctcccttcgtctctgtctgtgctgttggcgacccctctgtctgtctccagccctgtctttctgttctcttatctctttgtttcaccttttccctctctggcgtccccggctgcttgtactcttggccttttctgtgtctcctttctggctcttgcctccgcctctctctctcatcctctttgtcctcagctcctcctgctttcttgggtcccaccagtgtcacttttctgccgttttctttcctgttctcctctgcttcattctcgtccagccattgctcccctctccctgccacccttccccagttcaccaaaccttacatgttgcaaaagagaaaaaaggaaaaaaaatcaaaacacaaaaaagccaaaacgaaaacaaatctcgagtgtgttgccaagtgctgcgtcctcctggtggcctctgtgtgtgtccctgtggcccgcagcctgcccgcctgccccgcccatctgccgtgtgtcttgcccgcctgccccgcccgtctgccgtctgtcttgcccgcctgcccgcctgcccctcctgccgaccacacggagttcagtgcctgggtgtttggtgatggttattgacgacaatgtgtagcgcatgattgtttttataccaagaacatttctaataaaaataaacacatggttttgca

SEQ ID NO: 9050 - DNA, 3590 bp, Homo sapiens
  source 1..3590: mol_type = unassigned DNA
aatcccagcgctttgctggaggatcgcttgagcccaggaattcaagaccagcctgggcaacatggcgagaccctgtctgtcccaaaacaaaaaaacagattttaattggtttgggatgcggcctggacacagggaaattttaaagctctctaggtaactccaatgtgcgtcgaggttgcgaaccgccggcctgtcacacagagggagctcaggagatgctgagagtgggaggatgccggcttgggagcctggagttgcagcttcctgcggctggcgcgcccctccttgctcccctctacgcctctgcatcgcaccccacccctgtaccccaccttcctcccaccaaggaaacctcacctgccgcctcccgcccaggtcctttggattttgccggtgtgtgtgggtgcgcacaagaggcccctccctgccaggagagcaggtgagcctggccgcgcacgaatccgagggggcggccgcccagctgggaagcagccctgaaatagacccccgccgcccccgctgcctccttccggaatctgctcagataccccagatcagctacgcctccacagcgccagacctgagtgacaacagccgctacgacttcttctcccgcgtggtgccctcggacacgtaccaggcccaggccatggtggacatcgtccgtgccctcaagtggaactatgtgtccacagtggcctcggagggcagctatggtgagagcggtgtggaggccttcatccagaagtcccgtgaggacgggggcgtgtgcatcgcccagtcggtgaagataccacgggagcccaaggcaggcgagttcgacaagatcatccgccgcctcctggagacttcgaacgccagggcagtcatcatctttgccaacgaggatgacatcaggcgtgtgctggaggcagcacgaagggccaaccagacaggccatttcttctggatgggctctgacagctggggctccaagattgcacctgtgctgcacctggaggaggtggctgagggtgctgtcacgatcctccccaagaggatgtccgtacgagaccgtgagcgaattgggcaggattcagcttatgagcaggaggggaaggtgcagtttgtgatcgatgccgtgtacgccatgggccacgcgctgcacgccatgcaccgtgacctgtgtcccggccgcgtggggctctgcccgcgcatggaccctgtagatggcacccagctgcttaagtacatccgaaacgtcaacttctcaggcatcgcagggaaccctgtgaccttcaatgagaatggagatgcgcctgggcgctatgacatctaccaataccagctgcgcaacgattctgccgagtacaaggtcattggctcctggactgaccacctgcaccttagaatagagcggatgcactggccggggagcgggcagcagctgccccgctccatctgcagcctgccctgccaaccgggtgagcggaagaagacagtgaagggcatgccttgctgctggcactgcgagccttgcacagggtaccagtaccaggtggaccgctacacctgtaagacgtgtccctatgacatgcggcccacagagaaccgcacgggctgccggcccatccccatcatcaagcttgagtggggctcgccctgggccgtgctgcccctcttcctggccgtggtgggcatcgctgccacgttgttcgtggtgatcacctttgtgcgctacaacgacacgcccatcgtcaaggcctcgggccgtgaactgagctacgtgctgctggcaggcatcttcctgtgctatgccaccaccttcctcatgatcgctgagcccgaccttggcacctgctcgctgcgccgaatcttcctgggactagggatgagcatcagctatgcagccctgctcaccaagaccaaccgcatctaccgcatcttcgagcagggcaagcgctcggtcagtgccccacgcttcatcagccccgcctcacagctggccatcaccttcagcctcatctcgctgcagctgctgggcatctgtgtgtggtttgtggtggacccctcccactcggtggtggacttccaggaccagcggacactcgacccccgcttcgccaggggtgtgctcaagtgtgacatctcggacctgtcgctcatctgcctgctgggctacagcatgctgctcatggtcacgtgcaccgtgtatgccatcaagacacgcggcgtgcccgagaccttcaatgaggccaagcccattggcttcaccatgtacaccacttgcatcgtctggctggccttcatccccatcttctttggcacctcgcagtcggccgacaagctgtacatccagacgacgacgctgacggtctcggtgagtctgagcgcctcggtgtccctgggaatgctctacatgcccaaagtctacatcatcctcttccacccggagcagaacgtgcccaagcgcaagcgcagcctcaaagccgtcgttacggcggccaccatgtccaacaagttcacgcagaagggcaacttccggcccaacggagaggccaagtctgagctctgcgagaaccttgaggccccagcgctggccaccaaacagacttacgtcacttacaccaaccatgcaatctagcgagtccatggagctgagcagcaggaggaggagccgtgaccctgtggaaggtgcgtcgggccagggccacacccaagggcccagctgtcttgcctgcccgtgggcacccacggacgtggcttggtgctgaggatagcagagcccccagccatcactgctggcagcctgggcaaaccgggtgagcaacaggaggacgaggggccggggcggtgccaggctaccacaagaacctgcgtcttggaccattgcccctcccggccccaaaccacaggggctcaggtcgtgtgggccccagtgctagatctctccctcccttcgtctctgtctgtgctgttggcgacccctctgtctgtctccagccctgtctttctgttctcttatctctttgtttcaccttttccctctctggcgtccccggctgcttgtactcttggccttttctgtgtctcctttctggctcttgcctccgcctctctctctcatcctctttgtcctcagctcctcctgctttcttgggtcccaccagtgtcacttttctgccgttttctttcctgttctcctctgcttcattctcgtccagccattgctcccctctccctgccacccttccccagttcaccaaaccttacatgttgcaaaagagaaaaaaggaaaaaaaatcaaaacacaaaaaagccaaaacgaaaacaaatctcgagtgtgttgccaagtgctgcgtcctcctggtggcctctgtgtgtgtccctgtggcccgcagcctgcccgcctgccccgcccatctgccgtgtgtcttgcccgcctgccccgcccgtctgccgtctgtcttgcccgcctgcccgcctgcccctcctgccgaccacacggagttcagtgcctgggtgtttggtgatggttattgacgacaatgtgtagcgcatgattgtttttataccaagaacatttctaataaaaataaacacatggtttt

SEQ ID NO: 9051 - DNA, 3471 bp, Homo sapiens
  source 1..3471: mol_type = unassigned DNA
agtaaacatgctcttctctagcacttgggacttcttggtgtcttaggagagacctgaggagctgtgtgtgtgtgtgcacgcacatgtgcgtgtgtgtgcatgcgtgtgtgtgtgttgtgtcctgtggccccaggccagcagggtgcctggcacagagcagccactccttccagagcgtaccctgttctctccagaatgcctgccgcctggccacttgcatcctctgaggactcagcccagtgtcactgcctttgggcagccttccctggcggccatctccctgcccacagggggcgtgtgcatcgcccagtcggtgaagataccacgggagcccaaggcaggcgagttcgacaagatcatccgccgcctcctggagacttcgaacgccagggcagtcatcatctttgccaacgaggatgacatcaggcgtgtgctggaggcagcacgaagggccaaccagacaggccatttcttctggatgggctctgacagctggggctccaagattgcacctgtgctgcacctggaggaggtggctgagggtgctgtcacgatcctccccaagaggatgtccgtacgaggcttcgaccgctacttctccagccgcacgctggacaacaaccggcgcaacatctggtttgccgagttctgggaggacaacttccactgcaagctgagccgccacgccctcaagaagggcagccacgtcaagaagtgcaccaaccgtgagcgaattgggcaggattcagcttatgagcaggaggggaaggtgcagtttgtgatcgatgccgtgtacgccatgggccacgcgctgcacgccatgcaccgtgacctgtgtcccggccgcgtggggctctgcccgcgcatggaccctgtagatggcacccagctgcttaagtacatccgaaacgtcaacttctcaggcatcgcagggaaccctgtgaccttcaatgagaatggagatgcgcctgggcgctatgacatctaccaataccagctgcgcaacgattctgccgagtacaaggtcattggctcctggactgaccacctgcaccttagaatagagcggatgcactggccggggagcgggcagcagctgccccgctccatctgcagcctgccctgccaaccgggtgagcggaagaagacagtgaagggcatgccttgctgctggcactgcgagccttgcacagggtaccagtaccaggtggaccgctacacctgtaagacgtgtccctatgacatgcggcccacagagaaccgcacgggctgccggcccatccccatcatcaagcttgagtggggctcgccctgggccgtgctgcccctcttcctggccgtggtgggcatcgctgccacgttgttcgtggtgatcacctttgtgcgctacaacgacacgcccatcgtcaaggcctcgggccgtgaactgagctacgtgctgctggcaggcatcttcctgtgctatgccaccaccttcctcatgatcgctgagcccgaccttggcacctgctcgctgcgccgaatcttcctgggactagggatgagcatcagctatgcagccctgctcaccaagaccaaccgcatctaccgcatcttcgagcagggcaagcgctcggtcagtgccccacgcttcatcagccccgcctcacagctggccatcaccttcagcctcatctcgctgcagctgctgggcatctgtgtgtggtttgtggtggacccctcccactcggtggtggacttccaggaccagcggacactcgacccccgcttcgccaggggtgtgctcaagtgtgacatctcggacctgtcgctcatctgcctgctgggctacagcatgctgctcatggtcacgtgcaccgtgtatgccatcaagacacgcggcgtgcccgagaccttcaatgaggccaagcccattggcttcaccatgtacaccacttgcatcgtctggctggccttcatccccatcttctttggcacctcgcagtcggccgacaagctgtacatccagacgacgacgctgacggtctcggtgagtctgagcgcctcggtgtccctgggaatgctctacatgcccaaagtctacatcatcctcttccacccggagcagaacgtgcccaagcgcaagcgcagcctcaaagccgtcgttacggcggccaccatgtccaacaagttcacgcagaagggcaacttccggcccaacggagaggccaagtctgagctctgcgagaaccttgaggccccagggagctcataggccactgactccacccaactctggccaggagaaaattcttcctttaactgagctggaccctgaccttcatgcctccctactggtcccatggtggacccctctgctcaccccatcctcaagcagtttgcttcgtccacatgtgatagactgatagttggacaccaaacttctgcctgtgttagtgggcttccagttacactgctgtgacaaagaggtcccagaactgagcagctcaaatcagacagatgtttgttgctctctgccgtaataggacatggtgggtgggtgggagtgaggacccaggatccttccatcttgttgctccattggctccctgaagattgaggctagatgacctcaatggttgttctgctcatggaagggaaaagagaagacgcatgggggaaagacccattttaattgaatgacatgggagctgcacacagtccttccatgtgtatttcatgaggaagaacacagtcagcgctggccaccaaacagacttacgtcacttacaccaaccatgcaatctagcgagtccatggagctgagcagcaggaggaggagccgtgaccctgtggaaggtgcgtcgggccagggccacacccaagggcccagctgtcttgcctgcccgtgggcacccacggacgtggcttggtgctgaggatagcagagcccccagccatcactgctggcagcctgggcaaaccgggtgagcaacaggaggacgaggggccggggcggtgccaggctaccacaagaacctgcgtcttggaccattgcccctcccggccccaaaccacaggggctcaggtcgtgtgggccccagtgctagatctctccctcccttcgtctctgtctgtgctgttggcgacccctctgtctgtctccagccctgtctttctgttctcttatctctttgtttcaccttttccctctctggcgtccccggctgcttgtactcttggccttttctgtgtctcctttctggctcttgcctccgcctctctctctcatcctctttgtcctcagctcctcctgctttcttgggtcccaccagtgtcacttttctgccgttttctttcctgttctcctctgcttcattctcgtccagccattgctcccctctccctgccacccttccccagttcaccaaaccttacatgttgcaaaagagaaaaaaggaaaaaaaatcaaaacacaaaaaagccaaaacg

SEQ ID NO: 9052 - DNA, 3176 bp, Homo sapiens
  source 1..3176: mol_type = unassigned DNA
agagatgctggagctgtggacctgggcggtcctggtggaggagtgcctgacacatcccagtctttcaccgtggtgcctgtggacagatgaggagactgaggctcacaaaggaggtgacttgcccaaggtcacacagcgaggcagcttctcacctatgggagttggactttgagccctccttggaaaagggggcatggctgtgccccttggggctccttgctgggcctctgccctgcctgcctgggctcctcccggcctcccccacagatcactgttgacaaggttactgagtcagcatgtaaaacctgcaaaaataccccagatcagctacgcctccacagcgccagacctgagtgacaacagccgctacgacttcttctcccgcgtggtgccctcggacacgtaccaggcccaggccatggtggacatcgtccgtgccctcaagtggaactatgtgtccacagtggcctcggagggcagctatggtgagagcggtgtggaggccttcatccagaagtcccgtgaggacgggggcgtgtgcatcgcccagtcggtgaagataccacgggagcccaaggcaggcgagttcgacaagatcatccgccgcctcctggagacttcgaacgccagggcagtcatcatctttgccaacgaggatgacatcaggcgtgtgctggaggcagcacgaagggccaaccagacaggccatttcttctggatgggctctgacagctggggctccaagattgcacctgtgctgcacctggaggaggtggctgagggtgctgtcacgatcctccccaagaggatgtccgtacgaggcttcgaccgctacttctccagccgcacgctggacaacaaccggcgcaacatctggtttgccgagttctgggaggacaacttccactgcaagctgagccgccacgccctcaagaagggcagccacgtcaagaagtgcaccaaccgtgagcgaattgggcaggattcagcttatgagcaggaggggaaggtgcagtttgtgatcgatgccgtgtacgccatgggccacgcgctgcacgccatgcaccgtgacctgtgtcccggccgcgtggggctctgcccgcgcatggaccctgtagatggcacccagctgcttaagtacatccgaaacgtcaacttctcaggcatcgcagggaaccctgtgaccttcaatgagaatggagatgcgcctgggcgctatgacatctaccaataccagctgcgcaacgattctgccgagtacaaggtcattggctcctggactgaccacctgcaccttagaatagagcggatgcactggccggggagcgggcagcagctgccccgctccatctgcagcctgccctgccaaccgggtgagcggaagaagacagtgaagggcatgccttgctgctggcactgcgagccttgcacagggtaccagtaccaggtggaccgctacacctgtaagacgtgtccctatgacatgcggcccacagagaaccgcacgggctgccggcccatccccatcatcaagcttgagtggggctcgccctgggccgtgctgcccctcttcctggccgtggtgggcatcgctgccacgttgttcgtggtgatcacctttgtgcgctacaacgacacgcccatcgtcaaggcctcgggccgtgaactgagctacgtgctgctggcaggcatcttcctgtgctatgccaccaccttcctcatgatcgctgagcccgaccttggcacctgctcgctgcgccgaatcttcctgggactagggatgagcatcagctatgcagccctgctcaccaagaccaaccgcatctaccgcatcttcgagcagggcaagcgctcggtcagtgccccacgcttcatcagccccgcctcacagctggccatcaccttcagcctcatctcgctgcagctgctgggcatctgtgtgtggtttgtggtggacccctcccactcggtggtggacttccaggaccagcggacactcgacccccgcttcgccaggggtgtgctcaagtgtgacatctcggacctgtcgctcatctgcctgctgggctacagcatgctgctcatggtcacgtgcaccgtgtatgccatcaagacacgcggcgtgcccgagaccttcaatgaggccaagcccattggcttcaccatgtacaccacttgcatcgtctggctggccttcatccccatcttctttggcacctcgcagtcggccgacaagctgtacatccagacgacgacgctgacggtctcggtgagtctgagcgcctcggtgtccctgggaatgctctacatgcccaaagtctacatcatcctcttccacccggagcagaacgtgcccaagcgcaagcgcagcctcaaagccgtcgttacggcggccaccatgtccaacaagttcacgcagaagggcaacttccggcccaacggagaggccaagtctgagctctgcgagaaccttgaggccccagcgctggccaccaaacagacttacgtcacttacaccaaccatgcaatctagcgagtccatggagctgagcagcaggaggaggagccgtgaccctgtggaaggtgcgtcgggccagggccacacccaagggcccagctgtcttgcctgcccgtgggcacccacggacgtggcttggtgctgaggatagcagagcccccagccatcactgctggcagcctgggcaaaccgggtgagcaacaggaggacgaggggccggggcggtgccaggctaccacaagaacctgcgtcttggaccattgcccctcccggccccaaaccacaggggctcaggtcgtgtgggccccagtgctagatctctccctcccttcgtctctgtctgtgctgttggcgacccctctgtctgtctccagccctgtctttctgttctcttatctctttgtttcaccttttccctctctggcgtccccggctgcttgtactcttggccttttctgtgtctcctttctggctcttgcctccgcctctctctctcatcctctttgtcctcagctcctcctgctttcttgggtcccaccagtgtcacttttctgccgttttctttcctgttctcctctgcttcattctcgtccagccattgctcccctctccctgccacccttccccagttcaccaaaccttacatgttgcaaaagag

SEQ ID NO: 9053 - DNA, 3850 bp, Homo sapiens
  source 1..3850: mol_type = unassigned DNA
tctgatgtaatggggcaagtctgtgtagaaggctcaggtggccccagcctggacctccaggtcatttggaagcccagcggtgcccagcctaggtgtttggtttgaggcattgtgttgagttgagtgggacccagaggagggcagcccttagataccaagaccggcttcaagattaatccctcatgcttttccatcgactgccaccaggggcttctggggtcttattctctgggggtctccagctcctggactccagtagggcaggtaactgtgtggctttgggtaagccacttctcttctctgagcttcagtttcctcatccgtcaaaggcagtggctgacacaagcatggcccacagatgctctgtaccacgaggtcgggtgagatttaaatacgtgaatgacatctgtcccctgccagcacttgagaggcacatctggggctggggatggctgggacaaagtgctcccagggtctctgatggccacccagcctggtcgtgaatcctgacaacatcaagtactgaccctctcctgatggttccagccagtggccatgcacgctgctcctaccaagggcctggtgatgggcatggggcccagggacaggagtcctgagaagcacatggatatgggtgtagcagggactgatgcctcagggtgggctctattcccagctttaaccctccaagaaacattgtgagcgggttacaataaaaataatcaacatttactaagcactaggtaccggatgttgtctttatatgcattacctcacttgttttataacagttctatgaaataggtaataccattatttccactttataggtgatgtatgttcatcacagagaggtccagtaactgacctaaggtcacacagcagtaagtggcagagctgagatttgaacccaggcagtctagctcctaagcatgatgccgtgctgcttctagctgctatatggggaaactgaggctcagagtacttaagtgacatatccagggtcaccagctggtaagtggagccaagactggcactgaagctgtcctgactgcacagcccatatccagaggctgggatcccagggctgggagtcaggctggggagcctgggcagcacccagcccccatctcccggagtgtatgttgggagagtggtggggagactcaggttcccctgcccaccccaactaactggtgcccctcctgcagggggcgtgtgcatcgcccagtcggtgaagataccacgggagcccaaggcaggcgagttcgacaagatcatccgccgcctcctggagacttcgaacgccagggcagtcatcatctttgccaacgaggatgacatcaggcgtgtgctggaggcagcacgaagggccaaccagacaggccatttcttctggatgggctctgacagctggggctccaagattgcacctgtgctgcacctggaggaggtggctgagggtgctgtcacgatcctccccaagaggatgtccgtacgaggcttcgaccgctacttctccagccgcacgctggacaacaaccggcgcaacatctggtttgccgagttctgggaggacaacttccactgcaagctgagccgccacgccctcaagaagggcagccacgtcaagaagtgcaccaaccgtgagcgaattgggcaggattcagcttatgagcaggaggggaaggtgcagtttgtgatcgatgccgtgtacgccatgggccacgcgctgcacgccatgcaccgtgacctgtgtcccggccgcgtggggctctgcccgcgcatggaccctgtagatggcacccagctgcttaagtacatccgaaacgtcaacttctcaggcatcgcagggaaccctgtgaccttcaatgagaatggagatgcgcctgggcgctatgacatctaccaataccagctgcgcaacgattctgccgagtacaaggtcattggctcctggactgaccacctgcaccttagaatagagcggatgcactggccggggagcgggcagcagctgccccgctccatctgcagcctgccctgccaaccgggtgagcggaagaagacagtgaagggcatgccttgctgctggcactgcgagccttgcacagggtaccagtaccaggtggaccgctacacctgtaagacgtgtccctatgacatgcggcccacagagaaccgcacgggctgccggcccatccccatcatcaagcttgagtggggctcgccctgggccgtgctgcccctcttcctggccgtggtgggcatcgctgccacgttgttcgtggtgatcacctttgtgcgctacaacgacacgcccatcgtcaaggcctcgggccgtgaactgagctacgtgctgctggcaggcatcttcctgtgctatgccaccaccttcctcatgatcgctgagcccgaccttggcacctgctcgctgcgccgaatcttcctgggactagggatgagcatcagctatgcagccctgctcaccaagaccaaccgcatctaccgcatcttcgagcagggcaagcgctcggtcagtgccccacgcttcatcagccccgcctcacagctggccatcaccttcagcctcatctcgctgcagctgctgggcatctgtgtgtggtttgtggtggacccctcccactcggtggtggacttccaggaccagcggacactcgacccccgcttcgccaggggtgtgctcaagtgtgacatctcggacctgtcgctcatctgcctgctgggctacagcatgctgctcatggtcacgtgcaccgtgtatgccatcaagacacgcggcgtgcccgagaccttcaatgaggccaagcccattggcttcaccatgtacaccacttgcatcgtctggctggccttcatccccatcttctttggcacctcgcagtcggccgacaagctgtacatccagacgacgacgctgacggtctcggtgagtctgagcgcctcggtgtccctgggaatgctctacatgcccaaagtctacatcatcctcttccacccggagcagaacgtgcccaagcgcaagcgcagcctcaaagccgtcgttacggcggccaccatgtccaacaagttcacgcagaagggcaacttccggcccaacggagaggccaagtctgagctctgcgagaaccttgaggccccagcgctggccaccaaacagacttacgtcacttacaccaaccatgcaatctagcgagtccatggagctgagcagcaggaggaggagccgtgaccctgtggaaggtgcgtcgggccagggccacacccaagggcccagctgtcttgcctgcccgtgggcacccacggacgtggcttggtgctgaggatagcagagcccccagccatcactgctggcagcctgggcaaaccgggtgagcaacaggaggacgaggggccggggcggtgccaggctaccacaagaacctgcgtcttggaccattgcccctcccggccccaaaccacaggggctcaggtcgtgtgggccccagtgctagatctctccctcccttcgtctctgtctgtgctgttggcgacccctctgtctgtctccagccctgtctttctgttctcttatctctttgtttcaccttttccctctctggcgtccccggctgcttgtactcttggccttttctgtgtctcctttctggctcttgcctccgcctctctctctcatcctctttgtcctcagctcctcctgctttcttgggtcccaccagtgtcacttttctgccgttttctttcctgttctcctctgcttcattctcgtccagccattgctcccctctccctgccacccttccccagttcaccaaaccttacatgttgc

SEQ ID NO: 9054 - DNA, 2983 bp, Homo sapiens
  source 1..2983: mol_type = unassigned DNA
agctgcccccaagccttggcagcctgagggtgcccatggggagccctgtctccgcttggctccttgcagtctgtggggcacagcgttcccctggagagaggctgttccttgtgggctcttactgtccatactcccagcctgccctggggggaacttcctgctatctcctcacctccaggcctgagctggaggaaggctgggcagaggagagctgccaggcaagacagatggcctgcagcctgggccagggaggggcaccactttgatctctgatgccctggggactcacgggctgcaggtgctaccagcccagcaccccggcacagcggggaggctgaggcagacacacgctcctggagagacatgtcatgtaagataccccagatcagctacgcctccacagcgccagacctgagtgacaacagccgctacgacttcttctcccgcgtggtgccctcggacacgtaccaggcccaggccatggtggacatcgtccgtgccctcaagtggaactatgtgtccacagtggcctcggagggcagctatggtgagagcggtgtggaggccttcatccagaagtcccgtgaggacgggggcgtgtgcatcgcccagtcggtgaagataccacgggagcccaaggcaggcgagttcgacaagatcatccgccgcctcctggagacttcgaacgccagggcagtcatcatctttgccaacgaggatgacatcaggcgtgtgctggaggcagcacgaagggccaaccagacaggccatttcttctggatgggctctgacagctggggctccaagattgcacctgtgctgcacctggaggaggtggctgagggtgctgtcacgatcctccccaagaggatgtccgtacgaggcttcgaccgctacttctccagccgcacgctggacaacaaccggcgcaacatctggtttgccgagttctgggaggacaacttccactgcaagctgagccgccacgccctcaagaagggcagccacgtcaagaagtgcaccaaccgtgagcgaattgggcaggattcagcttatgagcaggaggggaaggtgcagtttgtgatcgatgccgtgtacgccatgggccacgcgctgcacgccatgcaccgtgacctgtgtcccggccgcgtggggctctgcccgcgcatggaccctgtagatggcacccagctgcttaagtacatccgaaacgtcaacttctcaggcatcgcagggaaccctgtgaccttcaatgagaatggagatgcgcctgggcgctatgacatctaccaataccagctgcgcaacgattctgccgagtacaaggtcattggctcctggactgaccacctgcaccttagaatagagcggatgcactggccggggagcgggcagcagctgccccgctccatctgcagcctgccctgccaaccgggtgagcggaagaagacagtgaagggcatgccttgctgctggcactgcgagccttgcacagggtaccagtaccaggtggaccgctacacctgtaagacgtgtccctatgacatgcggcccacagagaaccgcacgggctgccggcccatccccatcatcaagcttgagtggggctcgccctgggccgtgctgcccctcttcctggccgtggtgggcatcgctgccacgttgttcgtggtgatcacctttgtgcgctacaacgacacgcccatcgtcaaggcctcgggccgtgaactgagctacgtgctgctggcaggcatcttcctgtgctatgccaccaccttcctcatgatcgctgagcccgaccttggcacctgctcgctgcgccgaatcttcctgggactagggatgagcatcagctatgcagccctgctcaccaagaccaaccgcatctaccgcatcttcgagcagggcaagcgctcggtcagtgccccacgcttcatcagccccgcctcacagctggccatcaccttcagcctcatctcgctgcagctgctgggcatctgtgtgtggtttgtggtggacccctcccactcggtggtggacttccaggaccagcggacactcgacccccgcttcgccaggggtgtgctcaagtgtgacatctcggacctgtcgctcatctgcctgctgggctacagcatgctgctcatggtcacgtgcaccgtgtatgccatcaagacacgcggcgtgcccgagaccttcaatgaggccaagcccattggcttcaccatgtacaccacttgcatcgtctggctggccttcatccccatcttctttggcacctcgcagtcggccgacaagctgtacatccagacgacgacgctgacggtctcggtgagtctgagcgcctcggtgtccctgggaatgctctacatgcccaaagtctacatcatcctcttccacccggagcagaacgtgcccaagcgcaagcgcagcctcaaagccgtcgttacggcggccaccatgtccaacaagttcacgcagaagggcaacttccggcccaacggagaggccaagtctgagctctgcgagaaccttgaggccccagcgctggccaccaaacagacttacgtcacttacaccaaccatgcaatctagcgagtccatggagctgagcagcaggaggaggagccgtgaccctgtggaaggtgcgtcgggccagggccacacccaagggcccagctgtcttgcctgcccgtgggcacccacggacgtggcttggtgctgaggatagcagagcccccagccatcactgctggcagcctgggcaaaccgggtgagcaacaggaggacgaggggccggggcggtgccaggctaccacaagaacctgcgtcttggaccattgcccctcccggccccaaaccacaggggctcaggtcgtgtgggccccagtgctagatctctccctcccttcgtctctgtctgtgctgttggcgacccctctgtctgtctccagccctgtctttctgttctcttatctctttg

SEQ ID NO: 9055 - DNA, 2574 bp, Homo sapiens
  source 1..2574: mol_type = unassigned DNA
aaatgccccagtccttccggctggctgcaagatggtgcaaactcttcccaagctatttccccatgatggcgccaagagaaaaaagaggacccttaggacttcagggccatgctttgggggtggaggacagataccccagatcagctacgcctccacagcgccagacctgagtgacaacagccgctacgacttcttctcccgcgtggtgccctcggacacgtaccaggcccaggccatggtggacatcgtccgtgccctcaagtggaactatgtgtccacagtggcctcggagggcagctatggtgagagcggtgtggaggccttcatccagaagtcccgtgaggacgggggcgtgtgcatcgcccagtcggtgaagataccacgggagcccaaggcaggcgagttcgacaagatcatccgccgcctcctggagacttcgaacgccagggcagtcatcatctttgccaacgaggatgacatcaggcgtgtgctggaggcagcacgaagggccaaccagacaggccatttcttctggatgggctctgacagctggggctccaagattgcacctgtgctgcacctggaggaggtggctgagggtgctgtcacgatcctccccaagaggatgtccgtacgaggcttcgaccgctacttctccagccgcacgctggacaacaaccggcgcaacatctggtttgccgagttctgggaggacaacttccactgcaagctgagccgccacgccctcaagaagggcagccacgtcaagaagtgcaccaaccgtgagcgaattgggcaggattcagcttatgagcaggaggggaaggtgcagtttgtgatcgatgccgtgtacgccatgggccacgcgctgcacgccatgcaccgtgacctgtgtcccggccgcgtggggctctgcccgcgcatggaccctgtagatggcacccagctgcttaagtacatccgaaacgtcaacttctcaggcatcgcagggaaccctgtgaccttcaatgagaatggagatgcgcctgggcgctatgacatctaccaataccagctgcgcaacgattctgccgagtacaaggtcattggctcctggactgaccacctgcaccttagaatagagcggatgcactggccggggagcgggcagcagctgccccgctccatctgcagcctgccctgccaaccgggtgagcggaagaagacagtgaagggcatgccttgctgctggcactgcgagccttgcacagggtaccagtaccaggtggaccgctacacctgtaagacgtgtccctatgacatgcggcccacagagaaccgcacgggctgccggcccatccccatcatcaagcttgagtggggctcgccctgggccgtgctgcccctcttcctggccgtggtgggcatcgctgccacgttgttcgtggtgatcacctttgtgcgctacaacgacacgcccatcgtcaaggcctcgggccgtgaactgagctacgtgctgctggcaggcatcttcctgtgctatgccaccaccttcctcatgatcgctgagcccgaccttggcacctgctcgctgcgccgaatcttcctgggactagggatgagcatcagctatgcagccctgctcaccaagaccaaccgcatctaccgcatcttcgagcagggcaagcgctcggtcagtgccccacgcttcatcagccccgcctcacagctggccatcaccttcagcctcatctcgctgcagctgctgggcatctgtgtgtggtttgtggtggacccctcccactcggtggtggacttccaggaccagcggacactcgacccccgcttcgccaggggtgtgctcaagtgtgacatctcggacctgtcgctcatctgcctgctgggctacagcatgctgctcatggtcacgtgcaccgtgtatgccatcaagacacgcggcgtgcccgagaccttcaatgaggccaagcccattggcttcaccatgtacaccacttgcatcgtctggctggccttcatccccatcttctttggcacctcgcagtcggccgacaagctgtacatccagacgacgacgctgacggtctcggtgagtctgagcgcctcggtgtccctgggaatgctctacatgcccaaagtctacatcatcctcttccacccggagcagaacgtgcccaagcgcaagcgcagcctcaaagccgtcgttacggcggccaccatgtccaacaagttcacgcagaagggcaacttccggcccaacggagaggccaagtctgagctctgcgagaaccttgaggccccagcgctggccaccaaacagacttacgtcacttacaccaaccatgcaatctagcgagtccatggagctgagcagcaggaggaggagccgtgaccctgtggaaggtgcgtcgggccagggccacacccaagggcccagctgtcttgcctgcccgtgggcacccacggacgtggcttggtgctgaggatagcagagcccccagccatcactgctggcagcctgggcaaaccgggtgagcaacaggaggacgaggggccggggcggtgccaggctaccac

SEQ ID NO: 9056 - DNA, 2978 bp, Homo sapiens
  source 1..2978: mol_type = unassigned DNA
gctttgctgtacttttctgggtgtgtgttagggaggctatgttcctgaccctccccctctggggtgagaaggggtccccgccatgtcctcggggttggtaggaggagaggattggagctgttttctccttgatgccaagatacgccaagctaggagcattctgccctttccacagtcatccaccgagaacaggcctgcaggacgggacaaggatcagagccttcctgcaaccccggccactgcctgctgtctgtgggcctggactgtgcgggcaactgtgcttggcccgagtgacaaggaggtgggagagggtagcagcatgggctacgcggttggctgccctcagtccccctgctgctgaagctgccctgcccatgcccacccaggccgtggggccaggggcctgccagggctaggagtgggcctgccgttcatgggtctctagggatttccgagatgcctgggaagagaggcttgggctggtggtgggcccggctgcccctttgcctgctcctcagcctttacggcccctggatgccttcctccctgggaaagcccaaaggccaccctcacatgaattccatccgcatagatggggacatcacactgggaggcctgttcccggtgcatggccggggctcagagggcaagccctgtggagaacttaagaaggaaaagggcatccaccggctggaggccatgctgttcgccctggatcgcatcaacaacgacccggacctgctgcctaacatcacgctgggcgcccgcattctggacacctgctccagggacacccatgccctcgagcagtcgctgacctttgtgcaggcgctcatcgagaaggatggcacagaggtccgctgtggcagtggcggcccacccatcatcaccaagcctgaacgtgtggtgggtgtcatcggtgcttcagggagctcggtctccatcatggtggccaacatccttcgcctcttcaagggggcgtgtgcatcgcccagtcggtgaagataccacgggagcccaaggcaggcgagttcgacaagatcatccgccgcctcctggagacttcgaacgccagggcagtcatcatctttgccaacgaggatgacatcaggcgtgtgctggaggcagcacgaagggccaaccagacaggccatttcttctggatgggctctgacagctggggctccaagattgcacctgtgctgcacctggaggaggtggctgagggtgctgtcacgatcctccccaagaggatgtccgtacgaggcttcgaccgctacttctccagccgcacgctggacaacaaccggcgcaacatctggtttgccgagttctgggaggacaacttccactgcaagctgagccgccacgccctcaagaagggcagccacgtcaagaagtgcaccaaccgtgagcgaattgggcaggattcagcttatgagcaggaggggaaggtgcagtttgtgatcgatgccgtgtacgccatgggccacgcgctgcacgccatgcaccgtgacctgtgtcccggccgcgtggggctctgcccgcgcatggaccctgtagatggcacccagctgcttaagtacatccgaaacgtcaacttctcaggcatcgcagggaaccctgtgaccttcaatgagaatggagatgcgcctgggcgctatgacatctaccaataccagctgcgcaacgattctgccgagtacaaggtcattggctcctggactgaccacctgcaccttagaatagagcggatgcactggccggggagcgggcagcagctgccccgctccatctgcagcctgccctgccaaccgggtgagcggaagaagacagtgaagggcatgccttgctgctggcactgcgagccttgcacagggtaccagtaccaggtggaccgctacacctgtaagacgtgtccctatgacatgcggcccacagagaaccgcacgggctgccggcccatccccatcatcaagcttgagtggggctcgccctgggccgtgctgcccctcttcctggccgtggtgggcatcgctgccacgttgttcgtggtgatcacctttgtgcgctacaacgacacgcccatcgtcaaggcctcgggccgtgaactgagctacgtgctgctggcaggcatcttcctgtgctatgccaccaccttcctcatgatcgctgagcccgaccttggcacctgctcgctgcgccgaatcttcctgggactagggatgagcatcagctatgcagccctgctcaccaagaccaaccgcatctaccgcatcttcgagcagggcaagcgctcggtcagtgccccacgcttcatcagccccgcctcacagctggccatcaccttcagcctcatctcgctgcagctgctgggcatctgtgtgtggtttgtggtggacccctcccactcggtggtggacttccaggaccagcggacactcgacccccgcttcgccaggggtgtgctcaagtgtgacatctcggacctgtcgctcatctgcctgctgggctacagcatgctgctcatggtcacgtgcaccgtgtatgccatcaagacacgcggcgtgcccgagaccttcaatgaggccaagcccattggcttcaccatgtacaccacttgcatcgtctggctggccttcatccccatcttctttggcacctcgcagtcggccgacaagctgtacatccagacgacgacgctgacggtctcggtgagtctgagcgcctcggtgtccctgggaatgctctacatgcccaaagtctacatcatcctcttccacccggagcagaacgtgcccaagcgcaagcgcagcctcaaagccgtcgttacggcggccaccatgtccaacaagttcacgcagaagggcaacttccggcccaacggagaggccaagtctgagctctgcgagaaccttgaggccccagcgctggccaccaaacagacttacgtcacttacaccaaccatgcaatctag

SEQ ID NO: 9057 - DNA, 570 bp, Homo sapiens
  source 1..570: mol_type = unassigned DNA
agagtgaccagatgctcagggcaggagtaggcagctggtctaaatccacagagcagaggaatagatctgattaatgagggagtcaagtcctgagggggcgtgtgcatcgcccagtcggtgaagataccacgggagcccaaggcaggcgagttcgacaagatcatccgccgcctcctggagacttcgaacgccagggcagtcatcatctttgccaacgaggatgacatcaggcgtgtgctggaggcagcacgaagggccaaccagacaggccatttcttctggatgggctctgacagctggggctccaagattgcacctgtgctgcacctggaggaggtggctgagggtgctgtcacgatcctccccaagaggatgtccgtacgaggcttcgaccgctacttctccagccgcacgctggacaacaaccggcgcaacatctggtttgccgagttctgggaggacaacttccactgcaagctgagccgccacgccctcaagaagggcagccacgtcaagaagtgcaccaaccgtgagcgaattgggcaggattcagcttatgagcaggagggg

SEQ ID NO: 9058 - DNA, 555 bp, Homo sapiens
  source 1..555: mol_type = unassigned DNA
agtggtaaggcctctggccgcctcggggttgatgtggacggccctagggccagcccacagcactgaactgacccctcctaacctgtatccagtcttgatgcacaccaggctgggcactttccagaaactacctctaacctccagggttccctcagtcactcagcaagcaccagtttggctcctaggccgtgccttgccctgttctaagcatggtggatatatagcagtgaagaaagagtccaatggcgcttggagtttttattctaatggggagacagacgatcaacaagacgagtgaatgatagaatatgtcagaacagaaatgtgcagaagaaacaaaacagacaataaaaagaacggaaagtgtgaggggaagggaaactgcaactgtgaagtggccagggacggcctgcttgcgcaggtgacatctgagccctcacatgagagggataggccgcacaggggaggggcagtgatcgggccattttacagatgggagaaccgaggcttagaggagaccgtgagcgaattgggcaggattcagcttatgagcag

SEQ ID NO: 9059 - DNA, 5822 bp, Homo sapiens
  source 1..5822: mol_type = unassigned DNA
gctcggtctccatcatggtggccaacatccttcgcctcttcaagataccccagatcagctacgcctccacagcgccagacctgagtgacaacagccgctacgacttcttctcccgcgtggtgccctcggacacgtaccaggcccaggccatggtggacatcgtccgtgccctcaagtggaactatgtgtccacagtggcctcggagggcagctatggtgagagcggtgtggaggccttcatccagaagtcccgtgaggacgggggcgtgtgcatcgcccagtcggtgaagataccacgggagcccaaggcaggcgagttcgacaagatcatccgccgcctcctggagacttcgaacgccagggcagtcatcatctttgccaacgaggatgacatcaggtgagggcaggtggcagcagggtgggcaccgggagccatgcaggtgtgggcaaagccacgggtcctgtcctgctggagaccttcccaggcgagcctgaccccaccctgggatccagagaggtgggtgctggtgagtgggtatgtgggcagggagacccacaggctagagcacaagctactgctatggggcactccttccctcccctctccatttcctgcatccattccacctgctagggatggctacctgggtgctttaacagagggctgaggccgtgagcttggggccggaccacttaggttctaatgctgttctcccacctactagctgtgtgaccccaggtgaatttcttaacctctctgggcctctgctgctaaaaaacaaatgagttaatgatacctgcctgatagtgtttgagaattcaatgcaggaatgtgcataaaaggcttagagtaaggtctggcgtgaaataggcacccagtaaatgtgggccacctcagcccctccctcctttctgtggtgagctcagagtacagagaagagctctgggctgtgtttggttctagtcttggcttaggctcagagagcccaacctgaggggagacacagctctgtcctcacggagccccaggataaggggagatacagccctgcctagaatctggcagggccctctagtccctgctggtcacctctccttcagagaggaggctgagagcagatgtggcccctgccaggtctcctcagatatctggcccgggctggcagagcctgctgtgccctcagactccccctcactggaccagccaaggctgctccgtgtacccagtccttcccaggaggcttcctcctattcctcaccagtgctcccaagccatttctcatgttctaacctggactccagagttgctgcaaaacagataccctcccaggccattggtgggtccctggagggatggaggagggcttctggaagatcatcacggcctcaaaagccaaaaggacaaactgcaatggttgtctcaggcagcgaaaggccagggaggggaggccctcaagccccatcctgacaccctcagagctgcacagaggcggcacccagtcccttgaggtgtgcaggtcccctgagttctggctctgaacgtgtatgatggccaccgctcagccagctcctggggaagcttctgagccaccgggccccactccctgacttcctgccccctactcccatcccaaagcctggtaagattaggctcccacaccgcacccagctatgtgcctcactccaggcctgctgtttttgaggacaccttcagctcagatggacccacattctgggagggggactgaaagcacttggccttttgtcccagcgaagaagcccctaggggagggctggaagggagctagactgacttccagagcaggctgcgggaagtggggtaggaggcgggggtcatttctggaaatccacacgcattttcagaagcaaacagaagtaaaaataaacccaggtgactctgcagggctggatgatcgggagctctggccatctcaggctggccggatgcagacgggtattaatagggtgtgggtgtgggttctgagagcagccttacctgccattagtggtgacctagggtgcgggggggctacaccagtgagcagagctggaaagcctcaggagttgggagatgatggagggtggggtgggatgagatggacaaggccagctcaggtgaaagctctggggcctggaaacatttgtttctccctggaagcccaggccctccagtcccagctggccgcctcctgcacaggcccagcagccaccccccagccctggagtctgtgccctggtcctcaccaacggaagggcctggacagtttgtagtatcacagcctctcacttgctgtgtgactgtgagcaagttccttgcctcctccctacctcagtctctttttgtgggagctgggttaggggaattctgcccattcctccttgtttttcccctctgagatgtctttgaggggccacttaattcatgcctccatgaagccctggctgagcgcttgctgtgggctcctcagccccgggctgggctcttgggtccctggtttgatttatattaccatcacaggcagactgggctgtgtgtgagcactgggcagctggctccacacccatctccctccatcacccactcccactcagggtgtggggagcagctctctgaaggacctggaattttggcacagagggcggtgaatgaagagggagctgtgggcagaaggcagcatgtgcagaggggtgagggcggcggttgtgtgatggtggatgcgtgtgagaatgggcaaggaatgtgggggtggatgagccaggaaggcatgcgtctcaggggaccggggctgggcagaggtggttgtggggcctgagtcagacgtggggcgggtgtggatctggaggggagaggtgtggtctttgcagggacagatgtaggcctggagaatcacgctgggcctgcagcaggcgtgggcccaggggcaggcaggttggatgaggcggtagccatgggtctatgagcaggtgagggcagcgggtagggggaatccatggcttggggtgaaagcatcggtgctgggacagttgtggaccctgggcttctgggggtgagggacgtgggcccaaagcaagtgtggccaggagtgggggcagtttcgtggacagacgcggctgggctgggctggtgtatgttcctacaggcgtgtgctggaggcagcacgaagggccaaccagacaggccatttcttctggatgggctctgacagctggggctccaagattgcacctgtgctgcacctggaggaggtggctgagggtgctgtcacgatcctccccaagaggatgtccgtacgaggcttcgaccgctacttctccagccgcacgctggacaacaaccggcgcaacatctggtttgccgagttctgggaggacaacttccactgcaagctgagccgccacgccctcaagaagggcagccacgtcaagaagtgcaccagtgagcacgcgggccgggcagggccgggcgggctctaggaggagccggggagggccgagcctgggggcctgaggccgagagtctccctttgtctgtcgtcggccggccgtggcaggacgtgcagttgggcctgcacctggggtggagttgggaggcctggggcggggccttgaggggcggggccacagcagatttggggtgtggccttgagatccttgggagtggtaaggcctctggccgcctcggggttgatgtggacggccctagggccagcccacagcactgaactgacccctcctaacctgtatccagtcttgatgcacaccaggctgggcactttccagaaactacctctaacctccagggttccctcagtcactcagcaagcaccagtttggctcctaggccgtgccttgccctgttctaagcatggtggatatatagcagtgaagaaagagtccaatggcgcttggagtttttattctaatggggagacagacgatcaacaagacgagtgaatgatagaatatgtcagaacagaaatgtgcagaagaaacaaaacagacaataaaaagaacggaaagtgtgaggggaagggaaactgcaactgtgaagtggccagggacggcctgcttgcgcaggtgacatctgagccctcacatgagagggataggccgcacaggggaggggcagtgatcgggccattttacagatgggagaaccgaggcttagaggaggtgagtagagggacttgaattcccatagatagagggcggtagagcatgacttgctcctgggtctgagccctagggcccccgccccctaggtagccatcatggcgtgtccacttcagatacatccggacaggggtctttgcgcgccctgggtctgggtggctctgcggcaggacccagactcaataacattggggtgctctggtgcctctcagcctgagtggtgcctaatcgaggatgatgagttatctcctgtattctctcagacttgatcgtgcagtttgggcaaagggcgggggacgcgctgcatggagtcttagctcctccagagccaggggagaagtgagtgtgatgagggtgggtggggagcatgctgccctctggtggccagagcccacggggacttgcagccactggaccactggggacccagagaagctcacagccaaacccacctgatctgcagagtgagtgctagtgtgtgagtgtgcccagtgtggcagtgtttgtgtatacacctgtggcacatgactttgcatgtgtgtgagctggtgttcctgagagagaagggatgtgtgtgcctgtgtcttatgtggggcttatgtattcctgggtgagctaaacataaacattgctgtttactatgtatccactgtgttcagacactttaaagacatcatctttaaaatgtgaaagacatttcactctcacagcaactctaggaactcttaagattcctgcactctagacgaggatatggagagtcagagagaccaagtgacttgcccgaggctgctcagcaaatgcctgcatcaggcagtaatcacaatagaggtgtgagaagtgaaaagatgcctgggtgtggaggctgagccctcatgggtggggtgaccgtgcatcctgtctcccgtgttctggtgtaattattgagagcatccccttcggttcttggaagtgcccaggcgggatggaaaattgtatgggcaccctgatttagatcagcagacctagatcagatcaggggtgagggtggggatggatgaggtggggatggggtggaaagactggaagtggtggcaagatggacagctggtgcctcctggacccagtgcctaggctgtcgaggggtctgggttgtcaaggggaagggctttctggaatcttctctttgagagggacaggaggggagaaggctttggtcagttcctgtaggctctgtccagactcctagtccttggggcaggattcaagaaactctccagcagtcctaagggaggcgtttggtctgattgtcagctcaggtggggaaggaggactggagcagggttcagaagagcacagagctcggctgggcgtggtggcacatgcctgtaatcccagcactttggggggccgaggcgggcggagttcatctgaggtcaggagttcaagaccagcttggtcaacatgctgaaaccccgtctctactaaaaatacaaaaattagccgggtttagtggtgggcacctgtaatcccagctactcggggggccgaggtacgagaattgcttgagcctggggaagtggaggttgcagtgagccgagattgtgccagtgcactccagcctgggcaacagagtgatattctgtctc

SEQ ID NO: 9060 - DNA, 1004 bp, Homo sapiens
  source 1..1004: mol_type = unassigned DNA
gcaggacgggacaaggatcagagccttcctgcaaccccggccactgcctgctgtctgtgggcctggactgtgcgggcaactgtgcttggcccgagtgacaaggagatggggacatcacactgggaggcctgttcccggtgcatggccggggctcagagggcaagccctgtggagaacttaagaaggaaaagggcatccaccggctggaggccatgctgttcgccctggatcgcatcaacaacgacccggacctgctgcctaacatcacgctgggcgcccgcattctggacacctgctccagggacacccatgccctcgagcagtcgctgacctttgtgcaggcgctcatcgagaaggatggcacagaggtccgctgtggcagtggcggcccacccatcatcaccaagcctgaacgtgtggtgggtgtcatcggtgcttcagggagctcggtctccatcatggtggccaacatccttcgcctcttcaagataccccagatcagctacgcctccacagcgccagacctgagtgacaacagccgctacgacttcttctcccgcgtggtgccctcggacacgtaccaggcccaggccatggtggacatcgtccgtgccctcaagtggaactatgtgtccacagtggcctcggagggcagctatggtgagagcggtgtggaggccttcatccagaagtcccgtgaggacggtgagtcaaacgcctggccgcagagtcatgccaggctcgggggtgtcccggcacagtgactgacccaccaggagctcccagccggggcctgatacaggctctgactgcctggctgttgccaggtgggcctcggcctcttctttgagcactgtggtttggtccatggcctcactgggctctgggtgactccggtcaacggcgactgtgaggcctttgcagacgtgggtgtgcagatgaggggactgttgacctccctggtgcaggagcctgcggggcggccgctctcctcacagcagagg

SEQ ID NO: 9061 - DNA, 6670 bp, Homo sapiens
  source 1..6670: mol_type = unassigned DNA
gcagtgcctgacacatcccagtctttcaccgtggtgcctgtggacagatgaggagactgaggctcacaaaggaggtgacttgcccaaggtcacacagcgaggcagcttctcacctatgggagttggactttgagccctccttggaaaagggggcatggctgtgccccttggggctccttgctgggcctctgccctgcctgcctgggctcctcccggcctcccccacagatcactgttgacaaggttactgagtcagcatgtaaaacctgcaaaaataccccagatcagctacgcctccacagcgccagacctgagtgacaacagccgctacgacttcttctcccgcgtggtgccctcggacacgtaccaggcccaggccatggtggacatcgtccgtgccctcaagtggaactatgtgtccacagtggcctcggagggcagctatggtgagagcggtgtggaggccttcatccagaagtcccgtgaggacgggggcgtgtgcatcgcccagtcggtgaagataccacgggagcccaaggcaggcgagttcgacaagatcatccgccgcctcctggagacttcgaacgccagggcagtcatcatctttgccaacgaggatgacatcaggcgtgtgctggaggcagcacgaagggccaaccagacaggccatttcttctggatgggctctgacagctggggctccaagattgcacctgtgctgcacctggaggaggtggctgagggtgctgtcacgatcctccccaagaggatgtccgtacgaggcttcgaccgctacttctccagccgcacgctggacaacaaccggcgcaacatctggtttgccgagttctgggaggacaacttccactgcaagctgagccgccacgccctcaagaagggcagccacgtcaagaagtgcaccaaccgtgagcgaattgggcaggattcagcttatgagcaggaggggaaggtgcagtttgtgatcgatgccgtgtacgccatgggccacgcgctgcacgccatgcaccgtgacctgtgtcccggccgcgtggggctctgcccgcgcatggaccctgtagatggcacccagctgcttaagtacatccgaaacgtcaacttctcaggcatcgcagggaaccctgtgaccttcaatgagaatggagatgcgcctgggcgctatgacatctaccaataccagctgcgcaacgattctgccgagtacaaggtcattggctcctggactgaccacctgcaccttagaatagagcggatgcactggccggggagcgggcagcagctgccccgctccatctgcagcctgccctgccaaccgggtgagcggaagaagacagtgaagggcatgccttgctgctggcactgcgagccttgcacagggtaccagtaccaggtggaccgctacacctgtaagacgtgtccctatgacatgcggcccacagagaaccgcacgggctgccggcccatccccatcatcaagcttgagtggggctcgccctgggccgtgctgcccctcttcctggccgtggtgggcatcgctgccacgttgttcgtggtgatcacctttgtgcgctacaacgacacgcccatcgtcaaggcctcgggccgtgaactgagctacgtgctgctggcaggcatcttcctgtgctatgccaccaccttcctcatgatcgctgagcccgaccttggcacctgctcgctgcgccgaatcttcctgggactagggatgagcatcagctatgcagccctgctcaccaagaccaaccgcatctaccgcatcttcgagcagggcaagcgctcggtcagtgccccacgcttcatcagccccgcctcacagctggccatcaccttcagcctcatctcgctgcagctgctgggcatctgtgtgtggtttgtggtggacccctcccactcggtggtggacttccaggaccagcggacactcgacccccgcttcgccaggggtgtgctcaagtgtgacatctcggacctgtcgctcatctgcctgctgggctacagcatgctgctcatggtcacgtgcaccgtgtatgccatcaagacacgcggcgtgcccgagaccttcaatgaggccaagcccattggcttcaccatgtacaccacttgcatcgtctggctggccttcatccccatcttctttggcacctcgcagtcggccgacaagctgtacatccagacgacgacgctgacggtctcggtgagtctgagcgcctcggtgtccctgggaatgctctacatgcccaaagtctacatcatcctcttccacccggagcagaacgtgcccaagcgcaagcgcagcctcaaagccgtcgttacggcggccaccatgtccaacaagttcacgcagaagggcaacttccggcccaacggagaggccaagtctgagctctgcgagaaccttgaggccccagcgctggccaccaaacagacttacgtcacttacaccaaccatgcaatctagcgagtccatggagctgagcagcaggaggaggagccgtgaccctgtggaaggtgcgtcgggccagggccacacccaagggcccagctgtcttgcctgcccgtgggcacccacggacgtggcttggtgctgaggatagcagagcccccagccatcactgctggcagcctgggcaaaccgggtgagcaacaggaggacgaggggccggggcggtgccaggctaccacaagaacctgcgtcttggaccattgcccctcccggccccaaaccacaggggctcaggtcgtgtgggccccagtgctagatctctccctcccttcgtctctgtctgtgctgttggcgacccctctgtctgtctccagccctgtctttctgttctcttatctctttgtttcaccttttccctctctggcgtccccggctgcttgtactcttggccttttctgtgtctcctttctggctcttgcctccgcctctctctctcatcctctttgtcctcagctcctcctgctttcttgggtcccaccagtgtcacttttctgccgttttctttcctgttctcctctgcttcattctcgtccagccattgctcccctctccctgccacccttccccagttcaccaaaccttacatgttgcaaaagagaaaaaaggaaaaaaaatcaaaacacaaaaaagccaaaacgaaaacaaatctcgagtgtgttgccaagtgctgcgtcctcctggtggcctctgtgtgtgtccctgtggcccgcagcctgcccgcctgccccgcccatctgccgtgtgtcttgcccgcctgccccgcccgtctgccgtctgtcttgcccgcctgcccgcctgcccctcctgccgaccacacggagttcagtgcctgggtgtttggtgatggttattgacgacaatgtgtagcgcatgattgtttttataccaagaacatttctaataaaaataaacacatggttttgcacccgggctccacatccactgagggtcctgccatgggaccacaggctcagcctgcagctggagggcttagacctagagggaagcgggaactgggctctggagacccagggcttgggggctgtggagactgctccctaggctgggatctagtgtggtgtggtgaggccttgggcatggaggggccagattcccaggtaaggggcagggacattgcaggaaattccaggaatcagcacctagtagtcccctaattagggggtatgctctgtcccctgccctgcagccctgggagggtaacatttctgccttgcctgtcctctgtctcacacccctcacacctgggactgcccttccacccctgcccccataacctgtgcctctctccttccagccaggaagtcctcttcttgagaagttagcttcccgggctgccagcactcatagccgtcccctcctgcttgtgttggctccaggctcgggtgctaagaagatgtgtgtctgtcctggagatcagtgtgttgttatgtgtccacgtgggcccacaagtgcacggcacaggcatggccgtgtggctgtgttggctgtgttggctgtgtgtctgtgtgcacgtccagcgcctccatgcgcatgcgtgcctgtcttgtttgcgtgtctgatcatctgtttgggccccggtggctcatgcagatgcctgtctcaggcccatggcgagtgttcacctcagctggcttccctggcaggttgggaggtgggaaacaggagcgcttaggggctgggctctggctggggtaaattatagagccagaaacacaatgaggccataggcagcagctggagcctgggctgcctgtgccgtcccctcctgccctgcccctgggtcctgcaccccctcccacctccaggctagctgacagcgctatggagcacagtggaagggactggaggaaccctaggcagggggccacgcagggacagagtatgagagtgtgtgtataactgaggctgggacattgaatcatgccaggtatgtcttctccatcagcccactcttactcctggcctgggcatctcacacatctgtgcataggaaatctcttcttccctggggtctgtgtgcagcacctagtagatgctcaataaatgtttgtgtgagggaaggagacaggaaaggaagtgtctcgctgatcatcttgcggaatggttcctaagacctctgcccaggaaagattccacccagtgctccagcccggtcaggcagaactaggttgccagatcaagggtatctcccaaaagcttccagggcagttgggggtgggggggtggggggtagggatggggaatgcagaagcgggtgcagccagctctcccccagggtgactctggcagcacccccatcctgggcaccctgcctgctctgtggctcacgcccctcctgaagtgactgatgctctgaggcccaaggctaggtccagggcagggcctgcaggggtttcatgctcagtccaggacttgcctaggtccccctacatctgtggggcccccatctaggttctaacaggagaatcacctctccaagggggatgctgcccctcggctccccttggctctcaggaggggccctcagggactaccagtcccctgccagtgggaagaaatagccctgccctcagggagcttccagtgtgatgggggagatacagcagactgtgtcccaaagtaaaatgactgttagaatgaggtgggtggaggagggaagccttgggtgggtgtgactttgggcatctgagcctggggtgcagaggtgggctctgtgggcctgaggtggacaggagggaaccaggccctagcaagacttttgccagctagacctgctgcagcagttgggagggtgggtgctgctggagtcctgggtccatcacctagaaggctcaggccagtgcagccagggctggggcccacagctggcctgggtgggacctgccctgatgcccatggcaggagggacgcctggcccttcacaattggcttggctgctcacctttgctctcatcctcaattattaatgactggagaaagctgctaagtatcttcagaatgttagatttcaacaagatggggggttcagggtccctggcaccctggatagggagccagcggcccctagagacctttgctgtgtgcagggggtatgtgctcacccccgtggcctcagcctcctcaatgtctgaatgaaggattgggctagcagacatcccaccccacagcacactttctaaccagcaggggaacttctagacaatagagacgctgggctccctccagaacactggacctgaacttctggggggagggctgggcacgggcatattttaaaagctccccagcagatgggccgtgcagtcaagtgggccaagagtggcaccagactttggggcttgtgaagtcaggagggagcaacagtgcccactcgagcttgcctggggctcaagcccaaggctgggctgctgccagcctgagcagacacccaggagcttccaggccagctggatgcacagggcacctttgtggaactcctaggaccctggggagacccacctcaggagcagagtctcaggtcccttccggctctgaggggctgttctgagctctaatgtcttatggtctgcccctcccatccttacttctcaggccctggaggcagaggcatagagccaggcaggacagaggtctcagtgggccacatgccagctgcccccacactgcctcagcctccaggcctccaaggggtcctggggagcccctgagaagatgctgagcctgcataaggctgggcgcccctctttctgacaccctcactggctccacggctcccccttcccatcccaggtttccatctgcccactgaacagggaggggaaactgaggcactcccctggcactgagggctccttctgtcatcctgcctgccctggatggtcctggctgcccctcagggcttggccctggcactgtgagcctcacagggctcagacccccacccccaacccagcactaaatggcactcggcaccagaatctcacttcagttggcaaaagcagcaattagcatgtaatgaggcttcttgctttatttttaggtaacctccaaggccctgcctgtgtaattcagcccgccattgctcggtggataattaaagcatgtcaccat

SEQ ID NO: 9062 - DNA, 7275 bp, Homo sapiens
  source 1..7275: mol_type = unassigned DNA
agtgacgcaccagggtgggagtagcgcgcccctctgcgtccctgtgctttgctgtacttttctgggtgtgtgttagggaggctatgttcctgaccctccccctctggggtgagaaggggtccccgccatgtcctcggggttggtaggaggagaggattggagctgttttctccttgatgccaagatacgccaagctaggagcattctgccctttccacagtcatccaccgagaacaggcctgcaggacgggacaaggatcagagccttcctgcaaccccggccactgcctgctgtctgtgggcctggactgtgcgggcaactgtgcttggcccgagtgacaaggaggtgggagagggtagcagcatgggctacgcggttggctgccctcagtccccctgctgctgaagctgccctgcccatgcccacccaggccgtggggccaggggcctgccagggctaggagtgggcctgccgttcatgggtctctagggatttccgagatgcctgggaagagaggcttgggctggtggtgggcccggctgcccctttgcctgctcctcagcctttacggcccctggatgccttcctccctgggaaagcccaaaggccaccctcacatgaattccatccgcatagatggggacatcacactgggaggcctgttcccggtgcatggccggggctcagagggcaagccctgtggagaacttaagaaggaaaagggcatccaccggctggaggccatgctgttcgccctggatcgcatcaacaacgacccggacctgctgcctaacatcacgctgggcgcccgcattctggacacctgctccagggacacccatgccctcgagcagtcgctgacctttgtgcaggcgctcatcgagaaggatggcacagaggtccgctgtggcagtggcggcccacccatcatcaccaagcctgaacgtgtggtgggtgtcatcggtgcttcagggagctcggtctccatcatggtggccaacatccttcgcctcttcaagataccccagatcagctacgcctccacagcgccagacctgagtgacaacagccgctacgacttcttctcccgcgtggtgccctcggacacgtaccaggcccaggccatggtggacatcgtccgtgccctcaagtggaactatgtgtccacagtggcctcggagggcagctatggtgagagcggtgtggaggccttcatccagaagtcccgtgaggacgggggcgtgtgcatcgcccagtcggtgaagataccacgggagcccaaggcaggcgagttcgacaagatcatccgccgcctcctggagacttcgaacgccagggcagtcatcatctttgccaacgaggatgacatcaggcgtgtgctggaggcagcacgaagggccaaccagacaggccatttcttctggatgggctctgacagctggggctccaagattgcacctgtgctgcacctggaggaggtggctgagggtgctgtcacgatcctccccaagaggatgtccgtacgagaccgtgagcgaattgggcaggattcagcttatgagcaggaggggaaggtgcagtttgtgatcgatgccgtgtacgccatgggccacgcgctgcacgccatgcaccgtgacctgtgtcccggccgcgtggggctctgcccgcgcatggaccctgtagatggcacccagctgcttaagtacatccgaaacgtcaacttctcaggcatcgcagggaaccctgtgaccttcaatgagaatggagatgcgcctgggcgctatgacatctaccaataccagctgcgcaacgattctgccgagtacaaggtcattggctcctggactgaccacctgcaccttagaatagagcggatgcactggccggggagcgggcagcagctgccccgctccatctgcagcctgccctgccaaccgggtgagcggaagaagacagtgaagggcatgccttgctgctggcactgcgagccttgcacagggtaccagtaccaggtggaccgctacacctgtaagacgtgtccctatgacatgcggcccacagagaaccgcacgggctgccggcccatccccatcatcaagcttgagtggggctcgccctgggccgtgctgcccctcttcctggccgtggtgggcatcgctgccacgttgttcgtggtgatcacctttgtgcgctacaacgacacgcccatcgtcaaggcctcgggccgtgaactgagctacgtgctgctggcaggcatcttcctgtgctatgccaccaccttcctcatgatcgctgagcccgaccttggcacctgctcgctgcgccgaatcttcctgggactagggatgagcatcagctatgcagccctgctcaccaagaccaaccgcatctaccgcatcttcgagcagggcaagcgctcggtcagtgccccacgcttcatcagccccgcctcacagctggccatcaccttcagcctcatctcgctgcagctgctgggcatctgtgtgtggtttgtggtggacccctcccactcggtggtggacttccaggaccagcggacactcgacccccgcttcgccaggggtgtgctcaagtgtgacatctcggacctgtcgctcatctgcctgctgggctacagcatgctgctcatggtcacgtgcaccgtgtatgccatcaagacacgcggcgtgcccgagaccttcaatgaggccaagcccattggcttcaccatgtacaccacttgcatcgtctggctggccttcatccccatcttctttggcacctcgcagtcggccgacaagctgtacatccagacgacgacgctgacggtctcggtgagtctgagcgcctcggtgtccctgggaatgctctacatgcccaaagtctacatcatcctcttccacccggagcagaacgtgcccaagcgcaagcgcagcctcaaagccgtcgttacggcggccaccatgtccaacaagttcacgcagaagggcaacttccggcccaacggagaggccaagtctgagctctgcgagaaccttgaggccccagcgctggccaccaaacagacttacgtcacttacaccaaccatgcaatctagcgagtccatggagctgagcagcaggaggaggagccgtgaccctgtggaaggtgcgtcgggccagggccacacccaagggcccagctgtcttgcctgcccgtgggcacccacggacgtggcttggtgctgaggatagcagagcccccagccatcactgctggcagcctgggcaaaccgggtgagcaacaggaggacgaggggccggggcggtgccaggctaccacaagaacctgcgtcttggaccattgcccctcccggccccaaaccacaggggctcaggtcgtgtgggccccagtgctagatctctccctcccttcgtctctgtctgtgctgttggcgacccctctgtctgtctccagccctgtctttctgttctcttatctctttgtttcaccttttccctctctggcgtccccggctgcttgtactcttggccttttctgtgtctcctttctggctcttgcctccgcctctctctctcatcctctttgtcctcagctcctcctgctttcttgggtcccaccagtgtcacttttctgccgttttctttcctgttctcctctgcttcattctcgtccagccattgctcccctctccctgccacccttccccagttcaccaaaccttacatgttgcaaaagagaaaaaaggaaaaaaaatcaaaacacaaaaaagccaaaacgaaaacaaatctcgagtgtgttgccaagtgctgcgtcctcctggtggcctctgtgtgtgtccctgtggcccgcagcctgcccgcctgccccgcccatctgccgtgtgtcttgcccgcctgccccgcccgtctgccgtctgtcttgcccgcctgcccgcctgcccctcctgccgaccacacggagttcagtgcctgggtgtttggtgatggttattgacgacaatgtgtagcgcatgattgtttttataccaagaacatttctaataaaaataaacacatggttttgcacccgggctccacatccactgagggtcctgccatgggaccacaggctcagcctgcagctggagggcttagacctagagggaagcgggaactgggctctggagacccagggcttgggggctgtggagactgctccctaggctgggatctagtgtggtgtggtgaggccttgggcatggaggggccagattcccaggtaaggggcagggacattgcaggaaattccaggaatcagcacctagtagtcccctaattagggggtatgctctgtcccctgccctgcagccctgggagggtaacatttctgccttgcctgtcctctgtctcacacccctcacacctgggactgcccttccacccctgcccccataacctgtgcctctctccttccagccaggaagtcctcttcttgagaagttagcttcccgggctgccagcactcatagccgtcccctcctgcttgtgttggctccaggctcgggtgctaagaagatgtgtgtctgtcctggagatcagtgtgttgttatgtgtccacgtgggcccacaagtgcacggcacaggcatggccgtgtggctgtgttggctgtgttggctgtgtgtctgtgtgcacgtccagcgcctccatgcgcatgcgtgcctgtcttgtttgcgtgtctgatcatctgtttgggccccggtggctcatgcagatgcctgtctcaggcccatggcgagtgttcacctcagctggcttccctggcaggttgggaggtgggaaacaggagcgcttaggggctgggctctggctggggtaaattatagagccagaaacacaatgaggccataggcagcagctggagcctgggctgcctgtgccgtcccctcctgccctgcccctgggtcctgcaccccctcccacctccaggctagctgacagcgctatggagcacagtggaagggactggaggaaccctaggcagggggccacgcagggacagagtatgagagtgtgtgtataactgaggctgggacattgaatcatgccaggtatgtcttctccatcagcccactcttactcctggcctgggcatctcacacatctgtgcataggaaatctcttcttccctggggtctgtgtgcagcacctagtagatgctcaataaatgtttgtgtgagggaaggagacaggaaaggaagtgtctcgctgatcatcttgcggaatggttcctaagacctctgcccaggaaagattccacccagtgctccagcccggtcaggcagaactaggttgccagatcaagggtatctcccaaaagcttccagggcagttgggggtgggggggtggggggtagggatggggaatgcagaagcgggtgcagccagctctcccccagggtgactctggcagcacccccatcctgggcaccctgcctgctctgtggctcacgcccctcctgaagtgactgatgctctgaggcccaaggctaggtccagggcagggcctgcaggggtttcatgctcagtccaggacttgcctaggtccccctacatctgtggggcccccatctaggttctaacaggagaatcacctctccaagggggatgctgcccctcggctccccttggctctcaggaggggccctcagggactaccagtcccctgccagtgggaagaaatagccctgccctcagggagcttccagtgtgatgggggagatacagcagactgtgtcccaaagtaaaatgactgttagaatgaggtgggtggaggagggaagccttgggtgggtgtgactttgggcatctgagcctggggtgcagaggtgggctctgtgggcctgaggtggacaggagggaaccaggccctagcaagacttttgccagctagacctgctgcagcagttgggagggtgggtgctgctggagtcctgggtccatcacctagaaggctcaggccagtgcagccagggctggggcccacagctggcctgggtgggacctgccctgatgcccatggcaggagggacgcctggcccttcacaattggcttggctgctcacctttgctctcatcctcaattattaatgactggagaaagctgctaagtatcttcagaatgttagatttcaacaagatggggggttcagggtccctggcaccctggatagggagccagcggcccctagagacctttgctgtgtgcagggggtatgtgctcacccccgtggcctcagcctcctcaatgtctgaatgaaggattgggctagcagacatcccaccccacagcacactttctaaccagcaggggaacttctagacaatagagacgctgggctccctccagaacactggacctgaacttctggggggagggctgggcacgggcatattttaaaagctccccagcagatgggccgtgcagtcaagtgggccaagagtggcaccagactttggggcttgtgaagtcaggagggagcaacagtgcccactcgagcttgcctggggctcaagcccaaggctgggctgctgccagcctgagcagacacccaggagcttccaggccagctggatgcacagggcacctttgtggaactcctaggaccctggggagacccacctcaggagcagagtctcaggtcccttccggctctgaggggctgttctgagctctaatgtcttatggtctgcccctcccatccttacttctcaggccctggaggcagaggcatagagccaggcaggacagaggtctcagtgggccacatgccagctgcccccacactgcctcagcctccaggcctccaaggggtcctggggagcccctgagaagatgctgagcctgcataaggctgggcgcccctctttctgacaccctcactggctccacggctcccccttcccatcccaggtttccatctgcccactgaacagggaggggaaactgaggcactcccctggcactgagggctccttctgtcatcctgcctgccctggatggtcctggctgcccctcagggcttggccctggcactgtgagcctcacagggctcagacccccacccccaacccagcactaaatggcactcggcaccagaatctcacttcagttggcaaaagcagcaattagcatgtaatgaggcttcttgctttatttttaggtaacctccaaggccctgcctgtgtaattcagcccgccattgctcggtggataattaaagcatgtcaccat

SEQ ID NO: 9063 - DNA, 4475 bp, Homo sapiens
  source 1..4475: mol_type = unassigned DNA
acaaaatggtcctttagaaaatacatctgaattgctggctaatttcttgatttgcgactcaacgtaggacatcgcttgttcgtagctatcagaaccctcctgaattttccccaccatgctatctttattggcttgaactcctttcctaaaatggtccttctgttgatcctgtcagtcttacttttgaaagaagatgtccgtgggagtgcacagtccagtgagaggagggtggtggctcacatgccgggtgacatcattattggagctctcttttctgttcatcaccagcctactgtggacaaagttcatgagaggaagtgtggggcggtccgtgaacagtatggcattcagagagtggaggccatgctgcataccctggaaaggatcaattcagaccccacactcttgcccaacatcacactgggctgtgagataagggactcctgctggcattcggctgtggccctagagcagagcattgagttcataagagattccctcatttcttcagaagaggaagaaggcttggtacgctgtgtggatggctcctcctcttccttccgctccaagaagcccatagtaggggtcattgggcctggctccagttctgtagccattcaggtccagaatttgctccagcttttcaacatacctcagattgcttactcagcaaccagcatggatctgagtgacaagactctgttcaaatatttcatgagggttgtgccttcagatgctcagcaggcaagggccatggtggacatagtgaagaggtacaactggacctatgtatcagccgtgcacacagaaggcaactatggagaaagtgggatggaagccttcaaagatatgtcagcgaaggaagggatttgcatcgcccactcttacaaaatctacagtaatgcaggggagcagagctttgataagctgctgaagaagctcacaagtcacttgcccaaggcccgggtggtggcctgcttctgtgagggcatgacggtgagaggtctgctgatggccatgaggcgcctgggtctagcgggagaatttctgcttctgggcagtgatggctgggctgacaggtatgatgtgacagatggatatcagcgagaagctgttggtggcatcacaatcaagctccaatctcccgatgtcaagtggtttgatgattattatctgaagctccggccagaaacaaaccaccgaaacccttggtttcaagaattttggcagcatcgttttcagtgccgactggaagggtttccacaggagaacagcaaatacaacaagacttgcaatagttctctgactctgaaaacacatcatgttcaggattccaaaatgggatttgtgatcaacgccatctattcgatggcctatgggctccacaacatgcagatgtccctctgcccaggctatgcaggactctgtgatgccatgaagccaattgatggacggaaacttttggagtccctgatgaaaaccaattttactggggtttctggagatacgatcctattcgatgagaatggagactctccaggaaggtatgaaataatgaatttcaaggaaatgggaaaagattactttgattatatcaacgttggaagttgggacaatggagaattaaaaatggatgatgatgaagtatggtccaagaaaagcaacatcatcagatctgtgtgcagtgaaccatgtgagaaaggccagatcaaggtgatccgaaagggagaagtcagctgttgttggacctgtacaccttgtaaggagaatgagtatgtctttgatgagtacacatgcaaggcatgccaactggggtcttggcccactgatgatctcacaggttgtgacttgatcccagtacagtatcttcgatggggtgaccctgaacccattgcagctgtggtgtttgcctgccttggcctcctggccaccctgtttgttactgtagtcttcatcatttaccgtgatacaccagtagtcaagtcctcaagcagggaactctgctacattatccttgctggcatctgcctgggctacttatgtaccttctgcctcattgcgaagcccaaacagatttactgctaccttcagagaattggcattggtctctccccagccatgagctactcagcccttgtaacaaagaccaaccgtattgcaaggatcctggctggcagcaagaagaagatctgtaccaaaaagcccagattcatgagtgcctgtgcccagctagtgattgctttcattctcatatgcatccagttgggcatcatcgttgccctctttataatggagcctcctgacataatgcatgactacccaagcattcgagaagtctacctgatctgtaacaccaccaacctaggagttgtcactccacttggatacaatggattgttgattttgagctgcaccttctatgcgttcaagaccagaaatgttccagctaacttcaacgaggccaagtatatcgccttcacaatgtacacgacctgcattatatggctagcttttgtgccaatctactttggcagcaactacaaaatcatcaccatgtgtttctcggtcagcctcagtgccacagtggccctaggctgcatgtttgtgccgaaggtgtacatcatcctggccaaaccagagagaaacgtgcgcagcgccttcaccacatctaccgtggtgcgcatgcatgtaggggatggcaagtcatcctccgcagccagcagatccagcagcctagtcaacctgtggaagagaaggggctcctctggggaaaccttaagttccaatggaaaatccgtcacgtgggcccagaatgagaagagcagccgggggcagcacctgtggcagcgcctgtccatccacatcaacaagaaagaaaaccccaaccaaacggccgtcatcaagcccttccccaagagcacggagagccgtggcctgggcgctggcgctggcgcaggcgggagcgctgggggcgtgggggccacgggcggtgcgggctgcgcaggcgccggcccaggcgggcccgagtccccagacgccggccccaaggcgctgtatgatgtggccgaggctgaggagcacttcccggcgcccgcgcggccgcgctcaccgtcgcccatcagcacgctgagccaccgcgcgggctcggccagccgcacggacgacgatgtgccgtcgctgcactcggagcctgtggcgcgcagcagctcctcgcagggctccctcatggagcagatcagcagtgtggtcacccgcttcacggccaacatcagcgagctcaactccatgatgctgtccaccgcggcccccagccccggcgtcggcgccccgctctgctcgtcctacctgatccccaaagagatccagttgcccacgaccatgacgacctttgccgaaatccagcctctgccggccatcgaagtcacgggaggcgcgcagcccgcggcaggggcgcaggcggctggggacgcggcccgggagagccccgcggccggtcccgaggctgcggccgccaagccagacctggaggagctggtggctctcaccccgccgtcccccttcagagactcggtggactcggggagcacaacccccaactcgccagtgtccgagtcggccctctgtatcccgtcgtctcccaaatatgacactcttatcataagagattacactcagagctcctcgtcgttgtgaatgtccctggaaagcacgccggcctgcgcgtgcggagcggagccccccgtgttcacacacacacaatggcaagcatagtcgcctggttacggcccagggggaagatgccaagggcaccccttaatggaaacacgagatcagtagtgctatctcatgacaaccgacgaagaaaccgacgacaaatcttttggcagattttcttctagtggccttagaaaacatgggcttttaagaaacacggctgatatctttgagggctgacaaggcgtctcttcaaacagttccataccaagtgctttgctctagggaagcagtgcgtgtgaaacagcgtaacggagggtgaagagcatagttaataagcaactgtaaaaagttttatttgtttactttaattcttttcccagaagagtctttgattcaccaaacatgaatgtacattttctaacaaactcaaaatctgggaccaaaacatcaacttttttctttcttttttctttctttttgttttttctttcctgtaaagaccttgaaaagcagtaacttgggtccagtatttacggaggcgttgtgaatgtgtcccatgcataacacactactggatagtgagtgctgcgctaatgtactacgtagggcttctaccagagattttcctctccaattgggttgtgaaatactcttccaaaagcctgcatcggggattccacctacttatttcagattcacctccattaaccaagaaaaccagtggaagatttcttgactatttcaccatgttgccaatc

SEQ ID NO: 9064 - DNA, 4571 bp, Homo sapiens
  source 1..4571: mol_type = unassigned DNA
acaaaatggtcctttagaaaatacatctgaattgctggctaatttcttgatttgcgactcaacgtaggacatcgcttgttcgtagctatcagaaccctcctgaattttccccaccatgctatctttattggcttgaactcctttcctaaaatggtccttctgttgatcctgtcagtcttacttttgaaagaagatgtccgtgggagtgcacagtccagtgagaggagggtggtggctcacatgccgggtgacatcattattggagctctcttttctgttcatcaccagcctactgtggacaaagttcatgagaggaagtgtggggcggtccgtgaacagtatggcattcagagagtggaggccatgctgcataccctggaaaggatcaattcagaccccacactcttgcccaacatcacactgggctgtgagataagggactcctgctggcattcggctgtggccctagagcagagcattgagttcataagagattccctcatttcttcagaagaggaagaaggcttggtacgctgtgtggatggctcctcctcttccttccgctccaagaagcccatagtaggggtcattgggcctggctccagttctgtagccattcaggtccagaatttgctccagcttttcaacatacctcagattgcttactcagcaaccagcatggatctgagtgacaagactctgttcaaatatttcatgagggttgtgccttcagatgctcagcaggcaagggccatggtggacatagtgaagaggtacaactggacctatgtatcagccgtgcacacagaaggcaactatggagaaagtgggatggaagccttcaaagatatgtcagcgaaggaagggatttgcatcgcccactcttacaaaatctacagtaatgcaggggagcagagctttgataagctgctgaagaagctcacaagtcacttgcccaaggcccgggtggtggcctgcttctgtgagggcatgacggtgagaggtctgctgatggccatgaggcgcctgggtctagcgggagaatttctgcttctgggcagtgatggctgggctgacaggtatgatgtgacagatggatatcagcgagaagctgttggtggcatcacaatcaagctccaatctcccgatgtcaagtggtttgatgattattatctgaagctccggccagaaacaaaccaccgaaacccttggtttcaagaattttggcagcatcgttttcagtgccgactggaagggtttccacaggagaacagcaaatacaacaagacttgcaatagttctctgactctgaaaacacatcatgttcaggattccaaaatgggatttgtgatcaacgccatctattcgatggcctatgggctccacaacatgcagatgtccctctgcccaggctatgcaggactctgtgatgccatgaagccaattgatggacggaaacttttggagtccctgatgaaaaccaattttactggggtttctggagatacgatcctattcgatgagaatggagactctccaggaaggtatgaaataatgaatttcaaggaaatgggaaaagattactttgattatatcaacgttggaagttgggacaatggagaattaaaaatggatgatgatgaagtatggtccaagaaaagcaacatcatcagatctgtgtgcagtgaaccatgtgagaaaggccagatcaaggtgatccgaaagggagaagtcagctgttgttggacctgtacaccttgtaaggagaatgagtatgtctttgatgagtacacatgcaaggcatgccaactggggtcttggcccactgatgatctcacaggttgtgacttgatcccagtacagtatcttcgatggggtgaccctgaacccattgcagctgtggtgtttgcctgccttggcctcctggccaccctgtttgttactgtagtcttcatcatttaccgtgatacaccagtagtcaagtcctcaagcagggaactctgctacattatccttgctggcatctgcctgggctacttatgtaccttctgcctcattgcgaagcccaaacagatttactgctaccttcagagaattggcattggtctctccccagccatgagctactcagcccttgtaacaaagaccaaccgtattgcaaggatcctggctggcagcaagaagaagatctgtaccaaaaagcccagattcatgagtgcctgtgcccagctagtgattgctttcattctcatatgcatccagttgggcatcatcgttgccctctttataatggagcctcctgacataatgcatgactacccaagcattcgagaagtctacctgatctgtaacaccaccaacctaggagttgtcactccacttggatacaatggattgttgattttgagctgcaccttctatgcgttcaagaccagaaatgttccagctaacttcaacgaggccaagtatatcgccttcacaatgtacacgacctgcattatatggctagcttttgtgccaatctactttggcagcaactacaaaatcatcaccatgtgtttctcggtcagcctcagtgccacagtggccctaggctgcatgtttgtgccgaaggtgtacatcatcctggccaaaccagagagaaacgtgcgcagcgccttcaccacatctaccgtggtgcgcatgcatgtaggggatggcaagtcatcctccgcagccagcagatccagcagcctagtcaacctgtggaagagaaggggctcctctggggaaaccttaaggtacaaagacaggagactggcccagcacaagtcggaaatagagtgtttcacccccaaagggagtatggggaatggtgggagagcaacaatgagcagttccaatggaaaatccgtcacgtgggcccagaatgagaagagcagccgggggcagcacctgtggcagcgcctgtccatccacatcaacaagaaagaaaaccccaaccaaacggccgtcatcaagcccttccccaagagcacggagagccgtggcctgggcgctggcgctggcgcaggcgggagcgctgggggcgtgggggccacgggcggtgcgggctgcgcaggcgccggcccaggcgggcccgagtccccagacgccggccccaaggcgctgtatgatgtggccgaggctgaggagcacttcccggcgcccgcgcggccgcgctcaccgtcgcccatcagcacgctgagccaccgcgcgggctcggccagccgcacggacgacgatgtgccgtcgctgcactcggagcctgtggcgcgcagcagctcctcgcagggctccctcatggagcagatcagcagtgtggtcacccgcttcacggccaacatcagcgagctcaactccatgatgctgtccaccgcggcccccagccccggcgtcggcgccccgctctgctcgtcctacctgatccccaaagagatccagttgcccacgaccatgacgacctttgccgaaatccagcctctgccggccatcgaagtcacgggaggcgcgcagcccgcggcaggggcgcaggcggctggggacgcggcccgggagagccccgcggccggtcccgaggctgcggccgccaagccagacctggaggagctggtggctctcaccccgccgtcccccttcagagactcggtggactcggggagcacaacccccaactcgccagtgtccgagtcggccctctgtatcccgtcgtctcccaaatatgacactcttatcataagagattacactcagagctcctcgtcgttgtgaatgtccctggaaagcacgccggcctgcgcgtgcggagcggagccccccgtgttcacacacacacaatggcaagcatagtcgcctggttacggcccagggggaagatgccaagggcaccccttaatggaaacacgagatcagtagtgctatctcatgacaaccgacgaagaaaccgacgacaaatcttttggcagattttcttctagtggccttagaaaacatgggcttttaagaaacacggctgatatctttgagggctgacaaggcgtctcttcaaacagttccataccaagtgctttgctctagggaagcagtgcgtgtgaaacagcgtaacggagggtgaagagcatagttaataagcaactgtaaaaagttttatttgtttactttaattcttttcccagaagagtctttgattcaccaaacatgaatgtacattttctaacaaactcaaaatctgggaccaaaacatcaacttttttctttcttttttctttctttttgttttttctttcctgtaaagaccttgaaaagcagtaacttgggtccagtatttacggaggcgttgtgaatgtgtcccatgcataacacactactggatagtgagtgctgcgctaatgtactacgtagggcttctaccagagattttcctctccaattgggttgtgaaatactcttccaaaagcctgcatcggggattccacctacttatttcagattcacctccattaaccaagaaaaccagtggaagatttcttgactatttcaccatgttgccaatc

SEQ ID NO: 9065 - DNA, 450 bp, Homo sapiens
  source 1..450: mol_type = unassigned DNA
ctcagattgcttactcagcaaccagcatggatctgagtgacaagactctgttcaaatatttcatgagggttgtgccttcagatgctcagcaggcaagggccatggtggacatagtgaagaggtacaactggacctatgtatcagccgtgcacacagaaggtagagggacaaagaaggaagagatgcgtaagagggatcagacattgatgttatcttttatgaggttcaagctattctcatgcctcagcctccagaggagctaggattacaggcatgtaccacacccaggaagttatacagatacacgttcctctgaacttcgccaatacttacagtattgtacaatacttatttgtgacttctcatcaacaccccaactggttagatgctgttatttttactggttgtatattaagacaataaaaaatttcgtacttgggtagcaaagaa

SEQ ID NO: 9066 - DNA, 1268 bp, Homo sapiens
  source 1..1268: mol_type = unassigned DNA
cgcgagagagcgagcgccaccgccgcgggccccgcagccgttctgcctgctgtcaccgctgcctccatcgccgacactagcgctccagctgcagccaaggccgctacgagagcgcaggaagccctcgaggagcggctgcctgggggcgcaaggctcagggcgcgcacctggtttagaagatcatgaccacatggatcatctaactaaatggtacatggggacaaaatggtcctttagaaaatacatctgaattgctggctaatttcttgatttgcgactcaacgtaggacatcgcttgttcgtagctatcagaaccctcctgaattttccccaccatgctatctttattggcttgaactcctttcctaaaatggtccttctgttgatcctgtcagtcttacttttgaaagaagatgtccgtgggagtgcacagtccagtgagaggagggtggtggctcacatgccgggtgacatcattattggagctctcttttctgttcatcaccagcctactgtggacaaagttcatgagaggaagtgtggggcggtccgtgaacagtatggcattcagagagtggaggccatgctgcataccctggaaaggatcaattcagaccccacactcttgcccaacatcacactgggctgtgagataagggactcctgctggcattcggctgtggccctagagcagagcattgagttcataagagattccctcatttcttcagaagaggaagaaggcttggtacgctgtgtggatggctcctcctcttccttccgctccaagaagcccatagtaggggtcattgggcctggctccagttctgtagccattcaggtccagaatttgctccagcttttcaacatacctcagattgcttactcagcaaccagcatggatctgagtgacaagactctgttcaaatatttcatgagggttgtgccttcagatgctcagcaggcaagggccatggtggacatagtgaagaggtacaactggacctatgtatcagccgtgcacacagaaggtagagggacaaagaaggaagagatgcgtaagagggatcagacattgatgttatcttttatgaggtgtgtgttcttgagatttgaagaaattagatggaatgattctttagtatatgatgccctggaaaatgaaaacatccaagtgctgtctctctgtttccccagcagtgctgtaattcaaataaatacctttctttctcctatagctttaataaaccgtttgaatgttacataaa

SEQ ID NO: 9067 - DNA, 7927 bp, Homo sapiens
  source 1..7927: mol_type = unassigned DNA
agctcggctgttctgcgcacgctgagcggagggaatgagcttgagatcatcttgggggggaagccggggactggagaggccggctctgccctgctgatccccgtggcccaacttttcggggggctagctagaccgagtctcactgctcgcagcgcagccaacaggggggtttagaagatcatgaccacatggatcatctaactaaatggtacatggggacaaaatggtcctttagaaaatacatctgaattgctggctaatttcttgatttgcgactcaacgtaggacatcgcttgttcgtagctatcagaaccctcctgaattttccccaccatgctatctttattggcttgaactcctttcctaaaatggtccttctgttgatcctgtcagtcttacttttgaaagaagatgtccgtgggagtgcacagtccagtgagaggagggtggtggctcacatgccgggtgacatcattattggagctctcttttctgttcatcaccagcctactgtggacaaagttcatgagaggaagtgtggggcggtccgtgaacagtatggcattcagagagtggaggccatgctgcataccctggaaaggatcaattcagaccccacactcttgcccaacatcacactgggctgtgagataagggactcctgctggcattcggctgtggccctagagcagagcattgagttcataagagattccctcatttcttcagaagaggaagaaggcttggtacgctgtgtggatggctcctcctcttccttccgctccaagaagcccatagtaggggtcattgggcctggctccagttctgtagccattcaggtccagaatttgctccagcttttcaacatacctcagattgcttactcagcaaccagcatggatctgagtgacaagactctgttcaaatatttcatgagggttgtgccttcagatgctcagcaggcaagggccatggtggacatagtgaagaggtacaactggacctatgtatcagccgtgcacacagaaggcaactatggagaaagtgggatggaagccttcaaagatatgtcagcgaaggaagggatttgcatcgcccactcttacaaaatctacagtaatgcaggggagcagagctttgataagctgctgaagaagctcacaagtcacttgcccaaggcccgggtggtggcctgcttctgtgagggcatgacggtgagaggtctgctgatggccatgaggcgcctgggtctagcgggagaatttctgcttctgggcagtgatggctgggctgacaggtatgatgtgacagatggatatcagcgagaagctgttggtggcatcacaatcaagctccaatctcccgatgtcaagtggtttgatgattattatctgaagctccggccagaaacaaaccaccgaaacccttggtttcaagaattttggcagcatcgttttcagtgccgactggaagggtttccacaggagaacagcaaatacaacaagacttgcaatagttctctgactctgaaaacacatcatgttcaggattccaaaatgggatttgtgatcaacgccatctattcgatggcctatgggctccacaacatgcagatgtccctctgcccaggctatgcaggactctgtgatgccatgaagccaattgatggacggaaacttttggagtccctgatgaaaaccaattttactggggtttctggagatacgatcctattcgatgagaatggagactctccaggaaggtatgaaataatgaatttcaaggaaatgggaaaagattactttgattatatcaacgttggaagttgggacaatggagaattaaaaatggatgatgatgaagtatggtccaagaaaagcaacatcatcagatctgtgtgcagtgaaccatgtgagaaaggccagatcaaggtgatccgaaagggagaagtcagctgttgttggacctgtacaccttgtaaggagaatgagtatgtctttgatgagtacacatgcaaggcatgccaactggggtcttggcccactgatgatctcacaggttgtgacttgatcccagtacagtatcttcgatggggtgaccctgaacccattgcagctgtggtgtttgcctgccttggcctcctggccaccctgtttgttactgtagtcttcatcatttaccgtgatacaccagtagtcaagtcctcaagcagggaactctgctacattatccttgctggcatctgcctgggctacttatgtaccttctgcctcattgcgaagcccaaacagatttactgctaccttcagagaattggcattggtctctccccagccatgagctactcagcccttgtaacaaagaccaaccgtattgcaaggatcctggctggcagcaagaagaagatctgtaccaaaaagcccagattcatgagtgcctgtgcccagctagtgattgctttcattctcatatgcatccagttgggcatcatcgttgccctctttataatggagcctcctgacataatgcatgactacccaagcattcgagaagtctacctgatctgtaacaccaccaacctaggagttgtcactccacttggatacaatggattgttgattttgagctgcaccttctatgcgttcaagaccagaaatgttccagctaacttcaacgaggccaagtatatcgccttcacaatgtacacgacctgcattatatggctagcttttgtgccaatctactttggcagcaactacaaaatcatcaccatgtgtttctcggtcagcctcagtgccacagtggccctaggctgcatgtttgtgccgaaggtgtacatcatcctggccaaaccagagagaaacgtgcgcagcgccttcaccacatctaccgtggtgcgcatgcatgtaggggatggcaagtcatcctccgcagccagcagatccagcagcctagtcaacctgtggaagagaaggggctcctctggggaaaccttaagttccaatggaaaatccgtcacgtgggcccagaatgagaagagcagccgggggcagcacctgtggcagcgcctgtccatccacatcaacaagaaagaaaaccccaaccaaacggccgtcatcaagcccttccccaagagcacggagagccgtggcctgggcgctggcgctggcgcaggcgggagcgctgggggcgtgggggccacgggcggtgcgggctgcgcaggcgccggcccaggcgggcccgagtccccagacgccggccccaaggcgctgtatgatgtggccgaggctgaggagcacttcccggcgcccgcgcggccgcgctcaccgtcgcccatcagcacgctgagccaccgcgcgggctcggccagccgcacggacgacgatgtgccgtcgctgcactcggagcctgtggcgcgcagcagctcctcgcagggctccctcatggagcagatcagcagtgtggtcacccgcttcacggccaacatcagcgagctcaactccatgatgctgtccaccgcggcccccagccccggcgtcggcgccccgctctgctcgtcctacctgatccccaaagagatccagttgcccacgaccatgacgacctttgccgaaatccagcctctgccggccatcgaagtcacgggaggcgcgcagcccgcggcaggggcgcaggcggctggggacgcggcccgggagagccccgcggccggtcccgaggctgcggccgccaagccagacctggaggagctggtggctctcaccccgccgtcccccttcagagactcggtggactcggggagcacaacccccaactcgccagtgtccgagtcggccctctgtatcccgtcgtctcccaaatatgacactcttatcataagagattacactcagagctcctcgtcgttgtgaatgtccctggaaagcacgccggcctgcgcgtgcggagcggagccccccgtgttcacacacacacaatggcaagcatagtcgcctggttacggcccagggggaagatgccaagggcaccccttaatggaaacacgagatcagtagtgctatctcatgacaaccgacgaagaaaccgacgacaaatcttttggcagattttcttctagtggccttagaaaacatgggcttttaagaaacacggctgatatctttgagggctgacaaggcgtctcttcaaacagttccataccaagtgctttgctctagggaagcagtgcgtgtgaaacagcgtaacggagggtgaagagcatagttaataagcaactgtaaaaagttttatttgtttactttaattcttttcccagaagagtctttgattcaccaaacatgaatgtacattttctaacaaactcaaaatctgggaccaaaacatcaacttttttctttcttttttctttctttttgttttttctttcctgtaaagaccttgaaaagcagtaacttgggtccagtatttacggaggcgttgtgaatgtgtcccatgcataacacactactggatagtgagtgctgcgctaatgtactacgtagggcttctaccagagattttcctctccaattgggttgtgaaatactcttccaaaagcctgcatcggggattccacctacttatttcagattcacctccattaaccaagaaaaccagtggaagatttcttgactatttcaccatgttgccaatcaatactggagtagcaaaaaaaatattttctggaatactgttttgtaattccctcactggggtgcattgtagctggaaattctctttataaaaatcattcttgagctccagcctggctatctctttcaagaaacatggccactctttaggaatgctgttgcgtttgcattgccaactaaaatattaaaatatgcattggggcttcttcattcctttattttgagaacctgatgcacaaagagctcctttgttcttttcgagtcccaccactggaagagtggtccatagaccccatgaagacattgtcatgatttgagagactgttgttgaaaggattaacacaatcttaatacactgaaaattttaactgtgtcaagtcagcttagtggagatttagctatgccagtgagcagtgattttaactattcttggctgcttaaacagggcagctatgaactatgacaaatgtagatttttcaaagcaatacaaaatactaaaaaagaggaaccttaatgaatattaaccacacagtctttcttagccattccaaaaagaggcaaagcaattcttattttcttttttaaaataatgattaatatgattttgtgcacttcatactgtcactttttaaaactacagaaaagagatttagagtataacagaaacaagtgtgctttgatagtctcaaataggtagaattcatagttcaagacctgaatccactgtcatctctttcttcctcccattgcagctatcctcaggtaccaaatgttttgatttttaaataaggatagtaataaatggaggaggtgtcctataaatttaaagttcagttgacccagccttatacttaagatagccttatgaaaaatatgtgctgtgaggcagaagtatattttggcagagagaataataaataaaactttttcttttagctcaatatccttactttggtaagtatttttttttatttcacatctacttaacagaaaataaactgagaaatagaagtcagtccattggcataatttatcattcttcactttaaaaaattctaataaatattctgcttgagttttcttttctgctatttgttcttacttgcaactttaagtcaaacctcccaatacaaaacattaaaagctaacattaatgtactaaagtattaatttaaaagaaatcgaacctcccatgctagatttgaaaataacatcatcacagcaccctgatcccaaatattacaccgaggcttttaaaatgtaagtgaaatctagctaagtttcatggtttcattaaaagcaaatgtctgcctctatctgaaaaacaaatggaaatcttttgaggtgttaataccctttggatcctcatcaaaaggatggcattcacctgaggattcctatcttgacttcttaggtattaaaaacctttcttgatatgctctacattttaaaatttgttttataaaatccttatgttgattttcattttattctcaagtacaatacgtttcactctagaccagttgaagaacatgtttaaactttgttcatggtcaaattcattttctatttttttagtaacatatctcttaaaaagcacactaccttataaaaaacttcatcagaaattaaatttaatgcaagtaaattgccatctgatacttccacatgctatcataatcaactgtaataataaaaatgatttatccaattagaaaaggacaagatatatttttctctgtatttctataacttttgccactccattgaatacattgtatgttggacataagattattagtaatgcattcttgagatcttttattttggaatgatgctaactctgtctctttgccaattctaataccaggttccaagtaataactctacagtacaaagagaactgaatattcattctagggctataggatatgaacttcacaattcatttgggtacattctcattgaatttccttcaaaacaatctgttcctggtgcccagtgataattcagtcgggaccagcatgactaaaaggaaggggatatgctaaggctcagcaaagtgaccctaaatgagagatatgtcccaggatggaaagaagaagacgtggtttaaccaagttatactgactaatctaagcagtccactcatccttccattttgggaaaggagtgggggcagcctaagaagaacatatctggattgggaagaaccgtctttctgggctagggatggggaacagaaagggagtatggaaagaaaaattataagagatttgactgaagcaaggaaaaaaagcaaatccccaaacgtgctaatccttgaaagtaactatctttcccaaactactgctgttaccagcaagtgatcaggaagactaggagctatttctgactgtaaatgaattgtataatagctctgctgcagttctgtgacttccaagccaggaattaaatgctctttttaagaataacaaaaaacaaaagcatttcctatgctagtctcccagtaaaatgtacatgttttggagacttcaaaggtattatgtgagttcacatttagcaacagcttattaataaccctcaagctgtcagaatctctatagttaccatttacaattttatactgtgaaaaaatacagatcagtgaaagcataaagacaagtcagaattcactttgaagagggtctgaggcctgggagagtctctactgtctattgaagaatgaggcatgtataaaatagttggttgaatttcactgatcttcccaatgtgaacaaatatactatgtatattgtgtgtatttctagaaatcaatggcagctgctgatggtgttgtaattagaaatctatatagattatagatgttttagaaagatggtgccaatcctaaaagatttgtgtgggctaaaagtgcttgtacttacttttttctgcacttataactgatttggttttaaaattgtgtgcgtgtatctgttctttctctgttgtggcagcttgtactattaaaataatagagaatgttaaattattttgatgtgaactgcaaatgattttttttcataaagtttaacatttttatcagcattgttttgctttgtacttgtataaatatgttttattttagcacttcaaaatatacttgcctgtttctcagttgtctaaatcatgttgtacttggtgtttgtgaagccagttacttttcaaaaaaattaaaaaacctataatatga

SEQ ID NO: 9068 - DNA, 579 bp, Homo sapiens
  source 1..579: mol_type = unassigned DNA
acggtgcgcgcacccactgacctgcgcccactgtctggcgctccctagtgagatgaacccggtacctcagatggaaatgcagaaatcacccgtattcggccatcttggctcctcccccgaagtgttatggaatacaaggtattacacagaagcagcaatttggaaagaccatcttgagagattcttcataaaaacagaaccccagtctataaggaaacatccatgtctgattagcatgaaggttatgaggagaacgtgatcacagccaaggtagtcttctcaaaaaggtagaactagatgacattgcaggcagtgagatgttatcatgtttgacccctggaactgtccaaaaatggaagaagctgcctcatcagatcccccagattagttatgcatcaacggcacccgagctaagtgatgaccggcgctatgacttcttctctcgcgtggtgccacccgattccttccaagcccaggccatggtagacattgtaaaggccctaggctggaattatgtgtctaccctcgcatcggaaggaagttatggagagaaaggtgtggagtccttcacgcagattt

SEQ ID NO: 9069 - DNA, 595 bp, Homo sapiens
  source 1..595: mol_type = unassigned DNA
agatggaaatgcagaaatcacccgtattcggccatcttggctcctcccccgaaacatccatgtctgattagcatgaaggttatgaggagaacgtgatcacagccaaggtagtcttctcaaaaagatcccccagattagttatgcatcaacggcacccgagctaagtgatgaccggcgctatgacttcttctctcgcgtggtgccacccgattccttccaagcccaggccatggtagacattgtaaaggccctaggctggaattatgtgtctaccctcgcatcggaaggaagttatggagagaaaggtgtggagtccttcacgcagatttccaaagaggcaggtggactctgcattgcccagtccgtgagaatcccccaggaacgcaaagacaggaccattgactttgatagaattatcaaacagctcctggacacccccaactccagggccgtcgtgatttttgccaacgatgaggatataaagcagatccttgcagcagccaaaagagctgaccaagttggccattttctttgggtgggatcagacagctggggatccaaaataaacccactgcaccagcatgaagatatcgca

SEQ ID NO: 9070 - DNA, 3289 bp, Homo sapiens
  source 1..3289: mol_type = unassigned DNA
agtgctgggctgttggagagagcgagcagcaagccggtgagcgcgagcgcggcgcgccggccggctaacccgagagcgcgaggcgccccaggctggcaggcgccgcgggacccctcaccctctctggtcgcccctccccggattcccccaccctccgtgcctgcaggagcccctgggctttcccggaggagctcgccctgaagggcccggacctcggcgagcccaccaccgttccctccagcgccgccgccgccaccgcagcagccggagcagcatggtccagctgaggaagctgctccgcgtcctgactttgatgaagttcccctgctgcgtgctggaggtgctcctgtgcgcgctggcggcggcggcgcgcggccaggagatgtacgccccgcactcaatccggatcgagggggacgtcaccctcggggggctgttccccgtgcacgccaagggtcccagcggagtgccctgcggcgacatcaagagggaaaacgggatccacaggctggaagcgatgctctacgccctggaccagatcaacagtgatcccaacctactgcccaacgtgacgctgggcgcgcggatcctggacacttgttccagggacacttacgcgctcgaacagtcgcttactttcgtccaggcgctcatccagaaggacacctccgacgtgcgctgcaccaacggcgaaccgccggttttcgtcaagccggagaaagtagttggagtgattggggcttcggggagttcggtctccatcatggtagccaacatcctgaggctcttccagatcccccagattagttatgcatcaacggcacccgagctaagtgatgaccggcgctatgacttcttctctcgcgtggtgccacccgattccttccaagcccaggccatggtagacattgtaaaggccctaggctggaattatgtgtctaccctcgcatcggaaggaagttatggagagaaaggtgtggagtccttcacgcagatttccaaagaggcaggtggactctgcattgcccagtccgtgagaatcccccaggaacgcaaagacaggaccattgactttgatagaattatcaaacagctcctggacacccccaactccagggccgtcgtgatttttgccaacgatgaggatataaagcagatccttgcagcagccaaaagagctgaccaagttggccattttctttgggtgggatcagacagctggggatccaaaataaacccactgcaccagcatgaagatatcgcagaaggggccatcaccattcagcccaagcgagccacggtggaagggtttgatgcctactttacgtcccgtacacttgaaaacaacagaagaaatgtatggtttgccgaatactgggaggaaaacttcaactgcaagttgacgattagtgggtcaaaaaaagaagacacagatcgcaaatgcacaggacaggagagaattggaaaagattccaactatgagcaggagggtaaagtccagttcgtgattgacgcagtctatgctatggctcacgcccttcaccacatgaacaaggatctctgtgctgactaccggggtgtctgcccagagatggagcaagctggaggcaagaagttgctgaagtatatacgcaatgttaatttcaatggtagtgctggcactccagtgatgtttaacaagaacggggatgcacctgggcgttatgacatctttcagtaccagaccacaaacaccagcaacccgggttaccgtctgatcgggcagtggacagacgaacttcagctcaatatagaagacatgcagtggggtaaaggagtccgagagatacccgcctcagtgtgcacactaccatgtaagccaggacagagaaagaagacacagaaaggaactccttgctgttggacctgtgagccttgcgatggttaccagtaccagtttgatgagatgacatgccagcattgcccctatgaccagaggcccaatgaaaatcgaaccggatgccaggatattcccatcatcaaactggagtggcactccccctgggctgtgattcctgtcttcctggcaatgttggggatcattgccaccatctttgtcatggccactttcatccgctacaatgacacgcccattgtccgggcatctgggcgggaactcagctatgttcttttgacgggcatctttctttgctacatcatcactttcctgatgattgccaaaccagatgtggcagtgtgttctttccggcgagttttcttgggcttgggtatgtgcatcagttatgcagccctcttgacgaaaacaaatcggatttatcgcatatttgagcagggcaagaaatcagtaacagctcccagactcataagcccaacatcacaactggcaatcacttccagtttaatatcagttcagcttctaggggtgttcatttggtttggtgttgatccacccaacatcatcatagactatgatgaacacaagacaatgaaccctgagcaagccagaggggttctcaagtgtgacattacagatctccaaatcatttgctccttgggatatagcattcttctcatggtcacatgtactgtgtatgccatcaagactcggggtgtacccgagaattttaacgaagccaagcccattggattcactatgtacacgacatgtatagtatggcttgccttcattccaattttttttggcaccgctcaatcagcggaaaagctctacatacaaactaccacgcttacaatctccatgaacctaagtgcatcagtggcgctggggatgctatacatgccgaaagtgtacatcatcattttccaccctgaactcaatgtccagaaacggaagcgaagcttcaaggcggtagtcacagcagccaccatgtcatcgaggctgtcacacaaacccagtgacagacccaacggtgaggcaaagaccgagctctgtgaaaacgtagacccaaacaactgtataccaccagtaagaaagagtgtacaaaagtctgttacttggtacactatcccaccaacagtatagcttttgactgctttcccaaagatttttttttttggctgtacagtggaacttggattacactttaaattaactttctctaggaatcaaagtaacctctgaggacctcagcttgcacaaagaggattgagataacatttccaaagcttgttcttcttgagctgacccaacacttaggaaaacatgacatggatcagcaactccattttctgtgagaagtgcaactgctactgaccatctgcactggca

SEQ ID NO: 9071 - DNA, 4127 bp, Homo sapiens
  source 1..4127: mol_type = unassigned DNA
agtgctgggctgttggagagagcgagcagcaagccggtgagcgcgagcgcggcgcgccggccggctaacccgagagcgcgaggcgccccaggctggcaggcgccgcgggacccctcaccctctctggtcgcccctccccggattcccccaccctccgtgcctgcaggagcccctgggctttcccggaggagctcgccctgaagggcccggacctcggcgagcccaccaccgttccctccagcgccgccgccgccaccgcagcagccggagcagcatggtccagctgaggaagctgctccgcgtcctgactttgatgaagttcccctgctgcgtgctggaggtgctcctgtgcgcgctggcggcggcggcgcgcggccaggagatgtacgccccgcactcaatccggatcgagggggacgtcaccctcggggggctgttccccgtgcacgccaagggtcccagcggagtgccctgcggcgacatcaagagggaaaacgggatccacaggctggaagcgatgctctacgccctggaccagatcaacagtgatcccaacctactgcccaacgtgacgctgggcgcgcggatcctggacacttgttccagggacacttacgcgctcgaacagtcgcttactttcgtccaggcgctcatccagaaggacacctccgacgtgcgctgcaccaacggcgaaccgccggttttcgtcaagccggagaaagtagttggagtgattggggcttcggggagttcggtctccatcatggtagccaacatcctgaggctcttccagatcccccagattagttatgcatcaacggcacccgagctaagtgatgaccggcgctatgacttcttctctcgcgtggtgccacccgattccttccaagcccaggccatggtagacattgtaaaggccctaggctggaattatgtgtctaccctcgcatcggaaggaagttatggagagaaaggtgtggagtccttcacgcagatttccaaagaggcaggtggactctgcattgcccagtccgtgagaatcccccaggaacgcaaagacaggaccattgactttgatagaattatcaaacagctcctggacacccccaactccagggccgtcgtgatttttgccaacgatgaggatataaagcagatccttgcagcagccaaaagagctgaccaagttggccattttctttgggtgggatcagacagctggggatccaaaataaacccactgcaccagcatgaagatatcgcagaaggggccatcaccattcagcccaagcgagccacggtggaagggtttgatgcctactttacgtcccgtacacttgaaaacaacagaagaaatgtatggtttgccgaatactgggaggaaaacttcaactgcaagttgacgattagtgggtcaaaaaaagaagacacagatcgcaaatgcacaggacaggagagaattggaaaagattccaactatgagcaggagggtaaagtccagttcgtgattgacgcagtctatgctatggctcacgcccttcaccacatgaacaaggatctctgtgctgactaccggggtgtctgcccagagatggagcaagctggaggcaagaagttgctgaagtatatacgcaatgttaatttcaatggtagtgctggcactccagtgatgtttaacaagaacggggatgcacctgggcgttatgacatctttcagtaccagaccacaaacaccagcaacccgggttaccgtctgatcgggcagtggacagacgaacttcagctcaatatagaagacatgcagtggggtaaaggagtccgagagatacccgcctcagtgtgcacactaccatgtaagccaggacagagaaagaagacacagaaaggaactccttgctgttggacctgtgagccttgcgatggttaccagtaccagtttgatgagatgacatgccagcattgcccctatgaccagaggcccaatgaaaatcgaaccggatgccaggatattcccatcatcaaactggagtggcactccccctgggctgtgattcctgtcttcctggcaatgttggggatcattgccaccatctttgtcatggccactttcatccgctacaatgacacgcccattgtccgggcatctgggcgggaactcagctatgttcttttgacgggcatctttctttgctacatcatcactttcctgatgattgccaaaccagatgtggcagtgtgttctttccggcgagttttcttgggcttgggtatgtgcatcagttatgcagccctcttgacgaaaacaaatcggatttatcgcatatttgagcagggcaagaaatcagtaacagctcccagactcataagcccaacatcacaactggcaatcacttccagtttaatatcagttcagcttctaggggtgttcatttggtttggtgttgatccacccaacatcatcatagactatgatgaacacaagacaatgaaccctgagcaagccagaggggttctcaagtgtgacattacagatctccaaatcatttgctccttgggatatagcattcttctcatggtcacatgtactgtgtatgccatcaagactcggggtgtacccgagaattttaacgaagccaagcccattggattcactatgtacacgacatgtatagtatggcttgccttcattccaattttttttggcaccgctcaatcagcggaaaagctctacatacaaactaccacgcttacaatctccatgaacctaagtgcatcagtggcgctggggatgctatacatgccgaaagtgtacatcatcattttccaccctgaactcaatgtccagaaacggaagcgaagcttcaaggcggtagtcacagcagccaccatgtcatcgaggctgtcacacaaacccagtgacagacccaacggtgaggcaaagaccgagctctgtgaaaacgtagacccaaacagccctgctgcaaaaaagaagtatgtcagttataataacctggttatctaacctgttccattccatggaaccatggaggaggaagaccctcagttattttgtcacccaacctggcataggactctttggtcctacccgcttcccatcaccggaggagcttccccggccgggagaccagtgttagaggatccaagcgacctaaacagctgctttatgaaatatccttactttatctgggcttaataagtcactgacatcagcactgccaactcggctgcaattgtggaccttccctaccaaagggagtgttgaaactcaagtcccgccctggctctttagaatggaccactgagagccacaggaccgttttggggctgacctgtcttattacgtatgtacttctaggttgcaaggttttgaaattttctgtacagtttgtgaggacctttgcactttgccatctgatgtcgtacctcggttcactgtttgttttcgaatgccttgttttcatagagccctattctctcagacggtggaatatttggaaaaattttaaaacaattaaaattttaaagcaatcttggcagactaaaacaagtacatctgtacatgactgtataattacgattatagtaccactgcacatcatgtttttttttttaagacaaaaaagatgtttaaagaccaaaaactgtgctgagaaagtatgccccacctatctttggtatatgataggttacataaaaggaaggtattggctgaactgaatagaggtcttgatctttggaatgcatgccagtaatgtattttacagtacatgtttattatgttcaatatttgtatttgtgttctcttttgttatttttaattagggtatatgaatattttgcaataattttaataattattaagctgtttgaaggaaagaatatggatttttcatgtcttgaggttttgttcatgccccctttgactgatcagtgtgataaggactttaggaaaaaaagcatgtatgttttttactgtttgtaataagtactttcgttaatcttgctgcttatgtgccaatttagtggaaaaaaacaacccttgctgaaaaattccctctttccattctctttcaattctgtgatattgtccaagaatgtatcaataa

SEQ ID NO: 9072 - DNA, 4241 bp, Homo sapiens
  source 1..4241: mol_type = unassigned DNA
agtgctgggctgttggagagagcgagcagcaagccggtgagcgcgagcgcggcgcgccggccggctaacccgagagcgcgaggcgccccaggctggcaggcgccgcgggacccctcaccctctctggtcgcccctccccggattcccccaccctccgtgcctgcaggagcccctgggctttcccggaggagctcgccctgaagggcccggacctcggcgagcccaccaccgttccctccagcgccgccgccgccaccgcagcagccggagcagcatggtccagctgaggaagctgctccgcgtcctgactttgatgaagttcccctgctgcgtgctggaggtgctcctgtgcgcgctggcggcggcggcgcgcggccaggagatgtacgccccgcactcaatccggatcgagggggacgtcaccctcggggggctgttccccgtgcacgccaagggtcccagcggagtgccctgcggcgacatcaagagggaaaacgggatccacaggctggaagcgatgctctacgccctggaccagatcaacagtgatcccaacctactgcccaacgtgacgctgggcgcgcggatcctggacacttgttccagggacacttacgcgctcgaacagtcgcttactttcgtccaggcgctcatccagaaggacacctccgacgtgcgctgcaccaacggcgaaccgccggttttcgtcaagccggagaaagtagttggagtgattggggcttcggggagttcggtctccatcatggtagccaacatcctgaggctcttccagatcccccagattagttatgcatcaacggcacccgagctaagtgatgaccggcgctatgacttcttctctcgcgtggtgccacccgattccttccaagcccaggccatggtagacattgtaaaggccctaggctggaattatgtgtctaccctcgcatcggaaggaagttatggagagaaaggtgtggagtccttcacgcagatttccaaagaggcaggtggactctgcattgcccagtccgtgagaatcccccaggaacgcaaagacaggaccattgactttgatagaattatcaaacagctcctggacacccccaactccagggccgtcgtgatttttgccaacgatgaggatataaagcagatccttgcagcagccaaaagagctgaccaagttggccattttctttgggtgggatcagacagctggggatccaaaataaacccactgcaccagcatgaagatatcgcagaaggggccatcaccattcagcccaagcgagccacggtggaagggtttgatgcctactttacgtcccgtacacttgaaaacaacagaagaaatgtatggtttgccgaatactgggaggaaaacttcaactgcaagttgacgattagtgggtcaaaaaaagaagacacagatcgcaaatgcacaggacaggagagaattggaaaagattccaactatgagcaggagggtaaagtccagttcgtgattgacgcagtctatgctatggctcacgcccttcaccacatgaacaaggatctctgtgctgactaccggggtgtctgcccagagatggagcaagctggaggcaagaagttgctgaagtatatacgcaatgttaatttcaatggtagtgctggcactccagtgatgtttaacaagaacggggatgcacctgggcgttatgacatctttcagtaccagaccacaaacaccagcaacccgggttaccgtctgatcgggcagtggacagacgaacttcagctcaatatagaagacatgcagtggggtaaaggagtccgagagatacccgcctcagtgtgcacactaccatgtaagccaggacagagaaagaagacacagaaaggaactccttgctgttggacctgtgagccttgcgatggttaccagtaccagtttgatgagatgacatgccagcattgcccctatgaccagaggcccaatgaaaatcgaaccggatgccaggatattcccatcatcaaactggagtggcactccccctgggctgtgattcctgtcttcctggcaatgttggggatcattgccaccatctttgtcatggccactttcatccgctacaatgacacgcccattgtccgggcatctgggcgggaactcagctatgttcttttgacgggcatctttctttgctacatcatcactttcctgatgattgccaaaccagatgtggcagtgtgttctttccggcgagttttcttgggcttgggtatgtgcatcagttatgcagccctcttgacgaaaacaaatcggatttatcgcatatttgagcagggcaagaaatcagtaacagctcccagactcataagcccaacatcacaactggcaatcacttccagtttaatatcagttcagcttctaggggtgttcatttggtttggtgttgatccacccaacatcatcatagactatgatgaacacaagacaatgaaccctgagcaagccagaggggttctcaagtgtgacattacagatctccaaatcatttgctccttgggatatagcattcttctcatggtcacatgtactgtgtatgccatcaagactcggggtgtacccgagaattttaacgaagccaagcccattggattcactatgtacacgacatgtatagtatggcttgccttcattccaattttttttggcaccgctcaatcagcggaaaagctctacatacaaactaccacgcttacaatctccatgaacctaagtgcatcagtggcgctggggatgctatacatgccgaaagtgtacatcatcattttccaccctgaactcaatgtccagaaacggaagcgaagcttcaaggcggtagtcacagcagccaccatgtcatcgaggctgtcacacaaacccagtgacagacccaacggtgaggcaaagaccgagctctgtgaaaacgtagacccaaacaactgtataccaccagtaagaaagagtgtacaaaagtctgttacttggtacactatcccaccaacagtatagcttttgactgctttcccaaaggccctgctgcaaaaaagaagtatgtcagttataataacctggttatctaacctgttccattccatggaaccatggaggaggaagaccctcagttattttgtcacccaacctggcataggactctttggtcctacccgcttcccatcaccggaggagcttccccggccgggagaccagtgttagaggatccaagcgacctaaacagctgctttatgaaatatccttactttatctgggcttaataagtcactgacatcagcactgccaactcggctgcaattgtggaccttccctaccaaagggagtgttgaaactcaagtcccgccctggctctttagaatggaccactgagagccacaggaccgttttggggctgacctgtcttattacgtatgtacttctaggttgcaaggttttgaaattttctgtacagtttgtgaggacctttgcactttgccatctgatgtcgtacctcggttcactgtttgttttcgaatgccttgttttcatagagccctattctctcagacggtggaatatttggaaaaattttaaaacaattaaaattttaaagcaatcttggcagactaaaacaagtacatctgtacatgactgtataattacgattatagtaccactgcacatcatgtttttttttttaagacaaaaaagatgtttaaagaccaaaaactgtgctgagaaagtatgccccacctatctttggtatatgataggttacataaaaggaaggtattggctgaactgaatagaggtcttgatctttggaatgcatgccagtaatgtattttacagtacatgtttattatgttcaatatttgtatttgtgttctcttttgttatttttaattagggtatatgaatattttgcaataattttaataattattaagctgtttgaaggaaagaatatggatttttcatgtcttgaggttttgttcatgccccctttgactgatcagtgtgataaggactttaggaaaaaaagcatgtatgttttttactgtttgtaataagtactttcgttaatcttgctgcttatgtgccaatttagtggaaaaaaacaacccttgctgaaaaattccctctttccattctctttcaattctgtgatattgtccaagaatgtatcaataaaatactttggttaactttttta

SEQ ID NO: 9073 - DNA, 3088 bp, Homo sapiens
  source 1..3088: mol_type = unassigned DNA
ggtcgcccctccccggattcccccaccctccgtgcctgcaggagcccctgggctttcccggaggagctcgccctgaagggcccggacctcggcgagcccaccaccgttccctccagcgccgccgccgccaccgcagcagccggagcagcatggtccagctgaggaagctgctccgcgtcctgactttgatgaagttcccctgctgcgtgctggaggtgctcctgtgcgcgctggcggcggcggcgcgcggccaggagatgtacgccccgcactcaatccggatcgagggggacgtcaccctcggggggctgttccccgtgcacgccaagggtcccagcggagtgccctgcggcgacatcaagagggaaaacgggatccacaggctggaagcgatgctctacgccctggaccagatcaacagtgatcccaacctactgcccaacgtgacgctgggcgcgcggatcctggacacttgttccagggacacttacgcgctcgaacagtcgcttactttcgtccaggcgctcatccagaaggacacctccgacgtgcgctgcaccaacggcgaaccgccggttttcgtcaagccggagaaagtagttggagtgattggggcttcggggagttcggtctccatcatggtagccaacatcctgaggctcttccagatcccccagattagttatgcatcaacggcacccgagctaagtgatgaccggcgctatgacttcttctctcgcgtggtgccacccgattccttccaagcccaggccatggtagacattgtaaaggccctaggctggaattatgtgtctaccctcgcatcggaaggaagttatggagagaaaggtgtggagtccttcacgcagatttccaaagaggcaggtggactctgcattgcccagtccgtgagaatcccccaggaacgcaaagacaggaccattgactttgatagaattatcaaacagctcctggacacccccaactccagggccgtcgtgatttttgccaacgatgaggatataaagcagatccttgcagcagccaaaagagctgaccaagttggccattttctttgggtgggatcagacagctggggatccaaaataaacccactgcaccagcatgaagatatcgcagaaggggccatcaccattcagcccaagcgagccacggtggaagggtttgatgcctactttacgtcccgtacacttgaaaacaacagaagaaatgtatggtttgccgaatactgggaggaaaacttcaactgcaagttgacgattagtgggtcaaaaaaagaagacacagatcgcaaatgcacaggacaggagagaattggaaaagattccaactatgagcaggagggtaaagtccagttcgtgattgacgcagtctatgctatggctcacgcccttcaccacatgaacaaggatctctgtgctgactaccggggtgtctgcccagagatggagcaagctggaggcaagaagttgctgaagtatatacgcaatgttaatttcaatggtagtgctggcactccagtgatgtttaacaagaacggggatgcacctgggcgttatgacatctttcagtaccagaccacaaacaccagcaacccgggttaccgtctgatcgggcagtggacagacgaacttcagctcaatatagaagacatgcagtggggtaaaggagtccgagagatacccgcctcagtgtgcacactaccatgtaagccaggacagagaaagaagacacagaaaggaactccttgctgttggacctgtgagccttgcgatggttaccagtaccagtttgatgagatgacatgccagcattgcccctatgaccagaggcccaatgaaaatcgaaccggatgccaggatattcccatcatcaaactggagtggcactccccctgggctgtgattcctgtcttcctggcaatgttggggatcattgccaccatctttgtcatggccactttcatccgctacaatgacacgcccattgtccgggcatctgggcgggaactcagctatgttcttttgacgggcatctttctttgctacatcatcactttcctgatgattgccaaaccagatgtggcagtgtgttctttccggcgagttttcttgggcttgggtatgtgcatcagttatgcagccctcttgacgaaaacaaatcggatttatcgcatatttgagcagggcaagaaatcagtaacagctcccagactcataagcccaacatcacaactggcaatcacttccagtttaatatcagttcagcttctaggggtgttcatttggtttggtgttgatccacccaacatcatcatagactatgatgaacacaagacaatgaaccctgagcaagccagaggggttctcaagtgtgacattacagatctccaaatcatttgctccttgggatatagcattcttctcatggtcacatgtactgtgtatgccatcaagactcggggtgtacccgagaattttaacgaagccaagcccattggattcactatgtacacgacatgtatagtatggcttgccttcattccaattttttttggcaccgctcaatcagcggaaaagctctacatacaaactaccacgcttacaatctccatgaacctaagtgcatcagtggcgctggggatgctatacatgccgaaagtgtacatcatcattttccaccctgaactcaatgtccagaaacggaagcgaagcttcaaggcggtagtcacagcagccaccatgtcatcgaggctgtcacacaaacccagtgacagacccaacggtgaggcaaagaccgagctctgtgaaaacgtagacccaaacaatttttttttttggctgtacagtggaacttggattacactttaaattaactttctctaggaatcaaagtaacctctgaggacctcagcttgcacaaagaggattgagataacatttccaaagcttgttcttcttgagctgacccaacacttaggaaaacatgacatggatcagcaactccattttctgtgagaagtgcaactgctactgaccatctgcactggcatctagtcaagcgattg

SEQ ID NO: 9074 - DNA, 2901 bp, Homo sapiens
  source 1..2901: mol_type = unassigned DNA
ggtcgcccctccccggattcccccaccctccgtgcctgcaggagcccctgggctttcccggaggagctcgccctgaagggcccggacctcggcgagcccaccaccgttccctccagcgccgccgccgccaccgcagcagccggagcagcatggtccagctgaggaagctgctccgcgtcctgactttgatgaagttcccctgctgcgtgctggaggtgctcctgtgcgcgctggcggcggcggcgcgcggccaggagatgtacgccccgcactcaatccggatcgagggggacgtcaccctcggggggctgttccccgtgcacgccaagggtcccagcggagtgccctgcggcgacatcaagagggaaaacgggatccacaggctggaagcgatgctctacgccctggaccagatcaacagtgatcccaacctactgcccaacgtgacgctgggcgcgcggatcctggacacttgttccagggacacttacgcgctcgaacagtcgcttactttcgtccaggcgctcatccagaaggacacctccgacgtgcgctgcaccaacggcgaaccgccggttttcgtcaagccggagaaagtagttggagtgattggggcttcggggagttcggtctccatcatggtagccaacatcctgaggctcttccagatcccccagattagttatgcatcaacggcacccgagctaagtgatgaccggcgctatgacttcttctctcgcgtggtgccacccgattccttccaagcccaggccatggtagacattgtaaaggccctaggctggaattatgtgtctaccctcgcatcggaaggaagttatggagagaaaggtgtggagtccttcacgcagatttccaaagaggcaggtggactctgcattgcccagtccgtgagaatcccccaggaacgcaaagacaggaccattgactttgatagaattatcaaacagctcctggacacccccaactccagggccgtcgtgatttttgccaacgatgaggatataaagcagatccttgcagcagccaaaagagctgaccaagttggccattttctttgggtgggatcagacagctggggatccaaaataaacccactgcaccagcatgaagatatcgcagaaggggccatcaccattcagcccaagcgagccacggtggaagggtttgatgcctactttacgtcccgtacacttgaaaacaacagaagaaatgtatggtttgccgaatactgggaggaaaacttcaactgcaagttgacgattagtgggtcaaaaaaagaagacacagatcgcaaatgcacaggacaggagagaattggaaaagattccaactatgagcaggagggtaaagtccagttcgtgattgacgcagtctatgctatggctcacgcccttcaccacatgaacaaggatctctgtgctgactaccggggtgtctgcccagagatggagcaagctggaggcaagaagttgctgaagtatatacgcaatgttaatttcaatggtagtgctggcactccagtgatgtttaacaagaacggggatgcacctgggcgttatgacatctttcagtaccagaccacaaacaccagcaacccgggttaccgtctgatcgggcagtggacagacgaacttcagctcaatatagaagacatgcagtggggtaaaggagtccgagagatacccgcctcagtgtgcacactaccatgtaagccaggacagagaaagaagacacagaaaggaactccttgctgttggacctgtgagccttgcgatggttaccagtaccagtttgatgagatgacatgccagcattgcccctatgaccagaggcccaatgaaaatcgaaccggatgccaggatattcccatcatcaaactggagtggcactccccctgggctgtgattcctgtcttcctggcaatgttggggatcattgccaccatctttgtcatggccactttcatccgctacaatgacacgcccattgtccgggcatctgggcgggaactcagctatgttcttttgacgggcatctttctttgctacatcatcactttcctgatgattgccaaaccagatgtggcagtgtgttctttccggcgagttttcttgggcttgggtatgtgcatcagttatgcagccctcttgacgaaaacaaatcggatttatcgcatatttgagcagggcaagaaatcagtaacagctcccagactcataagcccaacatcacaactggcaatcacttccagtttaatatcagttcagcttctaggggtgttcatttggtttggtgttgatccacccaacatcatcatagactatgatgaacacaagacaatgaaccctgagcaagccagaggggttctcaagtgtgacattacagatctccaaatcatttgctccttgggatatagcattcttctcatggtcacatgtactgtgtatgccatcaagactcggggtgtacccgagaattttaacgaagccaagcccattggattcactatgtacacgacatgtatagtatggcttgccttcattccaattttttttggcaccgctcaatcagcggaaaagctctacatacaaactaccacgcttacaatctccatgaacctaagtgcatcagtggcgctggggatgctatacatgccgaaagtgtacatcatcattttccaccctgaactcaatgtccagaaacggaagcgaagcttcaaggcggtagtcacagcagccaccatgtcatcgaggctgtcacacaaacccagtgacagacccaacggtgaggcaaagaccgagctctgtgaaaacgtagacccaaacagtgagaagtgcaactgctactgaccatctgcactggcatctagtcaagcgattg

SEQ ID NO: 9075 - DNA, 3020 bp, Homo sapiens
  source 1..3020: mol_type = unassigned DNA
ggtcgcccctccccggattcccccaccctccgtgcctgcaggagcccctgggctttcccggaggagctcgccctgaagggcccggacctcggcgagcccaccaccgttccctccagcgccgccgccgccaccgcagcagccggagcagcatggtccagctgaggaagctgctccgcgtcctgactttgatgaagttcccctgctgcgtgctggaggtgctcctgtgcgcgctggcggcggcggcgcgcggccaggagatgtacgccccgcactcaatccggatcgagggggacgtcaccctcggggggctgttccccgtgcacgccaagggtcccagcggagtgccctgcggcgacatcaagagggaaaacgggatccacaggctggaagcgatgctctacgccctggaccagatcaacagtgatcccaacctactgcccaacgtgacgctgggcgcgcggatcctggacacttgttccagggacacttacgcgctcgaacagtcgcttactttcgtccaggcgctcatccagaaggacacctccgacgtgcgctgcaccaacggcgaaccgccggttttcgtcaagccggagaaagtagttggagtgattggggcttcggggagttcggtctccatcatggtagccaacatcctgaggctcttccagatcccccagattagttatgcatcaacggcacccgagctaagtgatgaccggcgctatgacttcttctctcgcgtggtgccacccgattccttccaagcccaggccatggtagacattgtaaaggccctaggctggaattatgtgtctaccctcgcatcggaaggaagttatggagagaaaggtgtggagtccttcacgcagatttccaaagaggcaggtggactctgcattgcccagtccgtgagaatcccccaggaacgcaaagacaggaccattgactttgatagaattatcaaacagctcctggacacccccaactccagggccgtcgtgatttttgccaacgatgaggatataaagcagatccttgcagcagccaaaagagctgaccaagttggccattttctttgggtgggatcagacagctggggatccaaaataaacccactgcaccagcatgaagatatcgcagaaggggccatcaccattcagcccaagcgagccacggtggaagggtttgatgcctactttacgtcccgtacacttgaaaacaacagaagaaatgtatggtttgccgaatactgggaggaaaacttcaactgcaagttgacgattagtgggtcaaaaaaagaagacacagatcgcaaatgcacaggacaggagagaattggaaaagattccaactatgagcaggagggtaaagtccagttcgtgattgacgcagtctatgctatggctcacgcccttcaccacatgaacaaggatctctgtgctgactaccggggtgtctgcccagagatggagcaagctggaggcaagaagttgctgaagtatatacgcaatgttaatttcaatggtagtgctggcactccagtgatgtttaacaagaacggggatgcacctgggcgttatgacatctttcagtaccagaccacaaacaccagcaacccgggttaccgtctgatcgggcagtggacagacgaacttcagctcaatatagaagacatgcagtggggtaaaggagtccgagagatacccgcctcagtgtgcacactaccatgtaagccaggacagagaaagaagacacagaaaggaactccttgctgttggacctgtgagccttgcgatggttaccagtaccagtttgatgagatgacatgccagcattgcccctatgaccagaggcccaatgaaaatcgaaccggatgccaggatattcccatcatcaaactggagtggcactccccctgggctgtgattcctgtcttcctggcaatgttggggatcattgccaccatctttgtcatggccactttcatccgctacaatgacacgcccattgtccgggcatctgggcgggaactcagctatgttcttttgacgggcatctttctttgctacatcatcactttcctgatgattgccaaaccagatgtggcagtgtgttctttccggcgagttttcttgggcttgggtatgtgcatcagttatgcagccctcttgacgaaaacaaatcggatttatcgcatatttgagcagggcaagaaatcagtaacagctcccagactcataagcccaacatcacaactggcaatcacttccagtttaatatcagttcagcttctaggggtgttcatttggtttggtgttgatccacccaacatcatcatagactatgatgaacacaagacaatgaaccctgagcaagccagaggggttctcaagtgtgacattacagatctccaaatcatttgctccttgggatatagcattcttctcatggtcacatgtactgtgtatgccatcaagactcggggtgtacccgagaattttaacgaagccaagcccattggattcactatgtacacgacatgtatagtatggcttgccttcattccaattttttttggcaccgctcaatcagcggaaaagctctacatacaaactaccacgcttacaatctccatgaacctaagtgcatcagtggcgctggggatgctatacatgccgaaagtgtacatcatcattttccaccctgaactcaatgtccagaaacggaagcgaagcttcaaggcggtagtcacagcagccaccatgtcatcgaggctgtcacacaaacccagtgacagacccaacggtgaggcaaagaccgagctctgtgaaaacgtagacccaaacataacctctgaggacctcagcttgcacaaagaggattgagataacatttccaaagcttgttcttcttgagctgacccaacacttaggaaaacatgacatggatcagcaactccattttctgtgagaagtgcaactgctactgaccatctgcactggcatctagtcaagcgattg

SEQ ID NO: 9076 - DNA, 826 bp, Homo sapiens
  source 1..826: mol_type = unassigned DNA
actatctccctgacgcagaccccaagccaaatcctcggcttggaggacgattcccggagcgaggcatgaaggcgcccgttgggaggcagaggggtgcgtgaagcggggccccgtggtcctcctgctccggtgccggagggagacggagaaaaaatgggaggaaggcggatccggggccgctgagcggtgggttctgccgcagtgttctctcgcctcctgctccagcagcctctgccccatggctcctgagctgcactggggagatgcccttctatcctgtctcagtttcccaatcctaaacgtccttcaaaaatcccccagattagttatgcatcaacggcacccgagctaagtgatgaccggcgctatgacttcttctctcgcgtggtgccacccgattccttccaagcccaggccatggtagacattgtaaaggccctaggctggaattatgtgtctaccctcgcatcggaaggaagttatggagagaaaggtgtggagtccttcacgcagatttccaaagaggcaggtggactctgcattgcccagtccgtgagaatcccccaggaacgcaaagacaggaccattgactttgatagaattatcaaacagctcctggacacccccaactccagggccgtcgtgatttttgccaacgatgaggatataaagcagatccttgcagcagccaaaagagctgaccaagttggccattttctttgggtgggatcagacagctggggatccaaaataaacccactgcaccagcatgaagatatcgcagaaggggccatcaccattcagcccaagcgagccacggtggaag

SEQ ID NO: 9077 - DNA, 546 bp, Homo sapiens
  source 1..546: mol_type = unassigned DNA
agtattgcatatccgggattcagaatctcctcctcatctaccttccttggctcctttgacatctctgtggaaacattattgacactatgttttcttctcttaaacaggtggactctgcattgcccagtccgtgagaatcccccaggaacgcaaagacaggaccattgactttgatagaattatcaaacagctcctggacacccccaactccagggccgtcgtgatttttgccaacgatgaggatataaagcagatccttgcagcagccaaaagagctgaccaagttggccattttctttgggtgggatcagacagctggggatccaaaataaacccactgcaccagcatgaagatatcgcagaaggggccatcaccattcagcccaagcgagccacggtggaagggtttgatgcctactttacgtcccgtacacttgaaaacaacagaagaaatgtatggtttgccgaatactgggaggaaaacttcaactgcaagttgacgattagtgggtcaaaaaaagaagacacagatcgcaaatgcacagg

SEQ ID NO: 9078 - DNA, 4003 bp, Homo sapiens
  source 1..4003: mol_type = unassigned DNA
ggtggactctgcattgcccagtccgtgagaatcccccaggaacgcaaagacaggaccattgactttgatagaattatcaaacagctcctggacacccccaactccagggccgtcgtgatttttgccaacgatgaggatataaagcagatccttgcagcagccaaaagagctgaccaagttggccattttctttgggtgggatcagacagctggggatccaaaataaacccactgcaccagcatgaagatatcgcagaaggggccatcaccattcagcccaagcgagccacggtggaagggtttgatgcctactttacgtcccgtacacttgaaaacaacagaagaaatgtatggtttgccgaatactgggaggaaaacttcaactgcaagttgacgattagtgggtcaaaaaaagaagacacagatcgcaaatgcacaggacaggagagaattggaaaagattccaactatgagcaggagggtaaagtccagttcgtgattgacgcagtctatgctatggctcacgcccttcaccacatgaacaaggatctctgtgctgactaccggggtgtctgcccagagatggagcaagctggaggcaagaagttgctgaagtatatacgcaatgttaatttcaatggtagtgctggcactccagtgatgtttaacaagaacggggatgcacctgggcgttatgacatctttcagtaccagaccacaaacaccagcaacccgggttaccgtctgatcgggcagtggacagacgaacttcagctcaatatagaagacatgcagtggggtaaaggagtccgagagatacccgcctcagtgtgcacactaccatgtaagccaggacagagaaagaagacacagaaaggaactccttgctgttggacctgtgagccttgcgatggttaccagtaccagtttgatgagatgacatgccagcattgcccctatgaccagaggcccaatgaaaatcgaaccggatgccaggatattcccatcatcaaactggagtggcactccccctgggctgtgattcctgtcttcctggcaatgttggggatcattgccaccatctttgtcatggccactttcatccgctacaatgacacgcccattgtccgggcatctgggcgggaactcagctatgttcttttgacgggcatctttctttgctacatcatcactttcctgatgattgccaaaccagatgtggcagtgtgttctttccggcgagttttcttgggcttgggtatgtgcatcagttatgcagccctcttgacgaaaacaaatcggatttatcgcatatttgagcagggcaagaaatcagtaacagctcccagactcataagcccaacatcacaactggcaatcacttccagtttaatatcagttcagcttctaggggtgttcatttggtttggtgttgatccacccaacatcatcatagactatgatgaacacaagacaatgaaccctgagcaagccagaggggttctcaagtgtgacattacagatctccaaatcatttgctccttgggatatagcattcttctcatggtcacatgtactgtgtatgccatcaagactcggggtgtacccgagaattttaacgaagccaagcccattggattcactatgtacacgacatgtatagtatggcttgccttcattccaattttttttggcaccgctcaatcagcggaaaagctctacatacaaactaccacgcttacaatctccatgaacctaagtgcatcagtggcgctggggatgctatacatgccgaaagtgtacatcatcattttccaccctgaactcaatgtccagaaacggaagcgaagcttcaaggcggtagtcacagcagccaccatgtcatcgaggctgtcacacaaacccagtgacagacccaacggtgaggcaaagaccgagctctgtgaaaacgtagacccaaacagtaagtaactctccgtttctttcatcttcccaccctgcatcaggaagctctagaagatgtggggtgtgcttgcctctctggagaaatactgtgatcgttcttgtcttatgggctgggttgccttggtgaatgccagcttctgctcttttgagtttgactcattcctgccaccattttctttttgttccttgttggaaagaagcttttggaggctctgcttcagaagtgtgaagcctcccccttcccttgcttcttgtcctctggtactgaatcctccaactgacaaatgcacctatcaggttgttcttttcttgcacccttcctgctaaggcaacaactttttgtcagggaaacttccatacttaatgaactgtatcggtgggaattaattaggattttggaagcgaaacttttttcctctagcatgtgaatgttgaaaaagttattttgtactaatcaggtcttctagaaacatataaaatattggaaaaagttgtcaaatccaggtacacagggccagacactaccatgataacggcatcatactgtggggaaaaacatatctaccataccactggagaagagttttattctatgcaagacaaaccttagggaagaaatcaaggaaaaaaaacattggatttaagatgctattatatggcatatctgcaaaactctaggagcctttagtcatgcatgcaaatgtccccaggtaaaatgggcatatagctatcactttgtaagtaacacaagaccagctcaaaggttaaatgcttagaattcccaattgctaactttactaacaatatggtggtaagagtaaatttcagatttaaaatactagttttaagatttgttttccaggaatattttggctagttgcatttagaatgaggcagattcaaatatttgtgatacttcctgttgtttaaggcagaagggatttcaggttatccattaagtcattcacgacatactgtatttcagttagaagctgatcttggtgtcaaatgcttaatgccaaatagaaggaagtctcaattttaagtactcttgaagaaatcctttttgctctgcaaataagagagatatctttaataaaaaccaagaagccaactgggtttgatcctgacaaacactacacaaagaactgtgattttggcctgtctctatttatgaatagttgagtgaatgtcgtgaaatactttgaaaatatgtagacaaagtaacaaggttaattaacaacattgtgggctccagtttgactttgtgacagaagtcctaggacaagtctaaaggaacatactgagaagggaggaacagaatgaatgatataggctctgttgtgtctccagagcaagtggccaattgagaggagggcaagtggatggtgacttgctgtggcattcagtgtgatgtaggaagaggctttgggttgagacatacctgggttcaaatgtaaaccactccatttaccagccatgtggcattaagaatcactgagcttttctaaaactcaacataattatgtataaaagagataataactatgtcataagtgtatcacaaaatactatattgagaaaatactatatcaactaaatgtcaacgtctttcccttcctgaagaggcaaaaagctttgcttagaaataagtttcagcataatttattaagatatagtagctaaaaagatgcagttaagtgtagattaaacaccacagggtagataaaactcaatcctcaaaagaagaatttatggctgggcgtggtggctcacgcctgtaatcccagcactttgggaggacgaggtgggcggatcacctgaggttaggagttggtgaccagcctgaccaacatggagaaaccccgtctctactaaaaatacaaaattagccgggcatggttgcgcgtgcctgtaatcccagctacttgggaggctgaggcaggagaatcgcttgaacccaggagggcagaggttgcagtgagctgagatcgtgccattgcactccagcctgggcaacaagagcaaaactccatct

SEQ ID NO: 9079 - DNA, 683 bp, Homo sapiens
  source 1..683: mol_type = unassigned DNA
aaaatgaagatggtaaccaggcaacatggttcttctatagttattaaaaataaaacgtgaagcttctacaatgcacaataattttctgacaagtttgtctggctttctttctgtcattgcctggagaaatggggtttgatgcctactttacgtcccgtacacttgaaaacaacagaagaaatgtatggtttgccgaatactgggaggaaaacttcaactgcaagttgacgattagtgggtcaaaaaaagaagacacagatcgcaaatgcacaggacaggagagaattggaaaagattccaactatgagcaggagggtaaagtccagttcgtgattgacgcagtctatgctatggctcacgcccttcaccacatgaacaaggatctctgtgctgactaccggggtgtctgcccagagatggagcaagctggaggcaagaagttgctgaagtatatacgcaatgttaatttcaatggtagtgctggcactccagtgatgtttaacaagaacggggatgcacctgggcgttatgacatctttcagtaccagaccacaaacaccagcaacccgggttaccgtctgatcgggcagtggacagacgaacttcagctcaatatagaagacatgcagtggggtaaaggagtccgagagatacccgcctcagtgtgcacactaccatgtaag

SEQ ID NO: 9080 - DNA, 1937 bp, Homo sapiens
  source 1..1937: mol_type = unassigned DNA
atcagttgttatcattattaggcagatgggagcaaaatggacaggagagaattggaaaagattccaactatgagcaggagggtaaagtccagttcgtgattgacgcagtctatgctatggctcacgcccttcaccacatgaacaaggatctctgtgctgactaccggggtgtctgcccagagatggagcaagctggaggcaagaagttgctgaagtatatacgcaatgttaatttcaatggtagtgctggcactccagtgatgtttaacaagaacggggatgcacctgggcgttatgacatctttcagtaccagaccacaaacaccagcaacccgggttaccgtctgatcgggcagtggacagacgaacttcagctcaattaattaccaaggggccttgcactgagggcatcaacaagatatgtggcccaagacagctgcttggcttcccatccaagataaagtcagatgctctagaaatgtgtgcatgttgaggactgaagggaggagaaactttgcttcttatttatcacctgtcaggtctggagaagcacagatgccaagtgcatggaacacagaagctgctcagtgaatggcctttgattatgagataggagaattacaagatgatgttagaaggatgggatagagaccatttgtgcctgctacagaatgttggcatggaaagtccttccaggacatcgtagtacccttagtagtatagaagacatgcagtggggtaaaggagtccgagagatacccgcctcagtgtgcacactaccatgtaagccaggacagagaaagaagacacagaaaggaactccttgctgttggacctgtgagccttgcgatggttaccagtaccagtttgatgagatgacatgccagcattgcccctatgaccagaggcccaatgaaaatcgaaccggatgccaggatattcccatcatcaaactggagtggcactccccctgggctgtgattcctgtcttcctggcaatgttggggatcattgccaccatctttgtcatggccactttcatccgctacaatgacacgcccattgtccgggcatctgggcgggaactcagctatgttcttttgacgggcatctttctttgctacatcatcactttcctgatgattgccaaaccagatgtggcagtgtgttctttccggcgagttttcttgggcttgggtatgtgcatcagttatgcagccctcttgacgaaaacaaatcggatttatcgcatatttgagcagggcaagaaatcagtaacagctcccagactcataagcccaacatcacaactggcaatcacttccagtttaatatcagttcagcttctaggggtgttcatttggtttggtgttgatccacccaacatcatcatagactatgatgaacacaagacaatgaaccctgagcaagccagaggggttctcaagtgtgacattacagatctccaaatcatttgctccttgggatatagcattcttctcatggtcacatgtactgtgtatgccatcaagactcggggtgtacccgagaattttaacgaagccaagcccattggattcactatgtacacgacatgtatagtatggcttgccttcattccaattttttttggcaccgctcaatcagcggaaaagcatcagtttgctaaggataacagcctccagctccatctatgttcctgcaaaagacatgactcatgcttttttatggctgtacagtattccatggtctcaggctttccctgaatcattgtaagataatggagacgcagcaatgactgttcttgttatcctccccgaccggactaaatgaagacggggcctctgtcctatttattttcctgagcatctaatggtgcctggacacacactgtcattgtttgaaaaatgagtacatgttcactctaaagttacaag

SEQ ID NO: 9081 - DNA, 160 bp, Homo sapiens
  source 1..160: mol_type = unassigned DNA
gtgagaagtgcaactgctactgaccatctgcactggcatctagtcaagcgattgtctgaggcaagattttggagattcccatctgatattcttctatttggtctcttgtacccattgtcatcctgtaccacacataataaagtttaagaatgtcaagcaa

SEQ ID NO: 9082 - DNA, 2034 bp, Homo sapiens
  source 1..2034: mol_type = unassigned DNA
ggtggactctgcattgcccagtccgtgagaatcccccaggaacgcaaagacaggaccattgactttgatagaattatcaaacagctcctggacacccccaactccagggccgtcgtgatttttgccaacgatgaggatataaagcagatccttgcagcagccaaaagagctgaccaagttggccattttctttgggtgggatcagacagctggggatccaaaataaacccactgcaccagcatgaagatatcgcagaaggggccatcaccattcagcccaagcgagccacggtggaagggtttgatgcctactttacgtcccgtacacttgaaaacaacagaagaaatgtatggtttgccgaatactgggaggaaaacttcaactgcaagttgacgattagtgggtcaaaaaaagaagacacagatcgcaaatgcacaggacaggagagaattggaaaagattccaactatgagcaggagggtaaagtccagttcgtgattgacgcagtctatgctatggctcacgcccttcaccacatgaacaaggatctctgtgctgactaccggggtgtctgcccagagatggagcaagctggaggcaagaagttgctgaagtatatacgcaatgttaatttcaatggtagtgctggcactccagtgatgtttaacaagaacggggatgcacctgggcgttatgacatctttcagtaccagaccacaaacaccagcaacccgggttaccgtctgatcgggcagtggacagacgaacttcagctcaatatagaagacatgcagtggggtaaaggagtccgagagatacccgcctcagtgtgcacactaccatgtaagccaggacagagaaagaagacacagaaaggaactccttgctgttggacctgtgagccttgcgatggttaccagtaccagtttgatgagatgacatgccagcattgcccctatgaccagaggcccaatgaaaatcgaaccggatgccaggatattcccatcatcaaactggagtggcactccccctgggctgtgattcctgtcttcctggcaatgttggggatcattgccaccatctttgtcatggccactttcatccgctacaatgacacgcccattgtccgggcatctgggcgggaactcagctatgttcttttgacgggcatctttctttgctacatcatcactttcctgatgattgccaaaccagatgtggcagtgtgttctttccggcgagttttcttgggcttgggtatgtgcatcagttatgcagccctcttgacgaaaacaaatcggatttatcgcatatttgagcagggcaagaaatcagtaacagctcccagactcataagcccaacatcacaactggcaatcacttccagtttaatatcagttcagcttctaggggtgttcatttggtttggtgttgatccacccaacatcatcatagactatgatgaacacaagacaatgaaccctgagcaagccagaggggttctcaagtgtgacattacagatctccaaatcatttgctccttgggatatagcattcttctcatggtcacatgtactgtgtatgccatcaagactcggggtgtacccgagaattttaacgaagccaagcccattggattcactatgtacacgacatgtatagtatggcttgccttcattccaattttttttggcaccgctcaatcagcggaaaagctctacatacaaactaccacgcttacaatctccatgaacctaagtgcatcagtggcgctggggatgctatacatgccgaaagtgtacatcatcattttccaccctgaactcaatgtccagaaacggaagcgaagcttcaaggcggtagtcacagcagccaccatgtcatcgaggctgtcacacaaacccagtgacagacccaacggtgaggcaaagaccgagctctgtgaaaacgtagacccaaacaactgtataccaccagtaagaaagagtgtacaaaagtctgttacttggtacactatcccaccaacagtatag

SEQ ID NO: 9083 - DNA, 4057 bp, Homo sapiens
  source 1..4057: mol_type = unassigned DNA
gatttttaaaaatcagaactattgacatttctggtctcctcgtcgcttcaggctgaagagcggagggggatccgcgggccgagggtccccctccctgcccgcgccagggccgctgggtgacaccgaaatccagaggctcccgcccctcgggggttcctcctcccgcttcccgaggtgactggttggcgcgaagcgattggcgatcccgggcgcgatcctggccgcggctccccgcgccgcgccgggtgaatggccgcgggcggaggatcgggaggcgccgggcgcagaccaatcgcggccgccggtgggagtatttgttattcacatggaagagacttggcgcctgctaggccagctcagccccctcagcccagagatcagccacaagtgcggccgctgtgctcgcctcacgcggcggcggcggcggcggcggcggcgctgacatggagctgcgggcccccggcgggcttcctcaccgcgccctctgcggggagcagggaataattctgctacaaggctgatttcaaggacatgaattgttgacctcatcccaacatcagaacctcagatgttctaatttttgcaccattccaggcaagttgatcttataaggaaataaaattgaaccttaggggtctgatggaaattcactgtgacattcaaatcaagaaaacttgctaatgcccacagagccttttccccatgggccctgatggtagcctccagaaggtgcagcctcaggtggtgccctttcttctgtggcaagaataaactttgggtcttggattgcaataccacctgtggagaaaatggtatgcgagggaaagcgatcagcctcttgcccttgtttcttcctcttgaccgccaagttctactggatcctcacaatgatgcaaagaactcacagccaggagtatgcccattccatacgggtggatggggacattattttggggggtctcttccctgtccacgcaaagggagagagaggggtgccttgtggggagctgaagaaggaaaaggggattcacagactggaggccatgctttatgcaattgaccagattaacaaggaccctgatctcctttccaacatcactctgggtgtccgcatcctcgacacgtgctctagggacacctatgctttggagcagtctctaacattcgtgcaggcattaatagagaaagatgcttcggatgtgaagtgtgctaatggagatccacccattttcaccaagcccgacaagatttctggcgtcataggtgctgcagcaagctccgtgtccatcatggttgctaacattttaagactttttaagatacctcaaatcagctatgcatccacagccccagagctaagtgataacaccaggtatgactttttctctcgagtggttccgcctgactcctaccaagcccaagccatggtggacatcgtgacagcactgggatggaattatgtttcgacactggcttctgaggggaactatggtgagagcggtgtggaggccttcacccagatctcgagggagattggtggtgtttgcattgctcagtcacagaaaatcccacgtgaaccaagacctggagaatttgaaaaaattatcaaacgcctgctagaaacacctaatgctcgagcagtgattatgtttgccaatgaggatgacatcaggaggatattggaagcagcaaaaaaactaaaccaaagtgggcattttctctggattggctcagatagttggggatccaaaatagcacctgtctatcagcaagaggagattgcagaaggggctgtgacaattttgcccaaacgagcatcaattgatggatttgatcgatactttagaagccgaactcttgccaataatcgaagaaatgtgtggtttgcagaattctgggaggagaattttggctgcaagttaggatcacatgggaaaaggaacagtcatataaagaaatgcacagggctggagcgaattgctcgggattcatcttatgaacaggaaggaaaggtccaatttgtaattgatgctgtatattccatggcttacgccctgcacaatatgcacaaagatctctgccctggatacattggcctttgtccacgaatgagtaccattgatgggaaagagctacttggttatattcgggctgtaaattttaatggcagtgctggcactcctgtcacttttaatgaaaacggagatgctcctggacgttatgatatcttccagtatcaaataaccaacaaaagcacagagtacaaagtcatcggccactggaccaatcagcttcatctaaaagtggaagacatgcagtgggctcatagagaacatactcacccggcgtctgtctgcagcctgccgtgtaagccaggggagaggaagaaaacggtgaaaggggtcccttgctgctggcactgtgaacgctgtgaaggttacaactaccaggtggatgagctgtcctgtgaactttgccctctggatcagagacccaacatgaaccgcacaggctgccagcttatccccatcatcaaattggagtggcattctccctgggctgtggtgcctgtgtttgttgcaatattgggaatcatcgccaccacctttgtgatcgtgacctttgtccgctataatgacacacctatcgtgagggcttcaggacgcgaacttagttacgtgctcctaacggggatttttctctgttattcaatcacgtttttaatgattgcagcaccagatacaatcatatgctccttccgacgggtcttcctaggacttggcatgtgtttcagctatgcagcccttctgaccaaaacaaaccgtatccaccgaatatttgagcaggggaagaaatctgtcacagcgcccaagttcattagtccagcatctcagctggtgatcaccttcagcctcatctccgtccagctccttggagtgtttgtctggtttgttgtggatcccccccacatcatcattgactatggagagcagcggacactagatccagagaaggccaggggagtgctcaagtgtgacatttctgatctctcactcatttgttcacttggatacagtatcctcttgatggtcacttgtactgtttatgccattaaaacgagaggtgtcccagagactttcaatgaagccaaacctattggatttaccatgtataccacctgcatcatttggttagctttcatccccatcttttttggtacagcccagtcagcagaaaagatgtacatccagacaacaacacttactgtctccatgagtttaagtgcttcagtatctctgggcatgctctatatgcccaaggtttatattataatttttcatccagaacagaatgttcaaaaacgcaagaggagcttcaaggctgtggtgacagctgccaccatgcaaagcaaactgatccaaaaaggaaatgacagaccaaatggcgaggtgaaaagtgaactctgtgagagtcttgaaaccaacacttcctctaccaagacaacatatatcagttacagcaatcattcaatctgaaacagggaaatggcacaatctgaagagatgtggtatatgatcttaaatgatgaacatgagaccgcaaaaattcactcctggagatctccgtagactacaatcaatcaaatcaatagtcagtcttgtaaggaacaaaaattagccatgagccaaaagtatcaataaacggggagtgaagaaacccgttttatacaataaaaccaatgagtgtcaagctaaagtattgcttattcatgagcagttaaaacaaatcacaaaaggaaaactaatgttagctcgtgaaaaaaaatgctgttgaaataaataatgtctgatgttattcttgtatttttctgtgattgtgagaactcccgttcctgtcccacattgtttaacttgtataagacaatgagtctgtttcttgtaatggctgaccagattgaagccctgggttgtgctaaaaataaatgcaatgattgatgcatgcaattttttatacaaataatttatttctaataataaaggaatgttttgcaaatgtt

SEQ ID NO: 9084 - DNA, 3850 bp, Homo sapiens
  source 1..3850: mol_type = unassigned DNA
acattacagtaaagaggttcagaaaagagggagactttacccggaactcccaaggcttggagatgtgatcccccaaaagtttagtcggcgaatgggagactgaagggtgacgggaagggggcaggcgcgctcggcgctctgactgggcgtgcggcggcaggattttaaagcgctctgcctcggatcgtctgccctgggtgacctcccggacctgccctggtggaatccggacttgccccgccgagatgacgaggaataattctgctacaaggctgatttcaaggacatgaattgttgacctcatcccaacatcagaacctcagatgttctaatttttgcaccattccaggcaagttgatcttataaggaaataaaattgaaccttaggggtctgatggaaattcactgtgacattcaaatcaagaaaacttgctaatgcccacagagccttttccccatgggccctgatggtagcctccagaaggtgcagcctcaggtggtgccctttcttctgtggcaagaataaactttgggtcttggattgcaataccacctgtggagaaaatggtatgcgagggaaagcgatcagcctcttgcccttgtttcttcctcttgaccgccaagttctactggatcctcacaatgatgcaaagaactcacagccaggagtatgcccattccatacgggtggatggggacattattttggggggtctcttccctgtccacgcaaagggagagagaggggtgccttgtggggagctgaagaaggaaaaggggattcacagactggaggccatgctttatgcaattgaccagattaacaaggaccctgatctcctttccaacatcactctgggtgtccgcatcctcgacacgtgctctagggacacctatgctttggagcagtctctaacattcgtgcaggcattaatagagaaagatgcttcggatgtgaagtgtgctaatggagatccacccattttcaccaagcccgacaagatttctggcgtcataggtgctgcagcaagctccgtgtccatcatggttgctaacattttaagactttttaagatacctcaaatcagctatgcatccacagccccagagctaagtgataacaccaggtatgactttttctctcgagtggttccgcctgactcctaccaagcccaagccatggtggacatcgtgacagcactgggatggaattatgtttcgacactggcttctgaggggaactatggtgagagcggtgtggaggccttcacccagatctcgagggagattggtggtgtttgcattgctcagtcacagaaaatcccacgtgaaccaagacctggagaatttgaaaaaattatcaaacgcctgctagaaacacctaatgctcgagcagtgattatgtttgccaatgaggatgacatcaggaggatattggaagcagcaaaaaaactaaaccaaagtgggcattttctctggattggctcagatagttggggatccaaaatagcacctgtctatcagcaagaggagattgcagaaggggctgtgacaattttgcccaaacgagcatcaattgatggatttgatcgatactttagaagccgaactcttgccaataatcgaagaaatgtgtggtttgcagaattctgggaggagaattttggctgcaagttaggatcacatgggaaaaggaacagtcatataaagaaatgcacagggctggagcgaattgctcgggattcatcttatgaacaggaaggaaaggtccaatttgtaattgatgctgtatattccatggcttacgccctgcacaatatgcacaaagatctctgccctggatacattggcctttgtccacgaatgagtaccattgatgggaaagagctacttggttatattcgggctgtaaattttaatggcagtgctggcactcctgtcacttttaatgaaaacggagatgctcctggacgttatgatatcttccagtatcaaataaccaacaaaagcacagagtacaaagtcatcggccactggaccaatcagcttcatctaaaagtggaagacatgcagtgggctcatagagaacatactcacccggcgtctgtctgcagcctgccgtgtaagccaggggagaggaagaaaacggtgaaaggggtcccttgctgctggcactgtgaacgctgtgaaggttacaactaccaggtggatgagctgtcctgtgaactttgccctctggatcagagacccaacatgaaccgcacaggctgccagcttatccccatcatcaaattggagtggcattctccctgggctgtggtgcctgtgtttgttgcaatattgggaatcatcgccaccacctttgtgatcgtgacctttgtccgctataatgacacacctatcgtgagggcttcaggacgcgaacttagttacgtgctcctaacggggatttttctctgttattcaatcacgtttttaatgattgcagcaccagatacaatcatatgctccttccgacgggtcttcctaggacttggcatgtgtttcagctatgcagcccttctgaccaaaacaaaccgtatccaccgaatatttgagcaggggaagaaatctgtcacagcgcccaagttcattagtccagcatctcagctggtgatcaccttcagcctcatctccgtccagctccttggagtgtttgtctggtttgttgtggatcccccccacatcatcattgactatggagagcagcggacactagatccagagaaggccaggggagtgctcaagtgtgacatttctgatctctcactcatttgttcacttggatacagtatcctcttgatggtcacttgtactgtttatgccattaaaacgagaggtgtcccagagactttcaatgaagccaaacctattggatttaccatgtataccacctgcatcatttggttagctttcatccccatcttttttggtacagcccagtcagcagaaaagatgtacatccagacaacaacacttactgtctccatgagtttaagtgcttcagtatctctgggcatgctctatatgcccaaggtttatattataatttttcatccagaacagaatgttcaaaaacgcaagaggagcttcaaggctgtggtgacagctgccaccatgcaaagcaaactgatccaaaaaggaaatgacagaccaaatggcgaggtgaaaagtgaactctgtgagagtcttgaaaccaacagtaagtcatctgtagagtttccgatggtcaagagcgggagcacttcctaatagatcttcctctaccaagacaacatatatcagttacagcaatcattcaatctgaaacagggaaatggcacaatctgaagagatgtggtatatgatcttaaatgatgaacatgagaccgcaaaaattcactcctggagatctccgtagactacaatcaatcaaatcaatagtcagtcttgtaaggaacaaaaattagccatgagccaaaagtatcaataaacggggagtgaagaaacccgttttatacaataaaaccaatgagtgtcaagctaaagtattgcttattcatgagcagttaaaacaaatcacaaaaggaaaactaatgttagctcgtgaaaaaaaatgctgttgaaataaataatgtctgatgttattcttgtatttttctgtgattgtgagaactcccgttcctgtcccacattgtttaacttgtataagacaatgagtctgtttcttgtaatggctgaccagattgaagccctgggttgtgctaaaaataaatgcaatgattgatgcatgcaattttttatacaaataatttatttctaataataaagg

SEQ ID NO: 9085 - DNA, 910 bp, Homo sapiens
  source 1..910: mol_type = unassigned DNA
gaccaagaagagcgaagacagtctggagaaaaaaattaagttggaagacatatactaccaagtattgagattcttaacctctagcttgtagaaagaaaaaccttccagaaagagctctctctatgtacatccagacaacaacacttactgtctccatgagtttaagtgcttcagtatctctgggcatgctctatatgcccaaggtttatattataatttttcatccagaacagaatgttcaaaaacgcaagaggagcttcaaggctgtggtgacagctgccaccatgcaaagcaaactgatccaaaaaggaaatgacagaccaaatggcgaggtgaaaagtgaactctgtgagagtcttgaaaccaacacttcctctaccaagacaacatatatcagttacagcaatcattcaatctgaaacagggaaatggcacaatctgaagagatgtggtatatgatcttaaatgatgaacatgagaccgcaaaaattcactcctggagatctccgtagactacaatcaatcaaatcaatagtcagtcttgtaaggaacaaaaattagccatgagccaaaagtatcaataaacggggagtgaagaaacccgttttatacaataaaaccaatgagtgtcaagctaaagtattgcttattcatgagcagttaaaacaaatcacaaaaggaaaactaatgttagctcgtgaaaaaaaatgctgttgaaataaataatgtctgatgttattcttgtatttttctgtgattgtgagaactcccgttcctgtcccacattgtttaacttgtataagacaatgagtctgtttcttgtaatggctgaccagattgaagccctgggttgtgctaaaaataaatgcaatgattgatgcatgcaattttttatacaaataatttattt

SEQ ID NO: 9086 - DNA, 3240 bp, Homo sapiens
  source 1..3240: mol_type = unassigned DNA
ccacctgtggagaaaatggtatgcgagggaaagcgatcagcctcttgcccttgtttcttcctcttgaccgccaagttctactggatcctcacaatgatgcaaagaactcacagccaggagtatgcccattccatacgggtggatggggacattattttggggggtctcttccctgtccacgcaaagggagagagaggggtgccttgtggggagctgaagaaggaaaaggggattcacagactggaggccatgctttatgcaattgaccagattaacaaggaccctgatctcctttccaacatcactctgggtgtccgcatcctcgacacgtgctctagggacacctatgctttggagcagtctctaacattcgtgcaggcattaatagagaaagatgcttcggatgtgaagtgtgctaatggagatccacccattttcaccaagcccgacaagatttctggcgtcataggtgctgcagcaagctccgtgtccatcatggttgctaacattttaagactttttaagatacctcaaatcagctatgcatccacagccccagagctaagtgataacaccaggtatgactttttctctcgagtggttccgcctgactcctaccaagcccaagccatggtggacatcgtgacagcactgggatggaattatgtttcgacactggcttctgaggggaactatggtgagagcggtgtggaggccttcacccagatctcgagggagattggtggtgtttgcattgctcagtcacagaaaatcccacgtgaaccaagacctggagaatttgaaaaaattatcaaacgcctgctagaaacacctaatgctcgagcagtgattatgtttgccaatgaggatgacatcaggaggatattggaagcagcaaaaaaactaaaccaaagtgggcattttctctggattggctcagatagttggggatccaaaatagcacctgtctatcagcaagaggagattgcagaaggggctgtgacaattttgcccaaacgagcatcaattgatggatttgatcgatactttagaagccgaactcttgccaataatcgaagaaatgtgtggtttgcagaattctgggaggagaattttggctgcaagttaggatcacatgggaaaaggaacagtcatataaagaaatgcacagggctggagcgaattgctcgggattcatcttatgaacaggaaggaaaggtccaatttgtaattgatgctgtatattccatggcttacgccctgcacaatatgcacaaagatctctgccctggatacattggcctttgtccacgaatgagtaccattgatgggaaagagctacttggttatattcgggctgtaaattttaatggttgccgaagagggatccagatgtctctaccctggccaactctttttactccttcattttccagtagttgggcagtgctggcactcctgtcacttttaatgaaaacggagatgctcctggacgttatgatatcttccagtatcaaataaccaacaaaagcacagagtacaaagtcatcggccactggaccaatcagcttcatctaaaagtggaagacatgcagtgggctcatagagaacatactcacccggcgtctgtctgcagcctgccgtgtaagccaggggagaggaagaaaacggtgaaaggggtcccttgctgctggcactgtgaacgctgtgaaggttacaactaccaggtggatgagctgtcctgtgaactttgccctctggatcagagacccaacatgaaccgcacaggctgccagcttatccccatcatcaaattggagtggcattctccctgggctgtggtgcctgtgtttgttgcaatattgggaatcatcgccaccacctttgtgatcgtgacctttgtccgctataatgacacacctatcgtgagggcttcaggacgcgaacttagttacgtgctcctaacggggatttttctctgttattcaatcacgtttttaatgattgcagcaccagatacaatcatatgctccttccgacgggtcttcctaggacttggcatgtgtttcagctatgcagcccttctgaccaaaacaaaccgtatccaccgaatatttgagcaggggaagaaatctgtcacagcgcccaagttcattagtccagcatctcagctggtgatcaccttcagcctcatctccgtccagctccttggagtgtttgtctggtttgttgtggatcccccccacatcatcattgactatggagagcagcggacactagatccagagaaggccaggggagtgctcaagtgtgacatttctgatctctcactcatttgttcacttggatacagtatcctcttgatggtcacttgtactgtttatgccattaaaacgagaggtgtcccagagactttcaatgaagccaaacctattggatttaccatgtataccacctgcatcatttggttagctttcatccccatcttttttggtacagcccagtcagcagaaaagatgtacatccagacaacaacacttactgtctccatgagtttaagtgcttcagtatctctgggcatgctctatatgcccaaggtttatattataatttttcatccagaacagaatgttcaaaaacgcaagaggagcttcaaggctgtggtgacagctgccaccatgcaaagcaaactgatccaaaaaggaaatgacagaccaaatggcgaggtgaaaagtgaactctgtgagagtcttgaaaccaacacttcctctaccaagacaacatatatcagttacagcaatcattcaatctgaaacagggaaatggcacaatctgaagagatgtggtatatgatcttaaatgatgaacatgagaccgcaaaaattcactcctggagatctccgtagactacaatcaatcaaatcaatagtcagtcttgtaaggaacaaaaattagccatgagccaaaagtatcaataaacggggagtgaagaaacccgttttatacaataaaaccaatgagtgtcaagctaaagtattgcttattcatgagcagttaaaacaaatcacaaaaggaaaactaatgttagctcgtgaaaaaaaatgctgttgaaataaataatgtctgatgttattcttgtatttttctgtgattgtgagaactcccgttcctgtcccacattgtttaacttgtataagacaatgagtctgtttcttgtaatggctgaccagattgaagccc

SEQ ID NO: 9087 - DNA, 831 bp, Homo sapiens
  source 1..831: mol_type = unassigned DNA
attcttaacctctagcttgtagaaagaaaaaccttccagaaagagctctctctatgtacatccagacaacaacacttactgtctccatgagtttaagtgcttcagtatctctgggcatgctctatatgcccaaggtttatattataatttttcatccagaacagaatgttcaaaaacgcaagaggagcttcaaggctgtggtgacagctgccaccatgcaaagcaaactgatccaaaaaggaaatgacagaccaaatggcgaggtgaaaagtgaactctgtgagagtcttgaaaccaacagtaagtcatctgtagagtttccgatggtcaagagcgggagcacttcctaatagatcttcctctaccaagacaacatatatcagttacagcaatcattcaatctgaaacagggaaatggcacaatctgaagagatgtggtatatgatcttaaatgatgaacatgagaccgcaaaaattcactcctggagatctccgtagactacaatcaatcaaatcaatagtcagtcttgtaaggaacaaaaattagccatgagccaaaagtatcaataaacggggagtgaagaaacccgttttatacaataaaaccaatgagtgtcaagctaaagtattgcttattcatgagcagttaaaacaaatcacaaaaggaaaactaatgttagctcgtgaaaaaaaatgctgttgaaataaataatgtctgatgttattcttgtatttttctgtgattgtgagaactcccgttcctgtcccacattgtttaacttgtataagacaatgagtctgtttcttgtaatggctgaccagattgaagcc

SEQ ID NO: 9088 - DNA, 3650 bp, Homo sapiens
  source 1..3650: mol_type = unassigned DNA
gatcccgggcgcgatcctggccgcggctccccgcgccgcgccgggtgaatggccgcgggcggaggatcgggaggcgccgggcgcagaccaatcgcggccgccggtgggagtatttgttattcacatggaagagacttggcgcctgctaggccagctcagccccctcagcccagagatcagccacaagtgcggccgctgtgctcgcctcacgcggcggcggcggcggcggcggcggcgctgacatggagctgcgggcccccggcgggcttcctcaccgcgccctctgcggggagcagggaataattctgctacaaggctgatttcaaggacatgaattgttgacctcatcccaacatcagaacctcagatgttctaatttttgcaccattccaggcaagttgatcttataaggaaataaaattgaaccttaggggtctgatggaaattcactgtgacattcaaatcaagaaaacttgctaatgcccacagagccttttccccatgggccctgatggtagcctccagaaggtgcagcctcaggtggtgccctttcttctgtggcaagaataaactttgggtcttggattgcaataccacctgtggagaaaatggtatgcgagggaaagcgatcagcctcttgcccttgtttcttcctcttgaccgccaagttctactggatcctcacaatgatgcaaagaactcacagccaggagtatgcccattccatacgggtggatggggacattattttggggggtctcttccctgtccacgcaaagggagagagaggggtgccttgtggggagctgaagaaggaaaaggggattcacagactggaggccatgctttatgcaattgaccagattaacaaggaccctgatctcctttccaacatcactctgggtgtccgcatcctcgacacgtgctctagggacacctatgctttggagcagtctctaacattcgtgcaggcattaatagagaaagatgcttcggatgtgaagtgtgctaatggagatccacccattttcaccaagcccgacaagatttctggcgtcataggtgctgcagcaagctccgtgtccatcatggttgctaacattttaagactttttaagatacctcaaatcagctatgcatccacagccccagagctaagtgataacaccaggtatgactttttctctcgagtggttccgcctgactcctaccaagcccaagccatggtggacatcgtgacagcactgggatggaattatgtttcgacactggcttctgaggggaactatggtgagagcggtgtggaggccttcacccagatctcgagggagattggtggtgtttgcattgctcagtcacagaaaatcccacgtgaaccaagacctggagaatttgaaaaaattatcaaacgcctgctagaaacacctaatgctcgagcagtgattatgtttgccaatgaggatgacatcaggaggatattggaagcagcaaaaaaactaaaccaaagtgggcattttctctggattggctcagatagttggggatccaaaatagcacctgtctatcagcaagaggagattgcagaaggggctgtgacaattttgcccaaacgagcatcaattgatggatttgatcgatactttagaagccgaactcttgccaataatcgaagaaatgtgtggtttgcagaattctgggaggagaattttggctgcaagttaggatcacatgggaaaaggaacagtcatataaagaaatgcacagggctggagcgaattgctcgggattcatcttatgaacaggaaggaaaggtccaatttgtaattgatgctgtatattccatggcttacgccctgcacaatatgcacaaagatctctgccctggatacattggcctttgtccacgaatgagtaccattgatgggaaagagctacttggttatattcgggctgtaaattttaatggcagtgctggcactcctgtcacttttaatgaaaacggagatgctcctggacgttatgatatcttccagtatcaaataaccaacaaaagcacagagtacaaagtcatcggccactggaccaatcagcttcatctaaaagtggaagacatgcagtgggctcatagagaacatactcacccggcgtctgtctgcagcctgccgtgtaagccaggggagaggaagaaaacggtgaaaggggtcccttgctgctggcactgtgaacgctgtgaaggttacaactaccaggtggatgagctgtcctgtgaactttgccctctggatcagagacccaacatgaaccgcacaggctgccagcttatccccatcatcaaattggagtggcattctccctgggctgtggtgcctgtgtttgttgcaatattgggaatcatcgccaccacctttgtgatcgtgacctttgtccgctataatgacacacctatcgtgagggcttcaggacgcgaacttagttacgtgctcctaacggggatttttctctgttattcaatcacgtttttaatgattgcagcaccagatacaatcatatgctccttccgacgggtcttcctaggacttggcatgtgtttcagctatgcagcccttctgaccaaaacaaaccgtatccaccgaatatttgagcaggggaagaaatctgtcacagcgcccaagttcattagtccagcatctcagctggtgatcaccttcagcctcatctccgtccagctccttggagtgtttgtctggtttgttgtggatcccccccacatcatcattgactatggagagcagcggacactagatccagagaaggccaggggagtgctcaagtgtgacatttctgatctctcactcatttgttcacttggatacagtatcctcttgatggtcacttgtactgtttatgccattaaaacgagaggtgtcccagagactttcaatgaagccaaacctattggatttaccatgtataccacctgcatcatttggttagctttcatccccatcttttttggtacagcccagtcagcagaaaagatgtacatccagacaacaacacttactgtctccatgagtttaagtgcttcagtatctctgggcatgctctatatgcccaaggtttatattataatttttcatccagaacagaatgttcaaaaacgcaagaggagcttcaaggctgtggtgacagctgccaccatgcaaagcaaactgatccaaaaaggaaatgacagaccaaatggcgaggtgaaaagtgaactctgtgagagtcttgaaaccaacagtaagtcatctgtagagtttccgatggtcaagagcgggagcacttcctaatagattccacccaggaaaaagcacatgataacaatacacagaaatctgtgctcaaccagtagaatttaactgatctattgaagcccatcttggtatctatgaaagagtggcaaataatttgaagatttgtatggtaaaataccaggaagctgaatatggtaaacattacaacctttaccttactaggttctacagatgaatcaaaaaagaaagaaaagcaaagcttcctctaccaagacaacatatatcagttacagcaatcattcaatctgaaacagggaaatggcacaatctgaagagatgtggtatatgatc

SEQ ID NO: 9089 - DNA, 1878 bp, Homo sapiens
  source 1..1878: mol_type = unassigned DNA
agacaacactagatggggtggtcagggaaggtctgttgagctgaggctgaaggatgagaaaggccaggaaggacttacttgggaaaatgtttgtggtgatatgtatgagtgctgcaggtgaaacaaaaaggaagccagtgtagttggatcagatacctcaaatcagctatgcatccacagccccagagctaagtgataacaccaggtatgactttttctctcgagtggttccgcctgactcctaccaagcccaagccatggtggacatcgtgacagcactgggatggaattatgtttcgacactggcttctgaggggaactatggtgagagcggtgtggaggccttcacccagatctcgagggagattgaaaatgtatgaaaggcctggtcttgttggacagattgggctaattgatttaattggacaactgttcacacctgctgtggtgtttgcattgctcagtcacagaaaatcccacgtgaaccaagacctggagaatttgaaaaaattatcaaacgcctgctagaaacacctaatgctcgagcagtgattatgtttgccaatgaggatgacatcaggaggatattggaagcagcaaaaaaactaaaccaaagtgggcattttctctggattggctcagatagttggggatccaaaatagcacctgtctatcagcaagaggagattgcagaaggggctgtgacaattttgcccaaacgagcatcaattgatggatttgatcgatactttagaagccgaactcttgccaataatcgaagaaatgtgtggtttgcagaattctgggaggagaattttggctgcaagttaggatcacatgggaaaaggaacagtcatataaagaaatgcacagggctggagcgaattgctcgggattcatcttatgaacaggaaggaaaggtccaatttgtaattgatgctgtatattccatggcttacgccctgcacaatatgcacaaagatctctgccctggatacattggcctttgtccacgaatgagtaccattgatgggaaagagctacttggttatattcgggctgtaaattttaatggttgccgaagagggatccagatgtctctaccctggccaactctttttactccttcattttccagtagttgggcagtgctggcactgtgaacgctgtgaaggttacaactaccaggtggatgagctgtcctgtgaactttgccctctggatcagagacccaacatgaaccgcacaggctgccagcttatccccatcatcaaattggagtggcattctccctgggctgtggtgcctgtgtttgttgcaatattgggaatcatcgccaccacctttgtgatcgtgacctttgtccgctataatgacacacctatcgtgagggcttcaggacgcgaacttagttacgtgctcctaacggggatttttctctgttattcaatcacgtttttaatgattgcagcaccagatacaatcatatgctccttccgacgggtcttcctaggacttggcatgtgtttcagctatgcagcccttctgaccaaaacaaaccgtatccaccgaatatttgagcaggggaagaaatctgtcacagcgcccaagttcattagtccagcatctcagctggtgatcaccttcagcctcatctccgtccagctccttggagtgtttgtctggtttgttgtggatcccccccacatcatcattgactatggagagcagcggacactagatccagagaaggccaggggagtgctcaagtgtgacatttctgatctctcactcatttgttcacttggatacagtatcctcttgatggtcacttgtactgtttatgccattaaaacgagaggtgtcccagagactttc

SEQ ID NO: 9090 - DNA, 843 bp, Homo sapiens
  source 1..843: mol_type = unassigned DNA
catttatgaaatcagctttttggtctttgcaaatggagtgggttttccccctatacctcaaatcagctatgcatccacagccccagagctaagtgataacaccaggtatgactttttctctcgagtggttccgcctgactcctaccaagcccaagccatggtggacatcgtgacagcactgggatggaattatgtttcgacactggcttctgaggggaactatggtgagagcggtgtggaggccttcacccagatctcgagggagattggtggtgtttgcattgctcagtcacagaaaatcccacgtgaaccaagacctggagaatttgaaaaaattatcaaacgcctgctagaaacacctaatgctcgagcagtgattatgtttgccaatgaggatgacatcaggaggatattggaagcagcaaaaaaactaaaccaaagtgggcattttctctggattggctcagatagttggggatccaaaatagcacctgtctatcagcaagaggagattgcagaaggggctgtgacaattttgcccaaacgagcatcaattgatggatttgatcgatactttagaagccgaactcttgccaataatcgaagaaatgtgtggtttgcagaattctgggaggagaattttggctgcaagttaggatcacatgggaaaaggaacagtcatataaagaaatgcacagggctggagcgaattgctcgggattcatcttatgaacaggaaggaaaggtccaatttgtaattgatgctgtatattccatggcttacgccctgcacaatatgcacaaagatctctgccctggatacattggcctttgtccacgaat

SEQ ID NO: 9091 - DNA, 1247 bp, Homo sapiens
  source 1..1247: mol_type = unassigned DNA
gcccaaactgtgaagcctggtgtcagagagtgtctgcgcacccaagatagcgggggaataattctgctacaaggctgatttcaaggacatgaattgttgacctcatcccaacatcagaacctcagatgttctaatttttgcaccattccaggcaagttgatcttataaggaaataaaattgaaccttaggggtctgatggaaattcactgtgacattcaaatcaagaaaacttgctaatgcccacagagccttttccccatgggccctgatggtagcctccagaaggtgcagcctcaggtggtgccctttcttctgtggcaagaataaactttgggtcttggattgcaataccacctgtggagaaaatggtatgcgagggaaagcgatcagcctcttgcccttgtttcttcctcttgaccgccaagttctactggatcctcacaatgatgcaaagaactcacagccaggagtatgcccattccatacgggtggatggggacattattttggggggtctcttccctgtccacgcaaagggagagagaggggtgccttgtggggagctgaagaaggaaaaggggattcacagactggaggccatgctttatgcaattgaccagattaacaaggaccctgatctcctttccaacatcactctgggtgtccgcatcctcgacacgtgctctagggacacctatgctttggagcagtctctaacattcgtgcaggcattaatagagaaagatgcttcggatgtgaagtgtgctaatggagatccacccattttcaccaagcccgacaagatttctggcgtcataggtgctgcagcaagctccgtgtccatcatggttgctaacattttaagactttttaagatacctcaaatcagctatgcatccacagccccagagctaagtgataacaccaggtatgactttttctctcgagtggttccgcctgactcctaccaagcccaagccatggtggacatcgtgacagcactgggatggaattatgtttcgacactggcttctgaggggaactatggtgagagcggtgtggaggccttcacccagatctcgagggagattggtggtgtttgcattgctcagtcacagaaaatcccacgtgaaccaagacctggagaatttgaaaaaattatcaaacgcctgctagaaacacctaatgctcgagcagtgattatgtttgccaatgaggatgacatcaggaggatattggaagcagc

SEQ ID NO: 9092 - DNA, 429 bp, Homo sapiens
  source 1..429: mol_type = unassigned DNA
tttttctctcgagtggttccgcctgactcctaccaagcccaagccatggtggacatcgtgacagcactgggatggaattatgtttcgacactggcttctgaggggaactatggtgagagcggtgtggaggccttcacccagatctcgagggagattggttatccatccctgtttgggattcagggctgccttcatgaatgttttgctatactatgtcaagttgtttaccaatttctgcttctaatgcagctgtcagatgctcaaactgtctattagtcgaagaggctctctactgaccacctttctcaagtttcttcttcttacatacaatgtttttgacaagactaagcatatcaaaccatcttttaacaattgtaaagcctaatattggccagcatacaattcaattcattaaacattgtagcactg

SEQ ID NO: 9093 - DNA, 365 bp, Homo sapiens
  source 1..365: mol_type = unassigned DNA
gacatggcagccttcagtagcagtgactcctgcactgacaccaccagtatgagtgggtaagttagtgatgggacagaaacacttctcaagatcttcaggcttggccaaggattatcagcccatgtgaatatggaatgaaagaaggcaaagagcggtatagtttgttctcttccttttctgcaagaagtctggaagtgtgttggctggttgtgtccctctgcaaacaaaggcagcgaggatccagctccttcccactgttctgtgcttctacccttagcatgtggtctttcttatcagtcagccctcattgtctcctggtagcaggtccagggatcacaagtaaatggtgacatctatagaaaaac

SEQ ID NO: 9094 - DNA, 477 bp, Homo sapiens
  source 1..477: mol_type = unassigned DNA
atgtgatctttgcctcaatggaggcatcatttagaggcattgcccccaaaacactgtgcctgagagagagcatcctgcagttcatgtaatgaaaagacctggcatgagacagtggagcaggacagctatggaccccaaactcaaagaggtggaaagcataccacagacatctttcattagcactgtagctgcactgtctagaagataatctgagagtgcttgttgaatgaaggaatagatggacatggcagccttcagtagcagtgactcctgcactgacaccaccagtatgagtgggtaagttagtgatgggacagaaacacttctcaagatcttcaggcttggccaaggtactcaaatgcatagctgttggagatagcaagaggactacatttttacttattttcttaaaatattccaactcctattctgttttgtgtttaaaaattctagtgtttgcaaatatcttgaaggaac

SEQ ID NO: 9095 - DNA, 647 bp, Homo sapiens
  source 1..647: mol_type = unassigned DNA
gttgagctgaggctgaaggatgagaaaggccaggaaggacttacttgggaaaatgtttgtggtgatatgtatgagtgctgcaggtgaaacaaaaaggaagccagtgtagttggatcagcaccaaataactccccaggcacatgactatctgctaagaactgcgttcgagataattcagcttgaacctgtgcctcctactcttgcaccatatctcaaccttgggacccacttctgcctgcacggaagacttaaagttcacttgcaatacctcaaatcagctatgcatccacagccccagagctaagtgataacaccaggtatgactttttctctcgagtggttccgcctgactcctaccaagcccaagccatggtggacatcgtgacagcactgggatggaattatgtttcgacactggcttctgaggggaactatggtgagagcggtgtggaggccttcacccagatctcgagggagattgaaaatgtatgaaaggcctggtcttgttggacagattgggctaattgatttaattggacaactgttcacacctgctaggtggaaagcataccacagacatctttcattagcactgtagctgcactgtctagaagataatctgagagtgcttgttgaatgaaggaata

SEQ ID NO: 9096 - DNA, 551 bp, Homo sapiens
  source 1..551: mol_type = unassigned DNA
aagaatacactagagtctgggctactaccgcgattgaatacaaatcctgccaactgacagaactggaaaacagggttggtggtggagatacaagaaaaatcatgaacgggagaaaagcattcctatggtagcttgtattttgcttgaaagaaaaatagagaaaaagagccaccagcaggaataattctgctacaaggctgatttcaaggacatgaattgttgacctcatcccaacatcagaacctcagatgttctaatttttgcaccattccaggcaagttgatcttataaggaaataaaattgaaccttaggggtctgatggaaattcactgtgacattcaaatcaagaaaacttgctaatgcccacagagccttttccccatgggccctgatggtagcctccagaaggtgcagcctcaggtggtgccctttcttctgtggcaagaataaactttgggtcttggattgcaataccacctgtggagaaaatggtatgcgagggaaagcgatcagcctcttgcccttgtttcttcctcttgaccgccaagtt

SEQ ID NO: 9097 - DNA, 1251 bp, Homo sapiens
  source 1..1251: mol_type = unassigned DNA
aattttttatacccacaggtggaagacatgcagtgggctcatagagaacatactcacccggcgtctgtctgcagcctgccgtgtaagccaggggagaggaagaaaacggtgaaaggggtcccttgctgctggcactgtgaacgctgtgaaggttacaactaccaggtggatgagctgtcctgtgaactttgccctctggatcagagacccaacatgaaccgcacaggctgccagcttatccccatcatcaaattggagtggcattctccctgggctgtggtgcctgtgtttgttgcaatattgggaatcatcgccaccacctttgtgatcgtgacctttgtccgctataatgacacacctatcgtgagggcttcaggacgcgaacttagttacgtgctcctaacggggatttttctctgttattcaatcacgtttttaatgattgcagcaccagatacaatcatatgctccttccgacgggtcttcctaggacttggcatgtgtttcagctatgcagcccttctgaccaaaacaaaccgtatccaccgaatatttgagcaggggaagaaatctgtcacagcgcccaagttcattagtccagcatctcagctggtgatcaccttcagcctcatctccgtccagctccttggagtgtttgtctggtttgttgtggatcccccccacatcatcattgactatggagagcagcggacactagatccagagaaggccaggggagtgctcaagtgtgacatttctgatctctcactcatttgttcacttggatacagtatcctcttgatggtcacttgtactgtttatgccattaaaacgagaggtgtcccagagactttcaatgaagccaaacctattggatttaccatgtataccacctgcatcatttggttagctttcatccccatcttttttggtacagcccagtcagcagaaaagatgtacatccagacaacaacacttactgtctccatgagtttaagtgcttcagtatctctgggcatgctctatatgcccaaggtttatattataatttttcatccagaacagaatgttcaaaaacgcaagaggagcttcaaggctgtggtgacagctgccaccatgcaaagcaaactgatccaaaaaggaaatgacagaccaaatggcgaggtgaaaagtgaactctgtgagagtcttgaaaccaacacttcctctaccaagacaacatatatcagttacagcaatcattcaatctga

SEQ ID NO: 9098 - DNA, 2618 bp, Homo sapiens
  source 1..2618: mol_type = unassigned DNA
acagagcctgggctcactgaccagcccaggaggaaccagcctctgccttaccaggccatcaatccctgaagccaggggatctgccctgccagacacgggcatgtgtgtgtgtgtttcaggcttatcatccttgcattgctgggggtttcgcaacacggggaacgttgctggtctggctgaggtttctgtcgtgccacccctcctgccctgcttatggagctactgtatgtgtcagggccgtttgcatcctgttactagtcagtctatcttaatgcactttaggaaactcttccctttccttgcacgtgctttgcgtatactagttccccataaagaatgtcactgcctgaaacagaacattctgtgaaatgcagggctgttggattcacatgttaaattgtttcatctcaatcacgagggttgtgtaggatccagggaagatttatcccggggggtcaagagatatcgatgccctcccagaaggagttgccagcccactgagcagggtggttctgccctcttgcctggcactggatctcaagtatttaagaagaaaagaatggaatacaaagaagttagaagcgctttggggcagattttccagcaagactgggtttgtctgcccctagggccactacactgtagtgtgcattgcaaatcatggtggagaaggtaccatttgatttaacatatcacttttccacctttacctaactacctttgtagtctgataacttgtgccagttagtattatttgctgcagtaattgactggccccctcagctcagtaactcccaaggctactgaactacagggttcagaaagtagaagggagccatgcagtccttccaccgagcgctgttccctcaatttatgaccccagaagggttaagagaaggcccaagtccctctgtttccagtggagcagaggttcttagcagtgagttttagtgttgaacaaaaatcaaagctagagcctactggggttgaggaatgtgttggtttctttctttctcggtcattccctgtttcacacagctctgataagttcaccttgtaggactaggtcacacttaggtgatgaaaaattttcatcctgtgttatgttttctcaatgactcagagaagggaaacccaggctgattcttcttccttctaacccatctcctgaaaactgctcagagcctaactattgctctgtttcatttcagggccaagattaacacccctcctgcaggaggaagacagccaccagcggctgctcatggggctgatggtgtctgagctaaaagaccattttttgagacacctacagggtgtagaaaagaagaaaattgaacagatggttctggactacatttcaaaactgctggatctcatttgccacatcgtagaaaccaattggaggaaacataatcttcattcctgggttctccacttcaatagtcgtggcagtgctgctgaatttgcagtttttcacatcatgaccaggattctggaagctacaaacagtttgtttttacctctgcctcctggttttcatactctgcacaccatcctcggggtccagtgtctccctttgcataacctgctgcattgcattgacagtggagtgttgcttctcactgaaacagctgtcataaggctcatgaaagatctggataatacagagaaaaatgaaaaactgaaattcagtatcattgtgcggcttcctccgcttattgggcagaagatttgtagactttgggatcatcctatgagttctaacatcatttcgcggaaccacgtgacgcgactgcttcagaactataagaaacagcctcggaattctatgattaacaagtcatcgttcagtgtagaatttctgcctctgaactacttcattgaaattctgacagatatagagtcctccaatcaagccctgtatccttttgaaggacatgacaatgtggatgcagaatttgtagaggaagcagctctgaaacacaccgcgatgcttttaggcttatgaaaaagaaaacgcaattggatctgctgctgccattttaatcttgctcattaaccttactcctttgagaattctttaacaatatttaaaattggtaacaaaaatagtttagccataattgtttagccatgtgagtttcaggttggtacacgttcagacagaactgctgtatcacattccaattttgaatagccagtgagcaatcaagtgtagagaaatgataaatggcctaagaaggcatacagtggcataaacgatgctcttcctagtagcttaataggccacaagctagtttctgttgcactctgaaataaaatatgctttaaaaatgtagggaacagtgcttagaaaagcaaaaactaggtgtgtcattgaaataataggcataaaaattaaatgttacataagaacactatttggaaagagggtccttttaaaaactgaatttgtactaaatcagatttgccatgtccagtacagaataatttgtacttagtatttgcagcagggtttgtctttgtgaattcagatgaaacatatttatttttttttatttataaaaggttgatttaggaatattttgtcagtcattaaaaaacctgaaaacata

SEQ ID NO: 9099 - DNA, 2975 bp, Homo sapiens
  source 1..2975: mol_type = unassigned DNA
tacttacctggtcatttcttccacctacttaatgttcaacatccagacctgatctgccacaatctctttctgacaggaaataatgaaatgattgatatgctacctcattgccctttacagtcattgtcagggtccctggtattggattgttgttctggaaagctctatagagcactgctcagccagtcgtctttattacagcttctgcagaacacttgcttagactgtgagaagatggctgcgttgcactgcgcgctctactgcggtcaaggtgcgcagttcctggaagcccagattattcagtggatttctgagaatgtctctgcctgccattcatttgacctcattcaggaatttataattgcttcttcatactggagtgtatattcagagacaagtaacatggacaaactattgccacattcctcagtgctcacttggaatacagaaattcctggaataactcttgtgacagaagacattgcattgcctcttatgaaggtgctcagctttaagggctactgggaaaaactgaactccaacctagaatatgttaagtacgccaagccacacttccactataacaacagtgtggtcaggagagagtggcacaacctgatctctgaagaggtatgagtgggtcagtgagaacaaagccagcagcgaggcatagtggactggatccaggtgatgcctttaaatcataaggctggcttccatgtgcagcactcttcccaattgccagggacttgatcattgtcattactgatctcaatgggcagagatgcttctatgatctctgttctcctagggaggaaactgaaaagcagaaagtttaaggggacacacagcacattcatagtagaagtatgattaatatccatgtctcagatgtgttctcaggttacttatgtagttaaaaattgatattaaaaaatctaggtgttcccaacttagtggtcattaggggttggggtagttggagggagaatagtggacgtgactcactgtccaggggtgacccagggaaatctttgggggtgatcgaagacttctatgtgttgattgtggtggtacattgtgggacatgaatctaaacatgataaaatgacatagaatgacacacacacattgtgccaatgtcaatttttgattttgatattgtgctctagttaggtaagatataagcactgaggagactgggtggagggtacattgcatctctctctagtatcgctgcatgtagattagtgttgttgtgtgtagtatatagttgactcgcagtttcctgtgaatctgtaattgtttcagaataaaatatttcttaaaactttaaaaaaaatctaggtgttctgattacctggaaagtatatttcttctctctgatgctcttaactgtattgcattatatccttgacgtgaaaagtcaccgataaaacctttaccttccacatttctgacgtgttctcactcctagaaaacaggaaaaagaaggtctgcggcatacgtgaggaatattcttgataatgcagtaaaggtgatttctaacctagaagcaagaaatttggggccaagattaacacccctcctgcaggaggaagacagccaccagcggctgctcatggggctgatggtgtctgagctaaaagaccattttttgagacacctacagggtgtagaaaagaagaaaattgaacagatggttctggactacatttcaaaactgctggatctcatttgccacatcgtagaaaccaattggaggaaacataatcttcattcctgggttctccacttcaatagtcgtggcagtgctgctgaatttgcagtttttcacatcatgaccaggattctggaagctacaaacagtttgtttttacctctgcctcctggttttcatactctgcacaccatcctcggggtccagtgtctccctttgcataacctgctgcattgcattgacagtggagtgttgcttctcactgaaacagctgtcataaggctcatgaaagatctggataatacagagaaaaatgaaaaactgaaattcagtatcattgtgcggcttcctccgcttattgggcagaagatttgtagactttgggatcatcctatgagttctaacatcatttcgcggaaccacgtgacgcgactgcttcagaactataagaaacagcctcggaattctatgattaacaagtcatcgttcagtgtagaatttctgcctctgaactacttcattgaaattctgacagatatagagtcctccaatcaagccctgtatccttttgaaggacatgacaatgtggatgcagaatttgtagaggaagcagctctgaaacacaccgcgatgcttttaggcttatgaaaaagaaaacgcaattggatctgctgctgccattttaatcttgctcattaaccttactcctttgagaattctttaacaatatttaaaattggtaacaaaaatagtttagccataattgtttagccatgtgagtttcaggttggtacacgttcagacagaactgctgtatcacattccaattttgaatagccagtgagcaatcaagtgtagagaaatgataaatggcctaagaaggcatacagtggcataaacgatgctcttcctagtagcttaataggccacaagctagtttctgttgcactctgaaataaaatatgctttaaaaatgtagggaacagtgcttagaaaagcaaaaactaggtgtgtcattgaaataataggcataaaaattaaatgttacataagaacactatttggaaagagggtccttttaaaaactgaatttgtactaaatcagatttgccatgtccagtacagaataatttgtacttagtatttgcagcagggtttgtctttgtgaattcagatgaaacatatttatttttttttatttataaaaggttgatttaggaatattttgtcagtcattaaaaaacctgaaaacata

SEQ ID NO: 9100 - DNA, 3251 bp, Homo sapiens
  source 1..3251: mol_type = unassigned DNA
cgagggcgaggcggccacgcggggccgggaatgcccgcggtgcggggccccagagccgcccggtggtcgtgtccgggcgatggctcttcgcctggtcgccgacttcgacctcgggaaggacgtgctcccgtggttgcgggcgcagcgggcagtgtcggaggccagcggggccggaagcggcggcgcagatgttttagaaaacgattatgagagcttacatgtattaaatgttgaaagaaatggaaatattatttatacctataaggatgataagggaaatgtcgtctttggattatatgattgtcaaaccagacaaaatgagcttctatatacctttgagaaagacttgcaagttttcagttgctctgtcaacagtgaaaggactttgcttgctgcaagtttagttcagtctactaaagaaggaaaaaggaacgaacttcaaccaggatcaaagtgcttgactttgttggttgaaatccaccctgttaacaatgtgaaggttctaaaggctgtggatagctatatttgggttcagtttctctacccacatattgaaagtcatcctcttccagagaaccatctgttactgatttcagaagagaaatatattgaacaatttcgtatccatgtcgcccaagaagatggaaatagagtggtgattaaaaattctggccatctcccaagagacagaatagctgaggatttcgtttgggctcagtgggatatgtcagaacagagattatattacattgacctgaagaaatcaaggagtatcttaaaatgtatccagttttatgctgatgagagctataacttaatgtttgaagtacccttggacatatcattaagcaactcaggatttaaacttgtcaactttggatgtgattatcatcaataccgagataaattttccaaacacctgactctgtgtgtttttaccaaccatacaggaagtttgtgtgtatgttacagcccgaagtgtgcctcttggggacaaatcacatattcagtgttttacattcataaaggacacagcaagaccttcaccacttctcttgagaatgttgggtcacacatgacaaagggcattacttttctcaaccttgactattatgtggctgtttacttacctggtcatttcttccacctacttaatgttcaacatccagacctgatctgccacaatctctttctgacaggaaataatgaaatgattgatatgctacctcattgccctttacagtcattgtcagggtccctggtattggattgttgttctggaaagctctatagagcactgctcagccagtcgtctttattacagcttctgcagaacacttgcttagactgtgagaagatggctgcgttgcactgcgcgctctactgcggtcaaggtgcgcagttcctggaagcccagattattcagtggatttctgagaatgtctctgcctgccattcatttgacctcattcaggaatttataattgcttcttcatactggagtgtatattcagagacaagtaacatggacaaactattgccacattcctcagtgctcacttggaatacagaaattcctggaataactcttgtgacagaagacattgcattgcctcttatgaaggtgctcagctttaagggctactgggaaaaactgaactccaacctagaatatgttaagtacgccaagccacacttccactataacaacagtgtggtcaggagagagtggcacaacctgatctctgaagagaaaacaggaaaaagaaggtctgcggcatacgtgaggaatattcttgataatgcagtaaaggtgatttctaacctagaagcaagaaatttggggccaagattaacacccctcctgcaggaggaagacagccaccagcggctgctcatggggctgatggtgtctgagctaaaagaccattttttgagacacctacagggtgtagaaaagaagaaaattgaacagatggttctggactacatttcaaaactgctggatctcatttgccacatcgtagaaaccaattggaggaaacataatcttcattcctgggttctccacttcaatagtcgtggcagtgctgctgaatttgcagtttttcacatcatgaccaggattctggaagctacaaacagtttgtttttacctctgcctcctggttttcatactctgcacaccatcctcggggtccagtgtctccctttgcataacctgctgcattgcattgacagtggagtgttgcttctcactgaaacagctgtcataaggctcatgaaagatctggataatacagagaaaaatgaaaaactgaaattcagtatcattgtgcggcttcctccgcttattgggcagaagatttgtagactttgggatcatcctatgagttctaacatcatttcgcggaaccacgtgacgcgactgcttcagaactataagaaacagcctcggaattctatgattaacaagtcatcgttcagtgtagaatttctgcctctgaactacttcattgaaattctgacagatatagagtcctccaatcaagccctgtatccttttgaaggacatgacaatgtggatgcagaatttgtagaggaagcagctctgaaacacaccgcgatgcttttaggcttatgaaaaagaaaacgcaattggatctgctgctgccattttaatcttgctcattaaccttactcctttgagaattctttaacaatatttaaaattggtaacaaaaatagtttagccataattgtttagccatgtgagtttcaggttggtacacgttcagacagaactgctgtatcacattccaattttgaatagccagtgagcaatcaagtgtagagaaatgataaatggcctaagaaggcatacagtggcataaacgatgctcttcctagtagcttaataggccacaagctagtttctgttgcactctgaaataaaatatgctttaaaaatgtagggaacagtgcttagaaaagcaaaaactaggtgtgtcattgaaataataggcataaaaattaaatgttacataagaacactatttggaaagagggtccttttaaaaactgaatttgtactaaatcagatttgccatgtccagtacagaataatttgtacttagtatttgcagcagggtttgtctttgtgaattcagatgaaacatatttatttttttttatttataaaaggttgatttaggaatattttgtcagtcattaaaaaacctgaaaacata

SEQ ID NO: 9101 - DNA, 3458 bp, Homo sapiens
  source 1..3458: mol_type = unassigned DNA
tttgtcaggtaccttcccaagagtaggctatgattcttctgtcagtcattcccacattcaatgagttgcaaagcctgtacatgttaccatgcctctctgattcagtgcctccattacctcttatccacgttcaggcaatagcttctctacaggtcttcataccttctgtagcaaattattactccaactcattctttgcctgttgccatattaatatcccaatggtaaatcttctgttctgcttaaaaactttcattacctcctcaaagtctctcaaattaataaatctctatcattcagcattcaacctctgtcacctgcactcataagcacagaactggtcacatttttaaaaatgtctattttttgtaattgattgtctgcctcccccagcagactgcaaggtgtatgggagcagcagttgtgcctgttttgctcatttttatactcttagccccttgccaggtgtgtggaagggatgtgctgaataaattagcttttccaaccttacctcttaatctttctctcctctaatatgattccaacccagctggatcatttactattttctgaatatgccctgtgctttctcatcttcggacctctgttcatgttctattaacacagctgccagttattaacagtgacattatggttgaaagcctaccctacaatcacacagttgatgcaaatttcaacttacacattattatttctgtgatcctgggcaagttgcctagctcctgtgaatcttggcttttggtttttccatttatgaaatgggaatctagtaattcccaccccatacttttgtatgaggatcagatgagccaggacacaggttgaaagccttggtacatgtccagtatgggtcgctattgttatattgcatgctaggctcttcacagacctggctctagttctcaaagcagccctgtgggaaaggtactggtggttccaatttagagatgaagaaatggaggctcagaaaggcttagttgcctgcagctggtgagtaatacagctggattctggcctagggctgctcatgccaaacctggctttttctactgtccgcactcatttccactgataggaattgcatctgtcctttgaagctccccgcaaatgccatcacttccaagagagctgttttgattctctcctggtctgataccttctcccatgcatgatgtttttatctgttgtcagtagtagtatacttagagatctgggtttctgtgggtagctctacccgtgagacaggcttgagaatgcctgcctctcaattgaattcctataaatttactatctggccatattgtcttaattctttcttttctatactttagtccaagtagactctaaaagcctttctctagggcatacccagagataagccatataaactattgccttctggtccaaatttgtttcccttcagcaaaatggtcctcatcccaacaaccttttagtctggacatacgaaatctgaaatgcttctgtactcttttgctatcttactgtagaatcacaaacatatcaaaccgtaaaaccattgagcaggcccttgctctgtttctgtgcaggaagagacccaaggagcaaggaatgtatacttaccggaaacttactatagacccagcgtgatatttagttacgaataatacagagaaggaaacttggaccttgttttcaagaaattcagttggttccaggcaccaagcactgaactaagtgctttattaacatgatctaatccattccccgggggctgctggagatgttggctgactgtgtttaccctccagatctctcatcctaggttttcatactctgcacaccatcctcggggtccagtgtctccctttgcataacctgctgcattgcattgacagtggagtgttgcttctcactgaaacagctgtcataaggctcatgaaagatctggataatacagagaaaaatgaaaaactgaaattcagtatcattgtgcggcttcctccgcttattgggcagaagatttgtagactttgggatcatcctatgagttctaacatcatttcgcggaaccacgtgacgcgactgcttcagaactataagaaacaggtgagtttctctgaaagcacagccaactaaatgtttttaggatcctgtttgcccgtgacaacatatctgtatggacagcaattacagttcttatcactttattttaaaattgtgcttattgtggagaatcagcttacaccagaagtggtttcccttttagcctcggaattctatgattaacaagtcatcgttcagtgtagaatttctgcctctgaactacttcattgaaattctgacagatatagagtcctccaatcaaggtaatttactcccctgttctcagggtcttaccacttttcccttgacacatcagtccttccctattcacttctttgtcttctttccaaaatccttttaacatacaagtagacccttatagcaattggtttacattagcagtaccaaatttactacctagagtaaattaccaaataatcacctctgaagttttaaaagagtcaagaggtttaaagcccatttggttgatgcaaatgttcttggtgctgaagtttaaatttaagaacacattcttaaaaaattcattttactaaaatacaattatgattttaatgagctgtgagcacaaagttataaatgtttcacggacccatggtaaccctttttccctgccctctccccatttttttccagccctgtatccttttgaaggacatgacaatgtggatgcagaatttgtagaggaagcagctctgaaacacaccgcgatgcttttaggcttatgaaaaagaaaacgcaattggatctgctgctgccattttaatcttgctcattaaccttactcctttgagaattctttaacaatatttaaaattggtaacaaaaatagtttagccataattgtttagccatgtgagtttcaggttggtacacgttcagacagaactgctgtatcacattccaattttgaatagccagtgagcaatcaagtgtagagaaatgataaatggcctaagaaggcatacagtggcataaacgatgctcttcctagtagcttaataggccacaagctagtttctgttgcactctgaaataaaatatgctttaaaaatgtagggaacagtgcttagaaaagcaaaaactaggtgtgtcattgaaataataggcataaaaattaaatgttacataagaacactatttggaaagagggtccttttaaaaactgaatttgtactaaatcagatttgccatgtccagtacagaataatttgtacttagtatttgcagcagggtttgtctttgtgaattcagatgaaacatatttatttttttttatttataaaaggttgatttaggaatattttgtcagtcattaaaaaacctgaaaacat

SEQ ID NO: 9102 - DNA, 825 bp, Homo sapiens
  source 1..825: mol_type = unassigned DNA
cttctgtactcttttgctatcttactgtagaatcacaaacatatcaaaccgtaaaaccattgagcaggcccttgctctgtttctgtgcaggaagagacccaaggagcaaggaatgtatacttaccggaaacttactatagacccagcgtgatatttagttacgaataatacagagaaggaaacttggaccttgttttcaagaaattcagttggttccaggcaccaagcactgaactaagtgctttattaacatgatctaatccattccccgggggctgctggagatgttggctgactgtgtttaccctccagatctctcatcctaggttttcatactctgcacaccatcctcggggtccagtgtctccctttgcataacctgctgcattgcattgacagtggagtgttgcttctcactgaaacagctgtcataaggctcatgaaagatctggataatacagagaaaaatgaaaaactgaaattcagtatcattgtgcggcttcctccgcttattgggcagaagatttgtagactttgggatcatcctatgagttctaacatcatttcgcggaaccacgtgacgcgactgcttcagaactataagaaacagcctcggaattctatgattaacaagtcatcgttcagtgtagaatttctgcctctgaactacttcattgaaattctgacagatatagagtcctccaatcaagccctgtatccttttgaaggacatgacaatgtggatgcagaatttgtagaggaagcagctctgaaacacaccgcgatgcttttaggcttatgaaaaagaaaacgcaattggatctg

SEQ ID NO: 9103 - DNA, 866 bp, Homo sapiens
  source 1..866: mol_type = unassigned DNA
attccatcaaacgtctgcaggatttgtcttgtctttttttttttttttttttcttcttaaatacaaagaagacccaaagggtggataagtgtacgttcattataaataaatggaaagggaaagaaaagatgagtgaggtgctcagctttaagggctactgggaaaaactgaactccaacctagaatatgttaagtacgccaagccacacttccactataacaacagtgtggtcaggagagagtggcacaacctgatctctgaagaggtatgagtgggtcagtgagaacaaagccagcagcgaggcatagtggactggatccagggccaagattaacacccctcctgcaggaggaagacagccaccagcggctgctcatggggctgatggtgtctgagctaaaagaccattttttgagacacctacagggtgtagaaaagaagaaaattgaacagatggttctggactacatttcaaaactgctggatctcatttgccacatcgtagaaaccaattggaggaaacataatcttcattcctgggttctccacttcaatagtcgtggcagtgctgctgaatttgcagtttttcacatcatgaccaggattctggaagctacaaacagtttgtttttacctctgcctcctggttttcatactctgcacaccatcctcggggtccagtgtctccctttgcataacctgctgcattgcattgacagtggagtgttgcttctcactgaaacagctgtcataaggctcatgaaagatctggataatacagagaaaaatgaaaaactgaaattcagtatcattgtgcggcttcctccgcttattgggcagaagatttgtagactttgggatcatc

SEQ ID NO: 9104 - DNA, 564 bp, Homo sapiens
  source 1..564: mol_type = unassigned DNA
gtgctcagctttaagggctactgggaaaaactgaactccaacctagaatatgttaagtacgccaagccacacttccactataacaacagtgtggtcaggagagagtggcacaacctgatctctgaagagaaaacaggaaaaagaaggtctgcggcatacgtgaggaatattcttgataatgcagtaaaggtgatttctaacctagaagcaagaaatttggggccaagattaacacccctcctgcaggaggaagacagccaccagcggctgctcatggggctgctggatctcatttgccacatcgtagaaaccaattggaggaaacataatcttcattcctgggttctccacttcaatagtcgtggcagtgctgctgaatttgcagtttttcacatcatgaccaggattctggaagctacaaacagtttgtttttacctctgcctcctggttttcatactctgcacaccatcctcggggtccagtgtctccctttgcataacctgctgcattgcattgacagtggagtgttgcttctcactgaaacagctgtcataaggctcatg

SEQ ID NO: 9105 - DNA, 543 bp, Homo sapiens
  source 1..543: mol_type = unassigned DNA
accttttaatatcttgctgttagagtggccgcacggctcttcccatgtctgtctaggcaccaggacctccggggacagctgctgaatgtgcttttgcgatgggagtccctgggtgatggccttgcggttctccttatttcctgtcatacagagctgccctctggctgtgcccacaggatgcattttggcatttcccttggcttggtgctgcttgctttctagctgtctgatcctaccgggtcttgccttgtttgtgcctctcatttgggttaaaaattgggcacacaggtcctagaggcataaagatgaggagcttccagggccaagattaacacccctcctgcaggaggaagacagccaccagcggctgctcatggggctgatggtgtctgagctaaaagaccattttttgagacacctacagggtgtagaaaagaagaaaattgaacagatggttctggactacatttcaaaactgctggatctcatttgccacatcgtagaaaccaattggaggaaacataatcttcattcctgggttct

SEQ ID NO: 9106 - DNA, 562 bp, Homo sapiens
  source 1..562: mol_type = unassigned DNA
tctcaagggaggaaatgactcagtgtgtttaatacaggtttccctgctaagcctcaatctggggaagtcctgttggttttgggaagtgagcagcagttctctatgtggtttaaaaaaacaacgacaaaaaaaaaaaaaaaaaaaagagacagaaaatgaagtgggtaaagaagattctttaagtctattttagaatccctattgggtctagaatgccatcttctgtacaaagtattcactcagaaatgtggaccctgagagctcgggaaataaggcttgtgtaatactcactgggtggtttgggccactgggcctgcctctgaaggccactgatgtttttgtctcctacaggtgctcagctttaagggctactgggaaaaactgaactccaacctagaatatgttaagtacgccaagccacacttccactataacaacagtgtggtcaggagagagtggcacaacctgatctctgaagagaaaacaggaaaaagaaggtctgcggcatacgtgaggaatattcttgataatgcagtaaaggtgatttctaacctagaagcaa

SEQ ID NO: 9107 - DNA, 2277 bp, Homo sapiens
  source 1..2277: mol_type = unassigned DNA
atgttttagaaaacgattatgagagcttacatgtattaaatgttgaaagaaatggaaatattatttatacctataaggatgataagggaaatgtcgtctttggattatatgattgtcaaaccagacaaaatgagcttctatatacctttgagaaagacttgcaagttttcagttgctctgtcaacagtgaaaggactttgcttgctgcaagtttagttcagtctactaaagaaggaaaaaggaacgaacttcaaccaggatcaaagtgcttgactttgttggttgaaatccaccctgttaacaatgtgaaggttctaaaggctgtggatagctatatttgggttcagtttctctacccacatattgaaagtcatcctcttccagagaaccatctgttactgatttcagaagagaaatatattgaacaatttcgtatccatgtcgcccaagaagatggaaatagagtggtgattaaaaattctggccatctcccaagagacagaatagctgaggatttcgtttgggctcagtgggatatgtcagaacagagattatattacattgacctgaagaaatcaaggagtatcttaaaatgtatccagttttatgctgatgagagctataacttaatgtttgaagtacccttggacatatcattaagcaactcaggatttaaacttgtcaactttggatgtgattatcatcaataccgagataaattttccaaacacctgactctgtgtgtttttaccaaccatacaggaagtttgtgtgtatgttacagcccgaagtgtgcctcttggggacaaatcacatattcagtgttttacattcataaaggacacagcaagaccttcaccacttctcttgagaatgttgggtcacacatgacaaagggcattacttttctcaaccttgactattatgtggctgtttacttacctggtcatttcttccacctacttaatgttcaacatccagacctgatctgccacaatctctttctgacaggaaataatgaaatgattgatatgctacctcattgccctttacagtcattgtcagggtccctggtattggattgttgttctggaaagctctatagagcactgctcagccagtcgtctttattacagcttctgcagaacacttgcttagactgtgagaagatggctgcgttgcactgcgcgctctactgcggtcaaggtgcgcagttcctggaagcccagattattcagtggatttctgagaatgtctctgcctgccattcatttgacctcattcaggaatttataattgcttcttcatactggagtgtatattcagagacaagtaacatggacaaactattgccacattcctcagtgctcacttggaatacagaaattcctggaataactcttgtgacagaagacattgcattgcctcttatgaaggtgctcagctttaagggctactgggaaaaactgaactccaacctagaatatgttaagtacgccaagccacacttccactataacaacagtgtggtcaggagagagtggcacaacctgatctctgaagaggtatgagtgggtcagtgagaacaaagccagcagcgaggcatagtggactggatccaggtgatgcctttaaatcataaggctggcttccatgtgcagcactcttcccaattgccagggacttgatcattgtcattactgatctcaatgggcagagatgcttctatgatctctgttctcctagggaggaaactgaaaagcagaaagtttaaggggacacacagcacattcatagtagaagtatgattaatatccatgtctcagatgtgttctcaggttacttatgtagttaaaaattgatattaaaaaatctaggtgttcccaacttagtggtcattaggggttggggtagttggagggagaatagtggacgtgactcactgtccaggggtgacccagggaaatctttgggggtgatcgaagacttctatgtgttgattgtggtggtacattgtgggacatgaatctaaacatgataaaatgacatagaatgacacacacacattgtgccaatgtcaatttttgattttgatattgtgctctagttaggtaagatataagcactgaggagactgggtggagggtacattgcatctctctctagtatcgctgcatgtagattagtgttgttgtgtgtagtatatagttgactcgcagtttcctgtgaatctgtaattgtttcagaataaaatatttcttaaaactttaaaaaaaa

SEQ ID NO: 9108 - DNA, 372 bp, Homo sapiens
  source 1..372: mol_type = unassigned DNA
gactgtgagaagatggctgcgttgcactgcgcgctctactgcggtcaaggtgcgcagttcctggaagcccagtggaggcagagagcagatttaaataccaacagagttctgtctgactttttaaagattattcagtggatttctgagaatgtctctgcctgccattcatttgacctcattcaggaatttataattgcttcttcatactggagtgtatattcagagacaagtaacatggacaaactattgccacattcctcagtgctcacttggaatacaattgtgcagggtggagcagctattgtggacacgcacagggtgacatcaggaagtccaagaagagcgatataaagaaacctgtggttataacct

SEQ ID NO: 9109 - DNA, 600 bp, Homo sapiens
  source 1..600: mol_type = unassigned DNA
gcatcccacctcccggggggttcatcggcagcgcaggggctttgccaagacaggagtgctcctggaagcttcacgttttgagaaagaatccgtgaccaccaagcaaaccaccctatacctaacggtggaacagtttgtccccacatttgcgagacgtgtttatgtgtctgttgaaccgtgtccgtggctcaggggacatgggcctcggcggtgaggcgcaagagggcaggggccgcctccaggctgcgcgcggcggggcgagagcccccagccgcccccgagctccgcacctgtgcaggctggggctgcgcgcgagatgctcggctcccggccctgccactccgggctttttgatgatttgatgttttagaaaacgattatgagagcttacatgtattaaatgttgaaagaaatggaaatattatttatacctataaggatgataagggaaatgtcgtctttggattatatgattgtcaaaccagacaaaatgagcttctatatacctttgagaaagacttgcaagttttcagttgctctgtcaacagtgaaaggactttgcttgctgcaagtttagttcagtctactaaagaaggaaaa

SEQ ID NO: 9110 - DNA, 737 bp, Homo sapiens
  source 1..737: mol_type = unassigned DNA
aggaagacagccaccagcggctgctcatggggctgatggtgtctgagctaaaagaccattttttgagacacctacagggtgtagaaaagaagaaaattgaacagatggttctggactacatttcaaaactgcaatagtcgtggcagtgctgctgaatttgcagtttttcacatcatgaccaggattctggaagctacaaacagtttgtttttacctctgcctcctggttttcatactctgcacaccatcctcggggtccagtgtctccctttgcataacctgctgcattgcattgacagtggagtgttgcttctcactgaaacagctgtcataaggctcatgaaagatctggataatacagagaaaaatgaaaaactgaaattcagtatcattgtgcggcttcctccgcttattgggcagaagatttgtagactttgggatcatcctatgagttctaacatcatttcgcggaaccacgtgacgcgactgcttcagaactataagaaacagcctcggaattctatgattaacaagtcatcgttcagtgtagaatttctgcctctgaactacttcattgaaattctgacagatatagagtcctccaatcaagccctgtatccttttgaaggacatgacaatgtggatgcagaatttgtagaggaagcagctctgaaacacaccgcgatgcttttaggcttatgaaaaagaaaacgcaattggatctgctgctgccattt

SEQ ID NO: 9111 - DNA, 3341 bp, Homo sapiens
  source 1..3341: mol_type = unassigned DNA
gctggagtgcaatggcacgatatcagctcactgaagcctccacctcctgggctcaagcactcctcccacctcagccccccaggtagctgagactacaggaatggataaagcacggagaggaaccaagaatgtgctcagaaaaaaatccttcctcactgaaaccaggactaaggaaaggagattcccttctaccatccatggactcaggctgacggagcacgctgcctgtctgtgtctctccgtttctctctctggaacgttgtcagatgtcacggcggagggaaaagagacctggaatgacttgccgaatttttagcccataaccaggcactgtgtaaaccgctttacctcattcagtctttgcaattataccacaaggtcacactgtttagaaggagaaagaagagctcgctgtgaaaaacgctccacaatgctgcagagccttgtgaaggtggaagagtactctcatcagcaaacggcattccttccatggaaaatgtcattgggaggaaagcaggttcaagtgattctcctgcctcagcctcctgagtagctgggattacagggacaaactacaaggcattcgatgctcaacaaatacttgtgctgataacttctctttctgaagccagctccaggagaggtctgtaatcagaagagcccctgaaccctgaagcctcctgggctgcccagcccaggcatctcctctcctcactctgggaaggaggtggtcttctggcaaaagaagatatcaaagttcttccatcagaggagatccttatcagcaagacattcactctgaggtagtgctcatagctctctttgtccagtgcttcggccttggtcccagcgccttcccacggagcagcactcttcaccctgcacagccttgttagcccaacagcatggtggtggaacaccccgagttcctcaaggcagggaaggagcctggcctgcagatctggcgtgtggagaagttcgatctggtgcccgtgcccaccaacctttatggagacttcttcacgggcgacgcctacgtcatcctgaagacagtgcagctgaggaacggaaatctgcagtatgacctccactactggctgggcaatgagtgcagccaggatgagagcggggcggccgccatctttaccgtgcagctggatgactacctgaacggccgggccgtgcagcaccgtgaggtccagggcttcgagtcggccaccttcctaggctacttcaagtctggcctgaagtacaagaaaggaggtgtggcatcaggattcaagcacgtggtacccaacgaggtggtggtgcagagactcttccaggtcaaagggcggcgtgtggtccgtgccaccgaggtacctgtgtcctgggagagcttcaacaatggcgactgcttcatcctggacctgggcaacaacatccaccagtggtgtggttccaacagcaatcggtatgaaagactgaaggccacacaggtgtccaagggcatccgggacaacgagcggagtggccgggcccgagtgcacgtgtctgaggagggcactgagcccgaggcgatgctccaggtgctgggccccaagccggctctgcctgcaggtaccgaggacaccgccaaggaggatgcggccaaccgcaagctggccaagctctacaaggtctccaatggtgcagggaccatgtccgtctccctcgtggctgatgagaaccccttcgcccagggggccctgaagtcagaggactgcttcatcctggaccacggcaaagatgggaaaatctttgtctggaaaggcaagcaggcaaacacggaggagaggaaggctgccctcaaaacagcctctgacttcatcaccaagatggactaccccaagcagactcaggtctcggtccttcctgagggcggtgagaccccactgttcaagcagttcttcaagaactggcgggacccagaccagacagatggcctgggcttgtcctacctttccagccatatcgccaacgtggagcgggtgcccttcgacgccgccaccctgcacacctccactgccatggccgcccagcacggcatggatgacgatggcacaggccagaaacagatctggagaatcgaaggttccaacaaggtgcccgtggaccctgccacatatggacagttctatggaggcgacagctacatcattctgtacaactaccgccatggtggccgccaggggcagataatctataactggcagggtgcccagtctacccaggatgaggtcgctgcatctgccatcctgactgctcagctggatgaggagctgggaggtacccctgtccagagccgtgtggtccaaggcaaggagcccgcccacctcatgagcctgtttggtgggaagcccatgatcatctacaagggcggcacctcccgcgagggcgggcagacagcccctgccagcacccgcctcttccaggtccgcgccaacagcgctggagccacccgggctgttgaggtattgcctaaggctggtgcactgaactccaacgatgcctttgttctgaaaaccccctcagccgcctacctgtgggtgggtacaggagccagcgaggcagagaagacgggggcccaggagctgctcagggtgctgcgggcccaacctgtgcaggtggcagaaggcagcgagccagatggcttctgggaggccctgggcgggaaggctgcctaccgcacatccccacggctgaaggacaagaagatggatgcccatcctcctcgcctctttgcctgctccaacaagattggacgttttgtgatcgaagaggttcctggtgagctcatgcaggaagacctggcaacggatgacgtcatgcttctggacacctgggaccaggtctttgtctgggttggaaaggattctcaagaagaagaaaagacagaagccttgacttctgctaagcggtacatcgagacggacccagccaatcgggatcggcggacgcccatcaccgtggtgaagcaaggctttgagcctccctcctttgtgggctggttccttggctgggatgatgattactggtctgtggaccccttggacagggccatggctgagctggctgcctgaggaggggcagggcccacccatgtcaccggtcagtgccttttggaactgtccttccctcaaagaggccttagagcgagcagagcagctctgctatgagtgtgtgtgtgtgtgtgtgttgtttcttttttttttttttacagtatccaaaaatagccctgcaaaaattcagagtccttgcaaaattgtctaaaatgtcagtgtttgggaaattaaatccaataaaaacattttgaagtgtgt

SEQ ID NO: 9112 - DNA, 1042 bp, Homo sapiens
  source 1..1042: mol_type = unassigned DNA
ctcccccacccgcctgcccggccgccccgccccgagggcggctcccgcccgcgccctgcccaccccggccgcgcgcaccacaacgcccccgccccgccgcccggaaccagctgagcgcagctggacccagcagccgctgtctccagtgccgcagcagcaggtagtgctcatagctctctttgtccagtgcttcggccttggtcccagcgccttcccacggagcagcactcttcaccctgcacagccttgttagcccaacagcatggtggtggaacaccccgagttcctcaaggcagggaaggagcctggcctgcagatctggcgtgtggagaagttcgatctggtgcccgtgcccaccaacctttatggagacttcttcacgggcgacgcctacgtcatcctgaagacagtgcagctgaggaacggaaatctgcagtatgacctccactactggctgggcaatgagtgcagccaggatgagagcggggcggccgccatctttaccgtgcagctggatgactacctgaacggccgggccgtgcagcaccgtgaggtccagggcttcgagtcggccaccttcctaggctacttcaagtctggcctgaagtacaagaaaggaggtgtggcatcaggattcaagcacgtggtacccaacgaggtggtggtgcagagactcttccaggtcaaagggcggcgtgtggtccgtgccaccgaggtacctgtgtcctgggagagcttcaacaatggcgactgcttcatcctggacctgggcaacaacatccaccagtggtgtggttccaacagcaatcggtatgaaagactgaaggccacacaggtgtccaagggcatccgggacaacgagcggagtggccgggcccgagtgcacgtgtctgaggagggcactgagcccgaggcgatgctccaggtgctgggccccaagccggctctgcctgcaggtaccgaggacaccgccaaggaggatgcggccaaccgcaagctggccaagctctacaaggtctccaatggtgcagggaccatgtcc

SEQ ID NO: 9113 - DNA, 2664 bp, Homo sapiens
  source 1..2664: mol_type = unassigned DNA
ctcccccacccgcctgcccggccgccccgccccgagggcggctcccgcccgcgccctgcccaccccggccgcgcgcaccacaacgcccccgccccgccgcccggaaccagctgagcgcagctggacccagcagccgctgtctccagtgccgcagcagcaggtagtgctcatagctctctttgtccagtgcttcggccttggtcccagcgccttcccacggagcagcactcttcaccctgcacagccttgttagttcttgcagatacagcgctaggaaaaggggagtaattcaggtctagaatggaaaaactgttttgttgctttcccaacagcatggtggtggaacaccccgagttcctcaaggcagggaaggagcctggcctgcagatctggcgtgtggagaagttcgatctggtgcccgtgcccaccaacctttatggagacttcttcacgggcgacgcctacgtcatcctgaagacagtgcagctgaggaacggaaatctgcagtatgacctccactactggctgggcaatgagtgcagccaggatgagagcggggcggccgccatctttaccgtgcagctggatgactacctgaacggccgggccgtgcagcaccgtgaggtccagggcttcgagtcggccaccttcctaggctacttcaagtctggcctgaagtacaagaaaggaggtgtggcatcaggattcaagcacgtggtacccaacgaggtggtggtgcagagactcttccaggtcaaagggcggcgtgtggtccgtgccaccgaggtacctgtgtcctgggagagcttcaacaatggcgactgcttcatcctggacctgggcaacaacatccaccagtggtgtggttccaacagcaatcggtatgaaagactgaaggccacacaggtgtccaagggcatccgggacaacgagcggagtggccgggcccgagtgcacgtgtctgaggagggcactgagcccgaggcgatgctccaggtgctgggccccaagccggctctgcctgcaggtaccgaggacaccgccaaggaggatgcggccaaccgcaagctggccaagctctacaaggtctccaatggtgcagggaccatgtccgtctccctcgtggctgatgagaaccccttcgcccagggggccctgaagtcagaggactgcttcatcctggaccacggcaaagatgggaaaatctttgtctggaaaggcaagcaggcaaacacggaggagaggaaggctgccctcaaaacagcctctgacttcatcaccaagatggactaccccaagcagactcaggtctcggtccttcctgagggcggtgagaccccactgttcaagcagttcttcaagaactggcgggacccagaccagacagatggcctgggcttgtcctacctttccagccatatcgccaacgtggagcgggtgcccttcgacgccgccaccctgcacacctccactgccatggccgcccagcacggcatggatgacgatggcacaggccagaaacagatctggagaatcgaaggttccaacaaggtgcccgtggaccctgccacatatggacagttctatggaggcgacagctacatcattctgtacaactaccgccatggtggccgccaggggcagataatctataactggcagggtgcccagtctacccaggatgaggtcgctgcatctgccatcctgactgctcagctggatgaggagctgggaggtacccctgtccagagccgtgtggtccaaggcaaggagcccgcccacctcatgagcctgtttggtgggaagcccatgatcatctacaagggcggcacctcccgcgagggcgggcagacagcccctgccagcacccgcctcttccaggtccgcgccaacagcgctggagccacccgggctgttgaggtattgcctaaggctggtgcactgaactccaacgatgcctttgttctgaaaaccccctcagccgcctacctgtgggtgggtacaggagccagcgaggcagagaagacgggggcccaggagctgctcagggtgctgcgggcccaacctgtgcaggtggcagaaggcagcgagccagatggcttctgggaggccctgggcgggaaggctgcctaccgcacatccccacggctgaaggacaagaagatggatgcccatcctcctcgcctctttgcctgctccaacaagattggacgttttgtgatcgaagaggttcctggtgagctcatgcaggaagacctggcaacggatgacgtcatgcttctggacacctgggaccaggtctttgtctgggttggaaaggattctcaagaagaagaaaagacagaagccttgacttctgctaagcggtacatcgagacggacccagccaatcgggatcggcggacgcccatcaccgtggtgaagcaaggctttgagcctccctcctttgtgggctggttccttggctgggatgatgattactggtctgtggaccccttggacagggccatggctgagctggctgcctgaggaggggcagggcccacccatgtcaccggtcagtgccttttggaactgtccttccctcaaagaggccttagagcgagcagagcagctctgctatgagtgtgtgtgtgtgtgtgtgttgtttcttttttttttttt

SEQ ID NO: 9114 - DNA, 716 bp, Homo sapiens
  source 1..716: mol_type = unassigned DNA
gaaccagctgagcgcagctggacccagcagccgctgtctccagtgccgcagcagcagcccaacagcatggtggtggaacaccccgagttcctcaaggcagggaaggagcctggcctgcagatctggcgtgtggagaagttcgatctggtgcccgtgcccaccaacctttatggagacttcttcacgggcgacgcctacgtcatcctgaagacagtgcagctgaggaacggaaatctgcagtatgacctccactactggctgggcaatgagtgcagccaggatgagagcggggcggccgccatctttaccgtgcagctggatgactacctgaacggccgggccgtgcagcaccgtgaggtccagggcttcgagtcggccaccttcctaggctacttcaagtctggcctgaagtacaagaaaggaggtgtggcatcaggattcaagcacgtggtacccaacgaggtggtggtgcagagactcttccaggtcaaagggcggcgtgtggtccgtgccaccgaggtacctgtgtcctgggagagcttcaacaatggcgactgcttcatcctggacctgggcaacaacatccaccagtggtgtggttccaacagcaatcggtatgaaagactgaaggccacacaggtgtccaagggcatccgggacaacgagcggagtggccgggcccgagtgcacgtgtctgaggagggcactgagcccga

SEQ ID NO: 9115 - DNA, 2702 bp, Homo sapiens
  source 1..2702: mol_type = unassigned DNA
agctgagcgcagctggacccagcagccgctgtctccagtgccgcagcagcaggtagtgctcatagctctctttgtccagtgcttcggccttggtcccagcgccttcccacggagcagcactcttcaccctgcacagccttgttaggagaaggggatgaatgaatacaggacttacgcgtctgctgtggcccagctggcttccagatggtgacatgagccacccacagccggagctgttcctctttcccaaagctcagcccaacagcatggtggtggaacaccccgagttcctcaaggcagggaaggagcctggcctgcagatctggcgtgtggagaagttcgatctggtgcccgtgcccaccaacctttatggagacttcttcacgggcgacgcctacgtcatcctgaagacagtgcagctgaggaacggaaatctgcagtatgacctccactactggctgggcaatgagtgcagccaggatgagagcggggcggccgccatctttaccgtgcagctggatgactacctgaacggccgggccgtgcagcaccgtgaggtccagggcttcgagtcggccaccttcctaggctacttcaagtctggcctgaagtacaagaaaggaggtgtggcatcaggattcaagcacgtggtacccaacgaggtggtggtgcagagactcttccaggtcaaagggcggcgtgtggtccgtgccaccgaggtacctgtgtcctgggagagcttcaacaatggcgactgcttcatcctggacctgggcaacaacatccaccagtggtgtggttccaacagcaatcggtatgaaagactgaaggccacacaggtgtccaagggcatccgggacaacgagcggagtggccgggcccgagtgcacgtgtctgaggagggcactgagcccgaggcgatgctccaggtgctgggccccaagccggctctgcctgcaggtaccgaggacaccgccaaggaggatgcggccaaccgcaagctggccaagctctacaaggtctccaatggtgcagggaccatgtccgtctccctcgtggctgatgagaaccccttcgcccagggggccctgaagtcagaggactgcttcatcctggaccacggcaaagatgggaaaatctttgtctggaaaggcaagcaggcaaacacggaggagaggaaggctgccctcaaaacagcctctgacttcatcaccaagatggactaccccaagcagactcaggtctcggtccttcctgagggcggtgagaccccactgttcaagcagttcttcaagaactggcgggacccagaccagacagatggcctgggcttgtcctacctttccagccatatcgccaacgtggagcgggtgcccttcgacgccgccaccctgcacacctccactgccatggccgcccagcacggcatggatgacgatggcacaggccagaaacagatctggagaatcgaaggttccaacaaggtgcccgtggaccctgccacatatggacagttctatggaggcgacagctacatcattctgtacaactaccgccatggtggccgccaggggcagataatctataactggcagggtgcccagtctacccaggatgaggtcgctgcatctgccatcctgactgctcagctggatgaggagctgggaggtacccctgtccagagccgtgtggtccaaggcaaggagcccgcccacctcatgagcctgtttggtgggaagcccatgatcatctacaagggcggcacctcccgcgagggcgggcagacagcccctgccagcacccgcctcttccaggtccgcgccaacagcgctggagccacccgggctgttgaggtattgcctaaggctggtgcactgaactccaacgatgcctttgttctgaaaaccccctcagccgcctacctgtgggtgggtacaggagccagcgaggcagagaagacgggggcccaggagctgctcagggtgctgcgggcccaacctgtgcaggtggcagaaggcagcgagccagatggcttctgggaggccctgggcgggaaggctgcctaccgcacatccccacggctgaaggacaagaagatggatgcccatcctcctcgcctctttgcctgctccaacaagattggacgttttgtgatcgaagaggttcctggtgagctcatgcaggaagacctggcaacggatgacgtcatgcttctggacacctgggaccaggtctttgtctgggttggaaaggattctcaagaagaagaaaagacagaagccttgacttctgctaagcggtacatcgagacggacccagccaatcgggatcggcggacgcccatcaccgtggtgaagcaaggctttgagcctccctcctttgtgggctggttccttggctgggatgatgattactggtctgtggaccccttggacagggccatggctgagctggctgcctgaggaggggcagggcccacccatgtcaccggtcagtgccttttggaactgtccttccctcaaagaggccttagagcgagcagagcagctctgctatgagtgtgtgtgtgtgtgtgtgttgtttcttttttttttttttacagtatccaaaaatagccctgcaaaaattcagagtccttgcaaaattgtctaaaatgtcagtgtttgggaaattaaatccaataaaaacattttgaagtgtgt

SEQ ID NO: 9116 - DNA, 802 bp, Homo sapiens
  source 1..802: mol_type = unassigned DNA
agtgctcatagctctctttgtccagtgcttcggccttggtcccagcgccttcccacggagcagcactcttcaccctgcacagccttgttaggagaaggggatgaatgaatacaggacttacgcgtctgctgtggcccagctggcttccagatggtgacatgagccacccacagccggagctgttcctctttcccaaagctcagacggagtcttgctgtggtgcccaggctggagtgcagtggcacgatctcagctcactgcaacctcctcctcccaggacttttgggtcctttccagttttcttcaaacaatgcttcagtgaacatccttgcacatatatttttgtgtttgttgttcttgcagatacagcgctaggaaaaggggagtaattcaggtctagaatggaaaaactgttttgttgctttcccaacagcatggtggtggaacaccccgagttcctcaaggcagggaaggagcctggcctgcagatctggcgtgtggagaagttcgatctggtgcccgtgcccaccaacctttatggagacttcttcacgggcgacgcctacgtcatcctgaagacagtgcagctgaggaacggaaatctgcagtatgaccagacagatggcctgggcttgtcctacctttccagccatatcgccaacgtggagcgggtgcccttcgacgccgccaccctgcacacctccactgccatggccgcccagcacggcatggatgacgatggcacaggccagaaacagatctggagaatcgaaggttccaacaaggtgcccgtggaccctgc

SEQ ID NO: 9117 - DNA, 806 bp, Homo sapiens
  source 1..806: mol_type = unassigned DNA
atagctccccccagcctcgcgatggccgaggaagaagccctcaggggcaattctgacccatggttcttgcagatacagcgctaggaaaaggggagtaattcaggtctagaatggaaaaactgttttgttgctttcccaacagcatggtggtggaacaccccgagttcctcaaggcagggaaggagcctggcctgcagatctggcgtgtggagaagttcgatctggtgcccgtgcccaccaacctttatggagacttcttcacgggcgacgcctacgtcatcctgaagacagtgcagctgaggaacggaaatctgcagtatgacctccactactggctgggcaatgagtgcagccaggatgagagcggggcggccgccatctttaccgtgcagctggatgactacctgaacggccgggccgtgcagcaccgtgaggtccagggcttcgagtcggccaccttcctaggctacttcaagtctggcctgaagtacaagaaaggaggtgtggcatcaggattcaagcacgtggtacccaacgaggtggtggtgcagagactcttccaggtcaaagggcggcgtgtggtccgtgccaccgaggtacctgtgtcctgggagagcttcaacaatggcgactgcttcatcctggacctgggcaacaacatccaccagtggtgtggttccaacagcaatcggtatgaaagactgaaggccacacaggtgtccaagggcatccgggacaacgagcggagtggccgggcccgagtgcacgtgtctgaggagggcactgagcccgaggcgatgctccag

SEQ ID NO: 9118 - DNA, 2311 bp, Homo sapiens
  source 1..2311: mol_type = unassigned DNA
atagctccccccagcctcgcgatggccgaggaagaagccctcaggggcaattctgacccatggcccaacagcatggtggtggaacaccccgagttcctcaaggcagggaaggagcctggcctgcagatctggcgtgtggagaagttcgatctggtgcccgtgcccaccaacctttatggagacttcttcacgggcgacgcctacgtcatcctgaagacagtgcagctgaggaacggaaatctgcagtatgacctccactactggctgggcaatgagtgcagccaggatgagagcggggcggccgccatctttaccgtgcagctggatgactacctgaacggccgggccgtgcagcaccgtgaggtccagggcttcgagtcggccaccttcctaggctacttcaagtctggcctgaagtacaagaaaggaggtgtggcatcaggattcaagcacgtggtacccaacgaggtggtggtgcagagactcttccaggtcaaagggcggcgtgtggtccgtgccaccgaggtacctgtgtcctgggagagcttcaacaatggcgactgcttcatcctggacctgggcaacaacatccaccagtggtgtggttccaacagcaatcggtatgaaagactgaaggccacacaggtgtccaagggcatccgggacaacgagcggagtggccgggcccgagtgcacgtgtctgaggagggcactgagcccgaggcgatgctccaggtgctgggccccaagccggctctgcctgcaggtaccgaggacaccgccaaggaggatgcggccaaccgcaagctggccaagctctacaaggtctccaatggtgcagggaccatgtccgtctccctcgtggctgatgagaaccccttcgcccagggggccctgaagtcagaggactgcttcatcctggaccacggcaaagatgggaaaatctttgtctggaaaggcaagcaggcaaacacggaggagaggaaggctgccctcaaaacagcctctgacttcatcaccaagatggactaccccaagcagactcaggtctcggtccttcctgagggcggtgagaccccactgttcaagcagttcttcaagaactggcgggacccagaccagacagatggcctgggcttgtcctacctttccagccatatcgccaacgtggagcgggtgcccttcgacgccgccaccctgcacacctccactgccatggccgcccagcacggcatggatgacgatggcacaggccagaaacagatctggagaatcgaaggttccaacaaggtgcccgtggaccctgccacatatggacagttctatggaggcgacagctacatcattctgtacaactaccgccatggtggccgccaggggcagataatctataactggcagggtgcccagtctacccaggatgaggtcgctgcatctgccatcctgactgctcagctggatgaggagctgggaggtacccctgtccagagccgtgtggtccaaggcaaggagcccgcccacctcatgagcctgtttggtgggaagcccatgatcatctacaagggcggcacctcccgcgagggcgggcagacagcccctgccagcacccgcctcttccaggtccgcgccaacagcgctggagccacccgggctgttgaggtattgcctaaggctggtgcactgaactccaacgatgcctttgttctgaaaaccccctcagccgcctacctgtgggtgggtacaggagccagcgaggcagagaagacgggggcccaggagctgctcagggtgctgcgggcccaacctgtgcaggtggcagaaggcagcgagccagatggcttctgggaggccctgggcgggaaggctgcctaccgcacatccccacggctgaaggacaagaagatggatgcccatcctcctcgcctctttgcctgctccaacaagattggacgttttgtgatcgaagaggttcctggtgagctcatgcaggaagacctggcaacggatgacgtcatgcttctggacacctgggaccaggtctttgtctgggttggaaaggattctcaagaagaagaaaagacagaagccttgacttctgctaagcggtacatcgagacggacccagccaatcgggatcggcggacgcccatcaccgtggtgaagcaaggctttgagcctccctcctttgtgggctggttccttggctgggatgatgattactggtctgtggaccccttggacagggccatggctgagctggctgcctgaggaggggcagggcccacccatgtcaccggtcagtgccttttgg

SEQ ID NO: 9119 - DNA, 2428 bp, Homo sapiens
  source 1..2428: mol_type = unassigned DNA
gtgctcccagggcccacaactgcttgaatgactattggtgttcctgtttgtgtgccctctgggccgggaagtcagagaaagaaaggagacaatttgtgattgaacagccactgtggccatcattctccttacctgtctgatgagagctgatcttcatgccactgtgtacacccaacagcatggtggtggaacaccccgagttcctcaaggcagggaaggagcctggcctgcagatctggcgtgtggagaagttcgatctggtgcccgtgcccaccaacctttatggagacttcttcacgggcgacgcctacgtcatcctgaagacagtgcagctgaggaacggaaatctgcagtatgacctccactactggctgggcaatgagtgcagccaggatgagagcggggcggccgccatctttaccgtgcagctggatgactacctgaacggccgggccgtgcagcaccgtgaggtccagggcttcgagtcggccaccttcctaggctacttcaagtctggcctgaagtacaagaaaggaggtgtggcatcaggattcaagcacgtggtacccaacgaggtggtggtgcagagactcttccaggtcaaagggcggcgtgtggtccgtgccaccgaggtacctgtgtcctgggagagcttcaacaatggcgactgcttcatcctggacctgggcaacaacatccaccagtggtgtggttccaacagcaatcggtatgaaagactgaaggccacacaggtgtccaagggcatccgggacaacgagcggagtggccgggcccgagtgcacgtgtctgaggagggcactgagcccgaggcgatgctccaggtgctgggccccaagccggctctgcctgcaggtaccgaggacaccgccaaggaggatgcggccaaccgcaagctggccaagctctacaaggtctccaatggtgcagggaccatgtccgtctccctcgtggctgatgagaaccccttcgcccagggggccctgaagtcagaggactgcttcatcctggaccacggcaaagatgggaaaatctttgtctggaaaggcaagcaggcaaacacggaggagaggaaggctgccctcaaaacagcctctgacttcatcaccaagatggactaccccaagcagactcaggtctcggtccttcctgagggcggtgagaccccactgttcaagcagttcttcaagaactggcgggacccagaccagacagatggcctgggcttgtcctacctttccagccatatcgccaacgtggagcgggtgcccttcgacgccgccaccctgcacacctccactgccatggccgcccagcacggcatggatgacgatggcacaggccagaaacagatctggagaatcgaaggttccaacaaggtgcccgtggaccctgccacatatggacagttctatggaggcgacagctacatcattctgtacaactaccgccatggtggccgccaggggcagataatctataactggcagggtgcccagtctacccaggatgaggtcgctgcatctgccatcctgactgctcagctggatgaggagctgggaggtacccctgtccagagccgtgtggtccaaggcaaggagcccgcccacctcatgagcctgtttggtgggaagcccatgatcatctacaagggcggcacctcccgcgagggcgggcagacagcccctgccagcacccgcctcttccaggtccgcgccaacagcgctggagccacccgggctgttgaggtattgcctaaggctggtgcactgaactccaacgatgcctttgttctgaaaaccccctcagccgcctacctgtgggtgggtacaggagccagcgaggcagagaagacgggggcccaggagctgctcagggtgctgcgggcccaacctgtgcaggtggcagaaggcagcgagccagatggcttctgggaggccctgggcgggaaggctgcctaccgcacatccccacggctgaaggacaagaagatggatgcccatcctcctcgcctctttgcctgctccaacaagattggacgttttgtgatcgaagaggttcctggtgagctcatgcaggaagacctggcaacggatgacgtcatgcttctggacacctgggaccaggtctttgtctgggttggaaaggattctcaagaagaagaaaagacagaagccttgacttctgctaagcggtacatcgagacggacccagccaatcgggatcggcggacgcccatcaccgtggtgaagcaaggctttgagcctccctcctttgtgggctggttccttggctgggatgatgattactggtctgtggaccccttggacagggccatggctgagctggctgcctgaggaggggcagggcccacccatgtcaccggtcagtgccttttggaactgtcctt

SEQ ID NO: 9120 - DNA, 2657 bp, Homo sapiens
  source 1..2657: mol_type = unassigned DNA
gggcggctacttaaggtcggcgacccgaggccgcggctgccgactgggtcccctgccgctgtcgccaccatggctccgcaccgccccgcgcccgcgctgctttgcgcgctgtccctggcgctgtgcgcgctgtcgctgcccgtccgcgcggccactgcgtcgcggggggcgtcccaggcgggggcgccccaggggcgggtgcccgaggcgcggcccaacagcatggtggtggaacaccccgagttcctcaaggcagggaaggagcctggcctgcagatctggcgtgtggagaagttcgatctggtgcccgtgcccaccaacctttatggagacttcttcacgggcgacgcctacgtcatcctgaagacagtgcagctgaggaacggaaatctgcagtatgacctccactactggctgggcaatgagtgcagccaggatgagagcggggcggccgccatctttaccgtgcagctggatgactacctgaacggccgggccgtgcagcaccgtgaggtccagggcttcgagtcggccaccttcctaggctacttcaagtctggcctgaagtacaagaaaggaggtgtggcatcaggattcaagcacgtggtacccaacgaggtggtggtgcagagactcttccaggtcaaagggcggcgtgtggtccgtgccaccgaggtacctgtgtcctgggagagcttcaacaatggcgactgcttcatcctggacctgggcaacaacatccaccagtggtgtggttccaacagcaatcggtatgaaagactgaaggccacacaggtgtccaagggcatccgggacaacgagcggagtggccgggcccgagtgcacgtgtctgaggagggcactgagcccgaggcgatgctccaggtgctgggccccaagccggctctgcctgcaggtaccgaggacaccgccaaggaggatgcggccaaccgcaagctggccaagctctacaaggtctccaatggtgcagggaccatgtccgtctccctcgtggctgatgagaaccccttcgcccagggggccctgaagtcagaggactgcttcatcctggaccacggcaaagatgggaaaatctttgtctggaaaggcaagcaggcaaacacggaggagaggaaggctgccctcaaaacagcctctgacttcatcaccaagatggactaccccaagcagactcaggtctcggtccttcctgagggcggtgagaccccactgttcaagcagttcttcaagaactggcgggacccagaccagacagatggcctgggcttgtcctacctttccagccatatcgccaacgtggagcgggtgcccttcgacgccgccaccctgcacacctccactgccatggccgcccagcacggcatggatgacgatggcacaggccagaaacagatctggagaatcgaaggttccaacaaggtgcccgtggaccctgccacatatggacagttctatggaggcgacagctacatcattctgtacaactaccgccatggtggccgccaggggcagataatctataactggcagggtgcccagtctacccaggatgaggtcgctgcatctgccatcctgactgctcagctggatgaggagctgggaggtacccctgtccagagccgtgtggtccaaggcaaggagcccgcccacctcatgagcctgtttggtgggaagcccatgatcatctacaagggcggcacctcccgcgagggcgggcagacagcccctgccagcacccgcctcttccaggtccgcgccaacagcgctggagccacccgggctgttgaggtattgcctaaggctggtgcactgaactccaacgatgcctttgttctgaaaaccccctcagccgcctacctgtgggtgggtacaggagccagcgaggcagagaagacgggggcccaggagctgctcagggtgctgcgggcccaacctgtgcaggtggcagaaggcagcgagccagatggcttctgggaggccctgggcgggaaggctgcctaccgcacatccccacggctgaaggacaagaagatggatgcccatcctcctcgcctctttgcctgctccaacaagattggacgttttgtgatcgaagaggttcctggtgagctcatgcaggaagacctggcaacggatgacgtcatgcttctggacacctgggaccaggtctttgtctgggttggaaaggattctcaagaagaagaaaagacagaagccttgacttctgctaagcggtacatcgagacggacccagccaatcgggatcggcggacgcccatcaccgtggtgaagcaaggctttgagcctccctcctttgtgggctggttccttggctgggatgatgattactggtctgtggaccccttggacagggccatggctgagctggctgcctgaggaggggcagggcccacccatgtcaccggtcagtgccttttggaactgtccttccctcaaagaggccttagagcgagcagagcagctctgctatgagtgtgtgtgtgtgtgtgtgttgtttcttttttttttttttacagtatccaaaaatagccctgcaaaaattcagagtccttgcaaaattgtctaaaatgtcagtgtttgggaaattaaatccaataaaaacattttgaagtgtg

SEQ ID NO: 9121 - DNA, 6454 bp, Homo sapiens
  source 1..6454: mol_type = unassigned DNA
gatctttgctctaagaaaacctgatattggctggcacagtggctcatgcctgtaattccagcactttgggaggccaaggcgggaggatcacatgaggccaggagttcgagaccagcctggccaacatggtgaaacttcatctctacaaaaaatacaaaaattagctgggcatggtggtgcacatctgtaatcacagctacttgggaggctaaagcacaagaatcgctggaacccaggaggtggaggctgcagtgaattgagattacaccactgcactccagcctgggcaacagagcgagaaaacctgatattgagagaagaatgtggatcttacagattcagacatgcctgggtttgaattctagctccaccaccttgggcaagtcccgtcacctgtgggccccattttgcacatcagtgcgatgcagcaatgacacctcccttgcaggcgatgcgtgaagaatgcccggcacagtgggcatcatcatttcacaaacacgtatactgctgacacaggaagacagagcaggagcccaatatacacggactccgtttgtcccttgccctcctcgagtctgtgcggctagaattagacttagcacagtgggctgaggggccctggatggggtggctgcattgctggcctgagtggaagccctctgcttccacccccatgtgtctccggagcagggagacgagcacccgattgggaggaggaaacaaggtttccagccttggcttggccacgcacttgctgagtgcccttgagtaagtcacttcacttctctgggcttcagtttaccgtgggtaaagtggggtgaagtagaaggacctttccaactctgatttgacaactctggggcatggagctggggactgctcacaggaaagcccagctgactttccttggcttgcttctgagtgagggcagttgtgactgcagcagggaagctctcctgaacgccttgctctgggatgcagtaatgattacagagggctggggagcaggagcttgtgtctccacttcagaaaggagaggcctgaggctcggaaagggcaagtgacttacccaaagccatccagcattgttgtggcggggcacctgtcccttacccatagctgctctgaagggactgctgggtgggagttgctgcggtaccgtaggggaaagcagaagggtggcatgggctggaacaatccagaaagacttcccagagagccttgaaggatgagaaagatttggattagtacctctcaaagtggcttttgcaaaatactcaagctggaggcaggatatggtgaagaaaagtggttcttgggctgggttcagtgactcactcctgtaatcccagcacccaaggatctcttgaggccaggagttcaagaccagcttaaacagcatagtgagaccccatgtctacaataaaataaaataaaataagtaagctgggcactgtggctcataactgtagtcttagccactcgagaggctgagatgggaggatcattcaagtccaggagtttgaggttacagtgagctgtgattgtaccaatgcactgcagcctgggacagagtgaaaccctgttgaaaggaaggaagagagagagagagcggaaggaaggagagagagagagaaagagagaaaggaaggaaggaaaggaaagagagagggaaagagaatgaaagaaagaaaaaaagaaaggaaagaaaaaagaaagagggaaagaaagaaaagcagttcttggttcaataagatagggaaatactgtataaaacaaaaggcaagcaggtgtattcaccataggatttgacagagcctttattatgcacatgcgcgttgtataacagtcagggagggtgagtgagaagcattccctatgcttatttgaccgtggaactctttccttgcagaatgtcttaggggactagtgtgcctttgggaaacgccggttttgaggaaggaattgttgcagtttttttgatttagaaagtggctacaggggtccttgttagtggagtatgggattcaaaggggtggcagaaagatgcagtgggcagggaatctctcacttcttagctgtgtggccttgggcaaattttattcctttcctaaacctcagtttcctactctgaaacagtctcaaacaagataatgggtatgaaagtcctgagttaactgagaatcactgtgttgctggaaagcccctggtccacaagccagaatttcctttacctcaattctgtccccttcttccatatctgcttccctgggccttctcccctgggctaatgctgtctctttggccccacagaaaggaggtgtggcatcaggattcaagcacgtggtacccaacgaggtggtggtgcagagactcttccaggtcaaagggcggcgtgtggtccgtgccaccgaggtacctgtgtcctgggagagcttcaacaatggcgactgcttcatcctggacctgggcaacgtgagtcctgctttcctctttcccaggagccactgaggtgctcctggtctgatcagggacttgggtacatccacgtgaacaaatgcatagatgcaggtgggcaaaccacagggaccagcattgttcacgtacagatatgtctgtatgcaaagactcccacaaatgtagactcacaccacgggtatagtgcgtacttggactttgattgacatatagacttcctggcaccttctgttcatatgtacgtcttgtgtcctttttcacatgcttataaatatataacagtcatgggcaaacactctgggcttttgcccaccaggtgtgcacatgtgcaccatcatgaatgcccacacatgtatactcgggtatgttgtttaaggtcccacatgtgtatgtcatacatgtagttgcacatgcccatgatctatggcaatgtgtgtgggatgcccttacccaggcccaccttatagatgtgtgacgctttgtacacacttgtctcacaaatccctggagcgcagacctgcaaatggacacggcccttctaccccaaagctcatatgcttatacacctgtgatataatgtccgtgcaaacatgagcacacactgatttagtgtaagctttttattaaagcgtcatgggcacacagaggagtgtgtgaatcctgagtgtacagcttgatggattacacagagcgaacacactcacgtaacactggatcatgaagcagaacctcaccagcccctagaaggccccttttgcccctttcggtgccctcaccccaagggcaaccatcatcctgaactttctcaacagcatagatgagttttgcctgtttctgaactttatagacacggaaccttgttcttttatctctgaccttttgctcaacattacatttctgagatgcatccgtattgttgcatttagttgtaggttgttcattttccttgctgtggaagattcagttgtgtgggtgtaccatgatttatgtatcctttatgttgttgatgggcacttgaggtggcttctggtttggggctattacagacagtgctactctgaacattcttgcacaagtcttttggtggacatacgaacgtacttctgtcaggtattttcctagaaggaggattgctgggtcataaggaaataggtatattcggctttagtggctatggccaaatggttttccaaaatggttgtgccaatttatattcccttcagcaggcaaacatttttgcacacattctagatgtagttgtacctgtgaaaaaattcctgtcctcagacatgcgctcccatctcctggtgtgtgcagatcacacttaattgtacgtaaataatgcacgtgtgcagactgtgccagccttcacctgggcaagtgcagaacagggtgagcctgcacaccacacgccacactccccaagccctgtcgctgggcggggcttataggaaggcggggcactgacttcctgggtctctgtcttccagaacatccaccagtggtgtggttccaacagcaatcggtatgaaagactgaaggccacacaggtgtccaagggcatccgggacaacgagcggagtggccgggcccgagtgcacgtgtctgaggagggcactgagcccgaggcgatgctccaggtgcctgtggggtgcgcaatggggtggccatggggacacgctgctcatgactttcttctgttcagtaggcaatttgaggtgaatttgaggaaaaaaaaaaacttccgctctaccccacctttttatttttaaaatacttttttattttaatttttgagacaggatcttattcattgttgcctgagctggagtgcaggggcgccatcacagctcactgcagccttgacctcctgggctcaagtgatcctcctgcctcagcctcccgagtagctgggaccacaggcgagtgctaccaagccaggctaacttttgaattttttgtaggaatgaggtcttgccatgtcgctcaggctggtctccaacttctggggtcaaaccatcacctgcctcaacctcccaaaatgctgggattacaagcatgagtcaccatgctggccctgcctcacttttgaggctgtttttccatcaaacctgatcactttagggagcaagggagatcagtttcttgcacaactccccgactaccctgagaggtgggactggaacccaaggctgtgctgtgagtgtgagccgcattctccagtggggagggccaggtcctctgcagagctaaggagggcagtctcttagcatccccagagggccagctttgtgctagaataaggtcagaaagagaccactgagccccaatcccctcttttctcttctgactatttctggtagtttttggcccatttagtcacatggtgggattgccagccattgtgcgttgaggacgtatcaatagaggcaagattcactaggaaaaggagaagaccatgagctctgctccatgtcacttggttcctgcttctctgggggcatccaattccagcttttggagagagcagaatggtgattattattatgggaagggacctggacaccaaccatggcttgggagggacagtgggagtgaaaataggctctgaagccacagggatggaggttcagattctggcttagccacctaatagctgtgtgagtaggtgacttcatctttctggacctcagattcctcttctgtaaaatgagagtgataatctgtgcctcctggcctggctgcgaggatgcagtgacatcttttaaaggtaggcggtagaaggtgttcagtagctatagttatcacaattagccggtaggcgaaatatctgaagcgctgtctggaggcagaggagcaggagtgttctcctggagtttctgagtcagggagacaaggtggaagggacctctgatggacagatctggacatgtgagcagatgcaggatgtgtctggaggaggtcagactccatggggagggtcacagtggatgtccttgtgatccttgcctgcctgggagctatctcaggagcctggcccctccctcacagccacccttcctctccatctctctatctcctacaggtgctgggccccaagccggctctgcctgcaggtaccgaggacaccgccaaggaggatgcggccaaccgcaagctggccaagctctacaaggtctccaatggtgcagggaccatgtccgtctccctcgtggctgatgagaaccccttcgcccagggggccctgaagtcagaggactgcttcatcctggaccacggcaaagatgggaaaatctttgtctggaaaggtactggagacagggaaagggtcccaactggcctgtaggatcttggatgggatgttctgcagctcccaggaactcagctcccggggagtgtggagtgtgcctggtgcaatggaaatcagaagtcttgggctgaggccttggttttgcatttgacatactgtgtgatcttgggcactttacttaccctttctgggcctcagattcctgatctgggctaaaatgggtgtttcccaagtgcattataacgtcagttctctgagaggctaattggcatcctgtagaaattatgtagaaaacatctaactgtatggtcagataaattcatgggcaacagtggattttaaaatgttcgagtttgtttactgtaggacttttaacttgttcatttacaggggggcttttcatgaagatgatctggtttgggaaatgctaagctagaagttcataaactctttcggtactatcttgtgggaattctcttggaaaccattggcccagatgtttcccagaggccctgagatgttctgagaggacccatcaatatcctcccctgattctctaaggctcatcttggggaagaggacagaggagagggaggcagtaggaggacagagagaaagggagacggtggggagaaagagagagagagagacactattatgattatt

SEQ ID NO: 9122 - DNA, 2823 bp, Homo sapiens
  source 1..2823: mol_type = unassigned DNA
attaaagcgtcatgggcacacagaggagtgtgtgaatcctgagtgtacagcttgatggattacacagagcgaacacactcacgtaacactggatcatgaagcagaacctcaccagcccctagaaggccccttttgcccctttcggtgccctcaccccaagggcaaccatcatcctgaactttctcaacagcatagatgagttttgcctgtttctgaactttatagacacggaaccttgttcttttatctctgaccttttgctcaacattacatttctgagatgcatccgtattgttgcatttagttgtaggttgttcattttccttgctgtggaagattcagttgtgtgggtgtaccatgatttatgtatcctttatgttgttgatgggcacttgaggtggcttctggtttggggctattacagacagtgctactctgaacattcttgcacaagtcttttggtggacatacgaacgtacttctgtcaggtattttcctagaaggaggattgctgggtcataaggaaataggtatattcggctttagtggctatggccaaatggttttccaaaatggttgtgccaatttatattcccttcagcaggcaaacatttttgcacacattctagatgtagttgtacctgtgaaaaaattcctgtcctcagacatgcgctcccatctcctggtgtgtgcagatcacacttaattgtacgtaaataatgcacgtgtgcagactgtgccagccttcacctgggcaagtgcagaacagggtgagcctgcacaccacacgccacactccccaagccctgtcgctgggcggggcttataggaaggcggggcactgacttcctgggtctctgtcttccagaacatccaccagtggtgtggttccaacagcaatcggtatgaaagactgaaggccacacaggtgtccaagggcatccgggacaacgagcggagtggccgggcccgagtgcacgtgtctgaggagggcactgagcccgaggcgatgctccaggtgctgggccccaagccggctctgcctgcaggtaccgaggacaccgccaaggaggatgcggccaaccgcaagctggccaagctctacaaggtctccaatggtgcagggaccatgtccgtctccctcgtggctgatgagaaccccttcgcccagggggccctgaagtcagaggactgcttcatcctggaccacggcaaagatgggaaaatctttgtctggaaaggcaagcaggcaaacacggaggagaggaaggctgccctcaaaacagcctctgacttcatcaccaagatggactaccccaagcagactcaggtctcggtccttcctgagggcggtgagaccccactgttcaagcagttcttcaagaactggcgggacccagaccagacagatggcctgggcttgtcctacctttccagccatatcgccaacgtggagcgggtgcccttcgacgccgccaccctgcacacctccactgccatggccgcccagcacggcatggatgacgatggcacaggccagaaacagatctggagaatcgaaggttccaacaaggtgcccgtggaccctgccacatatggacagttctatggaggcgacagctacatcattctgtacaactaccgccatggtggccgccaggggcagataatctataactggcagggtgcccagtctacccaggatgaggtcgctgcatctgccatcctgactgctcagctggatgaggagctgggaggtacccctgtccagagccgtgtggtccaaggcaaggagcccgcccacctcatgagcctgtttggtgggaagcccatgatcatctacaagggcggcacctcccgcgagggcgggcagacagcccctgccagcacccgcctcttccaggtccgcgccaacagcgctggagccacccgggctgttgaggtattgcctaaggctggtgcactgaactccaacgatgcctttgttctgaaaaccccctcagccgcctacctgtgggtgggtacaggagccagcgaggcagagaagacgggggcccaggagctgctcagggtgctgcgggcccaacctgtgcaggtggcagaaggcagcgagccagatggcttctgggaggccctgggcgggaaggctgcctaccgcacatccccacggctgaaggacaagaagatggatgcccatcctcctcgcctctttgcctgctccaacaagattggacgttttgtgatcgaagaggttcctggtgagctcatgcaggaagacctggcaacggatgacgtcatgcttctggacacctgggaccaggtctttgtctgggttggaaaggattctcaagaagaagaaaagacagaagccttgacttctggtgaggacccgagtgcctgggggcggggggaggggtccgttgcttgtggggtgctgggagtggctcctgtacaggtctgggaatgagcatctttccaggggactgatggacaagatagggtggggacttcctcctctgtgggccagcccctcataaatcctgcctgggatagtgaagaacacatcagttccttcagaaaccctgaggcttctcaaagaaggctctcctctgttccaggagaaggaagggacagatgagaagtcacttcaagttcccagaatactcagaagctgaacttgtcaaggtttagatgtggcaaagcaggccaggcatggtgactcatgcatgtaatcccagcattttgggaggccaaggcaggaggatcacttgagcccaggagtttgaaagcagcccgggcaacatagtgaaacctcatctctag

SEQ ID NO: 9123 - DNA, 879 bp, Homo sapiens
  source 1..879: mol_type = unassigned DNA
acaagggcggcacctcccgcgagggcgggcagacagcccctgccagcacccgcctcttccaggtccgcgccaacagcgctggagccacccgggctgttgaggtaatttccaggtcctggaacacagaagggattggcctccctgaaacctcccagctcaatgaccagatctccaggcacaggaacgggggcaggggatggtgaatgacggggtattgcctaaggctggtgcactgaactccaacgatgcctttgttctgaaaaccccctcagccgcctacctgtgggtgggtacaggagccagcgaggcagagaagacgggggcccaggagctgctcagggtgctgcgggcccaacctgtgcaggtggcagaaggcagcgagccagatggcttctgggaggccctgggcgggaaggctgcctaccgcacatccccacggctgaaggacaagaagatggatgcccatcctcctcgcctctttgcctgctccaacaagattggacgttttgtgatcgaagaggttcctggtgagctcatgcaggaagacctggcaacggatgacgtcatgcttctggacacctgggaccaggtctttgtctgggttggaaaggattctcaagaagaagaaaagacagaagccttgacttctgctaagcggtacatcgagacggacccagccaatcgggatcggcggacgcccatcaccgtggtgaagcaaggctttgagcctccctcctttgtgggctggttccttggctgggatgatgattactggtctgtggaccccttggacagggccatggctgagctggctgcctgaggaggggcagggcccacccatgtcaccggtcagtgccttttggaactgtccttccctca

SEQ ID NO: 9124 - DNA, 680 bp, Homo sapiens
  source 1..680: mol_type = unassigned DNA
tggcgtcccttggcaactggcgtggcctcccctcacagatggcttctgggaggccctgggcgggaaggctgcctaccgcacatccccacggctgaaggacaagaagatggatgcccatcctcctcgcctctttgcctgctccaacaagattggacgttttgtggtgagcccctgcggaggtcacacctctgctttcccctcgggaggcgagttccacaggactggccggcagcaggggcaggagaaacagttctgatggtgtggcacagaggaaggggccccctgccagctgcagccagctgtgccactccctcagggggcagataaaggaaggccacccaggggagggaagacatctcactgatgctctttcgttccttcccagatcgaagaggttcctggtgagctcatgcaggaagacctggcaacggatgacgtcatgcttctggacacctgggaccaggtctttgtctgggttggaaaggattctcaagaagaagaaaagacagaagccttgacttctgctaagcggtacatcgagacggacccagccaatcgggatcggcggacgcccatcaccgtggtgaagcaaggctttgagcctccctcctttgtgggctggttccttggctgggatgatgattactggtctgtggaccccttggacagggccatggctg

SEQ ID NO: 9125 - DNA, 556 bp, Homo sapiens
  source 1..556: mol_type = unassigned DNA
acacaggctggagtgcaatggcacgatatcagctcactgaagcctccacctcctgggctcaagcactcctcccacctcagccccccaggtagctgagactacaggaatggataaagcacggagaggaaccaagaatgtgctcagaaaaaaatccttcctcactgaaaccaggactaaggaaaggagattcccttctaccatccatggactcaggctgacggagcacgctgcctgtctgtgtctctccgtttctctctctggaacgttgtcagatgtcacggcggagggaaaagagacctggaatgacttgccgaatttttagcccataaccaggcactgtgtaaaccgctttacctcattcagtctttgcaattataccacaaggtcacactgtttagaaggagaaagaagagctcgctgtgaaaaacgctccacaatgctgcagagccttgtgaaggtggaagagtactctcatcagcaaacggcattccttccatggaaaatgtcattgggaggaaagcagggacaaactacaaggcattcgatgctcaacaaa

SEQ ID NO: 9126 - DNA, 903 bp, Homo sapiens
  source 1..903: mol_type = unassigned DNA
cttatactctgagccctgctcggtttaggcctgtctgcggaatccgcaccaaccagcaccatgcccatgatactggggtactgggacatccgcgggctcctgattatgacagaagccagtggctgaatgaaaaattcaagctgggcctggactttcccaatctgccctacttgattgatggggctcacaagatcacccagagcaacgccatcttgtgctacattgcccgcaagcacaacctgtgtggggagacagaagaggagaagattcgtgtggacattttggagaaccagaccatggacaaccatatgcagctgggcatgatctgctacaatccagaatttgaaaagtgtaatgttggttggagctcgagaaggaatctggatactgtgtgccggaccagccaaagaatcctgtgtcaaaaccgagagaacgaataagccttcatcaccatggcacatttatataaaaagaaagggagagatgttgcgggaagtcagggaccccgaatggagggactgactggagccgcggcagaggaacataaattgcaaatatttcattttaatatggacatttatcagttcccaaattattactttttacatttcttacgcctgtcttactttaatctcttaatcctgttatcttcataagctgaggatatatgtcacctcaggaccactgtgataattgtgttaactgtacaaattgattgtaaaacatgtgtgtttgcacaatatgaaatcagtgcaccttgaagaagaacagaataacagtgatttttaggcaacaagagaagacaaccataaggtctgactgcgtgcagggtcaggcaaaatagagccatatttttcttcttgcagggagcctataaatggacatggaagtagggaagatatt

SEQ ID NO: 9127 - DNA, 1161 bp, Homo sapiens
  source 1..1161: mol_type = unassigned DNA
ctctgagccctgctcggtttaggcctgtctgcggaatccgcaccaaccagcaccatgcccatgatactggggtactgggacatccgcgggctggcccacgccatccgcctgctcctggaatacacagactcaagctatgaggaaaagaagtacacgatgggggacgctcctgattatgacagaagccagtggctgaatgaaaaattcaagctgggcctggactttcccaatctgccctacttgattgatggggctcacaagatcacccagagcaacgccatcttgtgctacattgcccgcaagcacaacctgtgtggggagacagaagaggagaagattcgtgtggacattttggagaaccagaccatggacaaccatatgcagctgggcatgatctgctacaatccagaatttgagaaactgaagccaaagtacttggaggaactccctgaaaagctaaagctctactcagagtttctggggaagcggccatggtttgcaggaaacaagatcacttttgtagattttctcgtctatgatgtccttgacctccaccgtatatttgagcccaagtgcttggacgccttcccaaatctgaaggacttcatctcccgctttgagggcttggagaagatctctgcctacatgaagtccagccgcttcctcccaagacctgtgttctcaaagatggctgtctggggcaacaagtagggccttgaaggccaggaggtgggagtgaggagcccatactcagcctgctgcccaggctgtgcagcgcagctggactctgcatcccagcacctgcctcctcgttcctttctcctgtttattcccatctttactcccaagacttcattgtccctcttcactccccctaaacccctgtcccatgcaggccctttgaagcctcagctacccactatccttcgtgaacatcccctcccatcattacccttccctgcactaaagccagcctgaccttccttcctgttagtggttgtgtctgctttaaagggcctgcctggcccctcgcctgtggagctcagccccgagctgtccccgtgttgcatgaaggagcagcattgactggtttacaggccctgctcctgcagcatggtccctgccttaggcctacctgatggaagtaaagcctcaaccaca

SEQ ID NO: 9128 - DNA, 852 bp, Homo sapiens
  source 1..852: mol_type = unassigned DNA
ctgctcggtttaggcctgtctgcggaatccgcaccaaccagcaccatgcccatgatactggggtactgggacatccgcgggctggcccacgccatccgcctgctcctggaatacacagactcaagctatgaggaaaagaagtacacgatgggggacgctcctgattatgacagaagccagtggctgaatgaaaaattcaagctgggcctggactttcccaatgggatgctggggagcctggtggcccaactgagcttcgccggtttcccatccatccagctgccctacttgattgatggggctcacaagatcacccagagcaacgccatcttgtgctacattgcccgcaagcacaacctgtgtggggagacagaagaggagaagattcgtgtggacattttggagaaccagaccatggacaaccatatgcagctgggcatgatctgctacaatccagaatttgagaaactgaagccaaagtacttggaggaactccctgaaaagctaaagctctactcagagtttctggggaagcggccatggtttgcaggaaacaagatcacttttgtagattttctcgtctatgatgtccttgacctccaccgtatatttgagcccaagtgcttggacgccttcccaaatctgaaggacttcatctcccgctttgagggcttggagaagatctctgcctacatgaagtccagccgcttcctcccaagacctgtgttctcaaagatggctgtctggggcaacaagtagggccttgaaggccaggaggtgggagtgaggagcccatactcagcctgctgcccaggctgtgcagcgcagctggactctgcatcccagcacctg

SEQ ID NO: 9129 - DNA, 1028 bp, Homo sapiens
  source 1..1028: mol_type = unassigned DNA
aggcctgtctgcggaatccgcaccaaccagcaccatgcccatgatactggggtactgggacatccgcgggctggcccacgccatccgcctgctcctggaatacacagactcaagctatgaggaaaagaagtacacgatgggggacgctcctgattatgacagaagccagtggctgaatgaaaaattcaagctgggcctggactttcccaatctgccctacttgattgatggggctcacaagatcacccagagcaacgccatcttgtgctacattgcccgcaagcacaacctgtgtggggagacagaagaggagaagattcgtgtggacattttggagaaccagaccatggacaaccatatgcagctgggcatgatctgctacaatccagaatttgagaaactgaagccaaagtacttggaggaactccctgaaaagctaaagctctactcagagtttctggggaagcggccatggtttgcaggaaacaagggcttggagaagatctctgcctacatgaagtccagccgcttcctcccaagacctgtgttctcaaagatggctgtctggggcaacaagtagggccttgaaggccaggaggtgggagtgaggagcccatactcagcctgctgcccaggctgtgcagcgcagctggactctgcatcccagcacctgcctcctcgttcctttctcctgtttattcccatctttactcccaagacttcattgtccctcttcactccccctaaacccctgtcccatgcaggccctttgaagcctcagctacccactatccttcgtgaacatcccctcccatcattacccttccctgcactaaagccagcctgaccttccttcctgttagtggttgtgtctgctttaaagggcctgcctggcccctcgcctgtggagctcagccccgagctgtccccgtgttgcatgaaggagcagcattgactggtttacaggccctgctcctgcagcatggtccctgccttaggcctacctgatggaagtaaagcctcaacca

SEQ ID NO: 9130 - DNA, 491 bp, Homo sapiens
  source 1..491: mol_type = unassigned DNA
tgtctgcggaatccgcaccaaccagcaccatgcccatgatactggggtactgggacatccgcgggacaaagtcagggaccctccatctctgacgcgacctgcgggccatctctcccagctggcccacgccatccgcctgctcctggaatacacagactcaagctatgaggaaaagaagtacacgatgggggacgctcctgattatgacagaagccagtggctgaatgaaaaattcaagctgggcctggactttcccaatctgccctacttgattgatggggctcacaagatcacccagagcaacgccatcttgtgctacattgcccgcaagcacaacctgtgtggggagacagaagaggagaagattcgtgtggacattttggagaaccagaccatggacaaccatatgcagctgggcatgatctgctacaatccagaatttgagaaactgaagccaaagtacttggaggaactccctgaaaagctaaagc

SEQ ID NO: 9131 - DNA, 512 bp, Homo sapiens
  source 1..512: mol_type = unassigned DNA
tgtctgcggaatccgcaccaaccagcaccatgcccatgatactggggtactgggacatccgcgggctggcccacgccatccgcctgctcctggaatacacagactcaagctatgaggaaaagaagtacacgatgggggacgctcctgattatgacagaagccagtggctgaatgaaaaattcaagctgggcctggactttcccaatgtggggagacagaagaggagaagattcgtgtggacattttggagaaccagaccatggacaaccatatgcagctgggcatgatctgctacaatccagaatttgaaaagtgtaatgttggttggagctcgagaaggaatctggatactgtgtgccggaccagccaaagaatcctgtgtcaaaaccgagagaacgaataagccttcatcaccatggcacatttatataaaaagaaagggagagatgttgcgggaagtcagggaccccgaatggagggactgactggagccgcggcagaggaacataaat

SEQ ID NO: 9132 - DNA, 871 bp, Homo sapiens
  source 1..871: mol_type = unassigned DNA
tccgcaccaaccagcaccatgcccatgatactggggtactgggacatccgcgggctggcccacgccatccgcctgctcctggaatacacagactcaagctatgaggaaaagaagtacacgatgggggacggtaatggcaccctcgtgttcgggctctgcccactcacgctaagttggcaccaagcaacccatggtggccacctgtggctgcctctgcaggcctcccctgctggagctgcaggctgtctcttccctgagccccggtgagggagccctctggccttgcaaggcagaatgctggggtgggatgctgggccccctgtctaattgggacgggtgtccctcagggcttgcctaaaccctggaagccttagctgtgtggggtccagagccctcagcgggattctttgtccctgaaccctgggatgtgggactgagtggtcagattctagatccacctgtctcagggatcttgccactggctccgtgggagggtccccgggaaggagggctgggctctggggaggtttgttttcacttcttcttccccaccacagctcctgattatgacagaagccagtggctgaatgaaaaattcaagctgggcctggactttcccaatgtaggtgcaggggaaggggcggttttgggggaaagtgcaacgtgtctctgactgcatctcctctccccagcttagaggtgttaagatcaggagtcttctgcccaattcctctcactcctggctgtctaaacagtccttccatgatgttctgtgtccacctgcattcgttcatgtgacagtattcttatttcagtcctgccatgagcaggcacagtgagtgcccggtctcctctctgctcttgcttatgg

SEQ ID NO: 9133 - DNA, 790 bp, Homo sapiens
  source 1..790: mol_type = unassigned DNA
cgcaccaaccagcaccatgcccatgatactggggtactgggacatccgcgggctggcccacgccatccgcctgctcctggaatacacagactcaagctatgaggaaaagaagtacacgatgggggacgctcctgattatgacagaagccagtggctgaatgaaaaattcaagctgggcctggactttcccaatctgccctacttgattgatggggctcacaagatcacccagagcaacgccatcttgtgctacattgcccgcaagcacaacctgtgtggggagacagaagaggagaagattcgtgtggacattttggagaaccagaccatggacaaccatatgcagctgggcatgatctgctacaatccagaatttggcttggagaagatctctgcctacatgaagtccagccgcttcctcccaagacctgtgttctcaaagatggctgtctggggcaacaagtagggccttgaaggccaggaggtgggagtgaggagcccatactcagcctgctgcccaggctgtgcagcgcagctggactctgcatcccagcacctgcctcctcgttcctttctcctgtttattcccatctttactcccaagacttcattgtccctcttcactccccctaaacccctgtcccatgcaggccctttgaagcctcagctacccactatccttcgtgaacatcccctcccatcattacccttccctgcactaaagccagcctgaccttccttcctgttagtggttgtgtctgctttaaagggcctgcctggcccctcgcct

SEQ ID NO: 9134 - DNA, 1179 bp, Homo sapiens
  source 1..1179: mol_type = unassigned DNA; mol_type = unassigned DNA
cgcctccttgctgctgctgccgccgccaatcctggtccggttgcccgagttcccggaggtctctcgcgggacctctctcaccgccaccgctcctactctcgggcttccaaatctggggcgatgtctccccaggttaaattaccctagctcctgctccagatcgcttccccgtgccccgccagagcccagtagttcaaaaattaaatttggggcaaggggtgcgcgccagagcgcagctgtttctggagcctgcggcagcggtggcgagccacagggcggcgaccgtgagctccgggagctgcgcaaaccacctggagaccatgtctggggatgcgaccaggaccctggggaaaggaagccagcccccagggccagtcccggaggggctgatccgcatctacagcatgaggttctgcccctattctcacaggacccgcctcgtcctcaaggccaaagacatcagacatgaagtggtcaacattaacctgagaaacaagcctgaatggtactatacaaagcacccttttggccacattcctgtcctggagaccagccaatgtcaactgatctatgaatctgttattgcttgtgagtacctggatgatgcttatccaggaaggaagctgtttccatatgacccttatgaacgagctcgccaaaagatgttattggagctattttgtaaggtcccacatttgaccaaggagtgcctggtagcgttgagatgtgggagagaatgcactaatctgaaggcagccctgcgtcaggaattcagcaacctggaagagattcttgagtatcagaacaccaccttctttggtggaacctgtatatccatgattgattacctcctctggccctggtttgagcggctggatgtgtatgggatactggactgtgtgagccacacgccagccctgcggctctggatatcagccatgaagtgggaccccacagtctgtgctcttctcatggataagagcattttccagggcttcttgaatctctattttcagaacaaccctaatgcctttgactttgggctgtgctgagtctcactgtccaccccttcgctgtccagaattccccagcttgttgggagtctacgtcacggcttgtcttgggaaccaatccgtctctctttcttttctttgaagttcccaataaaatgaaaacagg

SEQ ID NO: 9135 - DNA, 669 bp, Homo sapiens
  source 1..669: mol_type = unassigned DNA; mol_type = unassigned DNA
gcaaaccacctggagaccatgtctggggatgcgaccaggaccctggggaaagacatgaagtggtcaacattaacctgagaaacaagcctgaatggtactatacaaagcacccttttggccacattcctgtcctggagaccagccaatgtcaactgatctatgaatctgttattgcttgtgagtacctggatgatgcttatccaggaaggaagctgtttccatatgacccttatgaacgagctcgccaaaagatgttattggagctattttgtaagattcttgagtatcagaacaccaccttctttggtggaacctgtatatccatgattgattacctcctctggccctggtttgagcggctggatgtgtatgggatactggactgtgtgagccacacgccagccctgcggctctggatatcagccatgaagtgggaccccacagtctgtgctcttctcatggataagagcattttccagggcttcttgaatctctattttcagaacaaccctaatgcctttgactttgggctgtgctgagtctcactgtccaccccttcgctgtccagaattccccagcttgttgggagtctacgtcacggcttgtcttgggaaccaatccgtctctctttcttttctttgaagttcccaataaaatgaaaacaggaaa

SEQ ID NO: 9136 - DNA, 763 bp, Homo sapiens
  source 1..763: mol_type = unassigned DNA; mol_type = unassigned DNA
ctggggatgcgaccaggaccctggggaaagacatgaagtggtcaacattaacctgagaaacaagcctgaatggtactatacaaagcacccttttggccacattcctgtcctggagaccagccaatgtcaactgatctatgaatctgttattgcttgtgagtacctggatgatgcttatccaggaaggaagctgtttccatatgacccttatgaacgagctcgccaaaagatgttattggagctattttgtaaggtcccacatttgaccaaggagtgcctggtagcgttgagatgtgggagagaatgcactaatctgaaggcagccctgcgtcaggaattcagcaacctggaagaggataggaagaaaagaaagtttatacctggttaattcgtcactgaaaacaattttctgaatggaattaccagatcaaagggtataatgagcacattggaggcttggactgtatttcactaaattgcttcccaaaagacttgtgttgtttgcccctcaccagcacaagtacagcagcccccactgggagccaccacactgtttcgagattgggggcttgggatttcttggcaatggtgtagaggatggtgaagatttcttcatcctccggttgaacgttcttggggagccgcggccgacgcgcctcgcactgatggccaccagggggagccccgcgcgcttcctccttccccttgtgttccagggcgcacttcaaaacgctgacgttctccttcgtccctctgggggcgc

SEQ ID NO: 9137 - DNA, 6423 bp, Homo sapiens
  source 1..6423: mol_type = unassigned DNA; mol_type = unassigned DNA
gctccttcctcaccgggctgactagcctctcctttccctgtccccctccatcgctgctctgcaggaagccagcccccagggccagtcccggaggggctgatccgcatctacagcatgaggttctgcccctattctcacaggacccgcctcgtcctcaaggccaaagacatcagacatgaagtggtcaacattaacctgagaaacaagcctgaatggtactatacaaagcacccttttggccacattcctgtcctggagaccagccaatgtcaactgatctatgaatctgttattgcttgtgagtacctggatgatgcttatccaggaaggaagctgtttccatatgacccttatgaacgagctcgccaaaagatgttattggagctattttgtaaggtcccacatttgaccaaggagtgcctggtagcgttgagatgtgggagagaatgcactaatctgaaggcagccctgcgtcaggaattcagcaacctggaagagattcttgagtatcagaacaccaccttctttggtggaacctgtatatccatgattgattacctcctctggccctggtttgagcggctggatgtgtatgggatactggactgtgtgagccacacgccagccctgcggctctggatatcagccatgaagtgggaccccacagtctgtgctcttctcatggataagagcattttccagggcttcttgaatctctattttcagaacaaccctaatgcctttgactttgggctgtgctgagtctcactgtccaccccttcgctgtccagaattccccagcttgttgggagtctacgtcacggcttgtcttgggaaccaatccgtctctctttcttttctttgaagttcccaataaaatgaaaacaggaaatgtattcttctgataatcatttgtctgactcctctagcctgtagctgctgctactgctgcttttttttcctttttttttttgaggcaagatcttgcttcgttactcaggctggagtgcagtgggacagtcggctcactgcagccttgaactcctgggctcagttgattctcccgcctcagcctcctgagaagctaggactacaggtatgtgtcaccacgcccagctaatttttaaaaaaatgttgttgagacagggtctcactatgttgctcaggctggtctccatctcctggccgcaagccatccacccaacttggtctccaaagtgttgagattacaggcatgagccacctggcctgcctagcctgtagcttctaactattttctagaaagtgcctggtgctaatgtcagagcacattttgggagcctgtgtgcctcctaactccttggccttcagcctagtttgatctccagattattggtgcagatgctgatgctgaggttcagggtcaacctatgactgatgcttgtcactacagaatggcaccctccaaagacctccctggtgaaagcttaagaagagggagaaggaagaagaaaacactccaaacctaaataccttccatttggcaaatgaatgtcgctgtccacgtgggcgagtatgagtgtaattctccaaactttggccatgggcctggagacaccgagggtcttgtgactggaaagaattccaaagcaggaaatgaaacaccggtttatcacccaggactaactacgtcagaatttcactggtgctgtcagggctcaggatgtctcacaaaatgttctatagccggcatcctgccttaaaaaaatacacacgccccaaacccagccacaagcaaaggtcattccgttggatttgcgtcacactctcttccaattcatctcaacaaatgcctctggttgcctgttgtgtaccaagcccaggggcacactggggataaagttgaaaaagacattggctctgtccctgggagcccccatctctccacttatcttggttgaggttttaaacctagcgctttggagctgcttgtctgttgtagggatgcttgtctctgatgtggcccctctgccagcttcgccaggcagtaccaccccactgaagacagcaaagagctgaggatggctggtgccaacaggtcccttgggctgggagcatctactgcctgcactatgggagggggaccaagtttgtccaatgctgtttcatctcagtgtctgaggatcagcctgtgatcatttcagctttgctcatgctggatcctttcccatcctcctagctgtgctgagacaccaggcagcaacaggagcgatgttttgccttgtctgtgctccctaaggagctgtctgccacctctgcctctgagacagcccaaatcagccctcctctctccccacgtctcagtctggccctgccatctgctggctctgggtatattttgacccatgtaaatagttaccaggtgttactctgtgccagctggacagaaacaagcctgcttggtgaggtggccagaacttccagaagaggcagcgcatgacaggggcagtctgccgcaccatctgctccggatgtggagccctgttgccatggcaccctagttaatgctgagtgaggtctgtgaatcaccgttttcctgggatctttgctccaagaagaggggaatcttctcctgtggcctctcataggacttaggagattgatcagccttttgccggtacaaatcctgcatgctagtgagtgcttgtcataagaccaaagttaccactgatgcaacaggaaatggcatgcctctggctcaccaaaatgaaggtgttctcttttggggctccgcacactaatttagaaagcttgaagaaccaggaattatagaatggagaaaagcactcatgggggaggtttgcagcctggtggcctatagcccagtttgggatttgagtgcctcttggccaggcatgctccctgctgtttaccagggtcctggtcacctgcacatccttacacttcctccatctcgcttctttgtcacttgtctgacccacagagaaaactgagttatcaatctttgaataaaactagaaggatgtggcctggagaaaagagggaaggaggtaattaaataatgctccatgaagaactttaaaaatatgcttcttaattaatacatgtggaaagaatacatatgggttaaaaatacaataatgtaaaagaatagaaaatcttccattatcttgtgtcctagagataaccacttttagtaattggtgtctacctttttttccccttttcttttaaataatagagatggggtttcgctatgttgaccaggctggtcttgaactcctggcttcaagtgatcctcccatctcggcatcccaaagtgctgggattataggtctgagtcatcatgcctggtgggtgtctatcttataaaaagcactaaacttaaagatttaaaggtgagagcctgtattaggccattctcatggtgctataaagaactgcccaagactgagtaatttataaaggaaagaggtttaattgactcacaattccacatggctggggaagcctcaggaaactttcaatcatggtggaaggggaagcaaacatgtccttctgcacaaggtggcagaagagagaagtacagagccaaagagggaaaaactccttataaaaccattagatctcatgagaactcactcactgtcatgagaaaagcatagggaaaacactcccacaatcgaatcacctcccttgaggtccctcccccaacatgtggggattataattcagattaaaattgaagatgagattttaggtggagcacagccaaaccatatcagagccattctctatcttttgcagattggaaaaataaaaaaattagtttaaaccacagcatttaaaagaaatggtcatagatgatgttaacatcagaatggaggttgtgtggagttcccctccttggaggttctgagctacagcctagcctggactcagtccagttacaatctaacatggctagggggaggagggagcatgatggggcagggcttgtgtggctgggacagctggctatggtcgtggtgctggtgactaaatggtacttgaaatttcttttagatctaaaattctgtgatatggtttggatctgagaccccaccaaatttcgtgttgaaatgtaatccccaatgctggtgggaggtgattggatcatgggggtagatttctcatgaatggtttagcaccattctcttggtgctgttctcatgatagtgagtgagttctcatgagttctggttgtttaaaagtgtgcagcatctccctgacccctcttgcgccagctcccaccatgggagatgcctcgctccccctttgctttttgccatgagaggaagcttcctgagggctctccagaagcagaatctactacacttctcatacagcctgcagaaccatgagccaattaaacctctttttaaaaacacttttattttaagttcaggggtacatgtgcaggatgtgcaggttcgttccataggtaaacatgcgtcatggggtttgttatgcagattatttcatcacctagatattaagtctagtatccattagttatttttcctgatcctctccctcctcccaccctgcaccctctgataggcctcagtgtgtattgttaccctccacatgtccatgtgttctcatgatttagctcccacttataagtgagaacatgcagtttttgtaaacctgttttctttagggaaagtttagaattttctagagactggttgtatggttgtgaccaaaatgccagtagtgatatggacagtgaaggccaggctgaggaggtgatggaaatgaggaacttactgggaactggagcaaaggtcacttttgttatgctttagcaaagaacttggctgcattgtgctcctggcctagggacctgtggaagtttgaacttgagagtgatgattttagggtatctggcagaaaaaatttctaagcagcaaagcattcaagatgcgccctggctgctttcaacaacctatgctcatatttgtgagcaaagaaattatgttaagttggaacttatatttacaggggaagcagagcgtaaaagtttggagaatttgcagccagctatgtggtagaaaagaagagcccgttttcagggaaggaattcaagcaggctgcagaaatttgcataagtaaaaaggagccaagtgctaatggccaagaaaatggggaaaaggccttgaaggcatttcagagacctttgtggcagcccctcccatcacagactcagaggcctaggaggacagaatgactctgagtattaaagtagatttaatctaaatcataaagtacaagctagagcaatccctccagtgctgcagaaactgcctgcatgtggctcccacattgtttcttggagctttggtggtggtaggggtggcaggggcaggtgttatgtttcttggtttctcaccttcaggtctccttacccatgtttcctttgtcagagtcattggccttgatggaggggagactgggttactctgagttgagaagcaagcttgactgccctgtggtttatatcagcctagcttagtttgttttctgaagtcttcacaaataaccaaatatccagcccagtgcagttctcaatgagtagtctccagttcccatcccccaccacacacacacaccaaacactgtgcccacctgggagacccattttcatttatcttcttctttgagtgcctggaaggctgaacatttgatcttttcaaacatttttctctcatctggcctgttagcgctcttgagcctttgaaaatgccatttcctctacatactattcttcctcagagcagccctctgtttttttttccaaccagtcttttctcttgcaaagttcagatcaaaattcttctttatgtaaagagaagtggcgtgccataggggttacaaacagggcttcaaggttagcactgggatcaaattccgactttgcaacttaactttcttgagtaagttgctacacctctattagcctcagtttcttatctgtaaaatgggacggctaagtacctatttcattgggctgttgaataatgatggtctcatctatgcaagggcttagtaccagctgggtgaaactcagtgaatggcaggcaaccctattatgactaggcttctgccaatgatcagacttgaaccctgtgctcatccccccatcactttgtggaactagatgtcctacgttgcacatggcttgattcatggtttggagttgttttctggttgtttcctgtgtgcaggtttaatctcaacctgtgatcccttgaaagctgcaattttatccctccccgtcctcctccctctcaccccaaggccaagtttaatactgtgcattctgaaatcttgcaatgttgatgatgtaaaataaatcttctctcctgtgtttctgaa

SEQ ID NO: 9138 - DNA, 576 bp, Homo sapiens
  source 1..576: mol_type = unassigned DNA; mol_type = unassigned DNA
aggaagaaaagaaagtttatacctggttaattcgtcactgaaaacaattttctaacacctctgttctgtaaagcagaagagctgtgtagatgttccagagtcgcttggtgtaaatttggttctgatttgtgccgtgaagcccaataacaaactggaggcacacatttcaaagccagtgattcttgagtatcagaacaccaccttctttggtggaacctgtatatccatgattgattacctcctctggccctggtttgagcggctggatgtgtatgggatactggactgtgtgagccacacgccagccctgcggctctggatatcagccatgaagtgggaccccacagtctgtgctcttctcatggataagagcattttccagggcttcttgaatctctattttcagaacaaccctaatgcctttgactttgggctgtgctgagtctcactgtccaccccttcgctgtccagaattccccagcttgttgggagtctacgtcacggcttgtcttgggaaccaatccgtctctctttcttttctttgaagttcccaataaaatgaaaacaggaaatgta

SEQ ID NO: 9139 - DNA, 2694 bp, Homo sapiens
  source 1..2694: mol_type = unassigned DNA; mol_type = unassigned DNA
ttagtgccatcctgttagcttccttgaacaaggtaatgccacctaacatgttttttcagacttccaggacaatgatcagggggacttctctatgccacactgggaggtgtgaaggtgtaggctttagggcaacccctctgagaaggggtggcaggtggaggagcccattgatcctttctatcagggatggatttgctttctgtgggtgtcaccttcaggggcctgtgttcccactcatcacaggagctcatatttactcagtggggccagagtgttcttcatacatggtgattttactcctcaccataacctccgtggtgcgtgctaacatgaccaccattttgcagatgagaacatggaggcttgcaggggaggtaagttgccccaggttccatgctgaatcagaggtcaagctcagcacacagcacaggaccaagtctgctggttcccaagctcacatccttacctacaactctgaatcaccccacagcagagtcaacaagctggcctggcatgtgaagaagcaagcctgggtgtctcctggctgccagtgccatccctgccccgggaccctaatccacagtttgattctggtccttttgccctctgtccctcaccagaaccctgatatttccagatgaaaacacgagtatagcttatttccacaactcacctgggcccagcaatcaagatctatagctatagggaagtattgagttgattatgagttatataggtcaaaatgagtagcttgcttgattgaagcaggtaattcgtgccatacttttctctttgggaagacctgtaccaacaataacctctgctaaacactttcgcttttttaaatttgcaggtacttttttggggctgtctttggctgcctgtctgttgagagtttgttttctttacagtccatctgatttacagtccctccgggttgatttgtctcatttgggaatgagaaattttattttaatgcattaagtaatagtgttgagtggccaacaaatgtgaagtttgaaaagctcaaatgaaaaaaaaagtgtgatagaaacacagagttgggggccgggtgcagtggctcacacctgtatttccggcactgtgggaggccaagacaggaggatcccttgagctcaggagtttgagacccctgggcaacatggcaagaccccaagaccccatctctacaaaaaaaatgtaaaaatcagccaggggtaatcccagctacttgggaggctgaggtggaaggattgcttgagcccgggaggttgaggctgcagtgagctgtgatcgatctactggactccagcctgagtgacagagcaagaccctatctaaaaaaaaaaaaaaaaaaaaaaaaagaagaagaagaacacaggttggaatttgagggggcctgttaaataggatgctctttcctgccttagttttgaattaattgagaagataaaataataaggcatggagattagagcatcccctttctttttttctttttcttttcttttttctttttttcttttttactttttgctcttcttggccaggctggagtgcaatggcacaatcttggctcaccacaacctccgcctcgcgggttcaagcaattctcttgcctcagcttccccagtagctggggttacagccacgtgccatgatgcccagctaattttgtattttcagtagagacggggtttctccatgttggtcaggctggtctcgaactccccacctcaggtaatccacccgcctcggcctcccaaagtgctgggaatacaggcatgagccaccaggcccggcagcatcccctttcttattgataaagcagatcttggagaatgggagatcctgagcggggttcctaatgctagccttcaacatcaggctgaggctcaccttgtcttcaagtaatgggcagtgctggcctgaaggggagcctcctctgtccagggctcagcttatccttggaaggcttagcacattgaggagctgctccaggctaagagggagggactggggtactctgtagaggttgttcttccagtttcttcaatcagatgagccacactgtcactctagtgttgaaaggagggaagggacagaggtggccaggagtgtgaccctaaaagaggcagaggagacctcagagaaagagaagaagcattctcctaaccagagggagaaggagagaggcctcagttctccctctctgggaattaatttgagatttacatttagtgtctataaacatgtcagcagatatataaacttatttgcttttgctttgtttccatttttagattcttgagtatcagaacaccaccttctttggtggaacctgtatatccatgattgattacctcctctggccctggtttgagcggctggatgtgtatgggatactggactgtgtgagccacacgccagccctgcggctctggatatcagccatgaagtgggaccccacagtctgtgctcttctcatggataagagcattttccagggcttcttgaatctctattttcagaacaaccctaatgcctttgactttgggctgtgctgagtctcactgtccaccccttcgctgtccagaattccccagcttgttgggagtctacgtcacggcttgtcttgggaaccaatccgtctctctttcttttctttgaagttcccaataaaatgaaaacagg

SEQ ID NO: 9140 - DNA, 1391 bp, Homo sapiens
  source 1..1391: mol_type = unassigned DNA; mol_type = unassigned DNA
accacctctgctgccgcgcgcctaccggagccgcttggccctagtgctttccagcggatttcccctcaggtgcggagccgggtgccggggtcccacagccaaccactaccggttcctctttcgtcagccaccggcgccggcaggacccgcgaatcccgatctccaggagcctgtaaggaggccgcccattggctcagccgcactgctgggcaggtacttccaaagctttgaggattggctgatgctctgggcgccggggctagttggcgggtaggatcacgtgcgaggggcaggccccgtctaggccccgcctccttgctgctgctgccgccgccaatcctggtccggttgcccgagttcccggaggtctctcgcgggacctctctcaccgccaccgctcctactctcgggcttccaaatctggggcgatgtctccccaggttaaattaccctagctcctgctccagatcgcttccccgtgccccgccagagcccagtagttcaaaaattaaatttggggcaaggggtgcgcgccagagcgcagctgtttctggagcctgcggcagcggtggcgagccacagggcggcgaccgtgagctccgggagctgcgcaaaccacctggagaccatgtctggggatgcgaccaggaccctggggaaaggaagccagcccccagggccagtcccggaggggctgatccgcatctacagcatgaggttctgcccctattctcacaggacccgcctcgtcctcaaggccaaagacatcagacatgaagtggtcaacattaacctgagaaacaagcctgaatggtactatacaaagcacccttttggccacattcctgtcctggagaccagccaatgtcaactgatctatgaatctgttattgcttgtgagtacctggatgatgcttatccaggaaggaagctgtttccatatgacccttatgaacgagctcgccaaaagatgttattggagctattttgtaagattcttgagtatcagaacaccaccttctttggtggaacctgtatatccatgattgattacctcctctggccctggtttgagcggctggatgtgtatgggatactggactgtgtgagccacacgccagccctgcggctctggatatcagccatgaagtgggaccccacagtctgtgctcttctcatggataagagcattttccagggcttcttgaatctctattttcagaacaaccctaatgcctttgactttgggctgtgctgagtctcactgtccaccccttcgctgtccagaattccccagcttgttgggagtctacgtcacggcttgtcttgggaaccaatccgtctctctttcttttctttgaagttcccaataaaatgaaaacaggaaatgt

SEQ ID NO: 9141 - DNA, 1663 bp, Homo sapiens
  source 1..1663: mol_type = unassigned DNA; mol_type = unassigned DNA
gtgggcgcagagggcgggctggctgcggggcgaccgcgcgccggggccatgccgcgctccttcctggtggactcgctagtgctgcgcgaggcgggcgagaagaaggcgcccgagggcagcccgccgccgctcttcccctacgctgtgcccccgccgcacgcgctgcacggtctctcgcctggcgcctgccacgcgcgcaaggctgggctgctgtgcgtgtgcccgctctgcgtcaccgcctcgcagctgcatgggccccccgggccgcccgcgctgcctctactcaaggcttccttcccacccttcggctcgcagtactgccacgcgcccctgggccgccagcactctgctgtgtcgcccggggtcgctcacggcccggccgccgctgctgctgccgccgcgctctaccagacctcctacccgctgcctgaccccaggcagttccactgcatctctgtggacagcagctctaaccagctgcccagcagcaagaggatgcgcacggctttcaccagcacgcagctgctagagctggagcgcgagttcgcttctaatatgtacctgtcccgcctacgtcgcatcgagatcgcgacctacctgaatctgtccgagaagcaggtgaagatctggtttcagaaccgccgagtgaagcacaagaaggagggcaagggcagcaaccatcgtggcggcggcggcgggggtgccggtggtggcgggagcgcaccgcaaggctgcaagtgcgcatcgctctcctcagccaagtgctccgaggatgacgacgaattgcccatgtctccgtcctcctcagggaaggacgaccgggatcttacggtcactccctaggcgcgtgtctccctaggtcgcccaccccaagacctccctgcgcctcggagactagtcctgggactcagcgctgattcccaggcacccgcagccaaaccactgcctggcatggatttggcactgctttgcagaggtcccgggcctgggcagggctgagagcttggcagagactggaccatggcgtccccgccccagggctcgctcgtgtccaaagccaactccaagctgtgaacactgtaagcgctcgagtcctcctgggcagtgcagcaccgcggcccccgcccgcaagcctgcttggcgcagcgccttgctggcagccggcgcctcctagcccgccctctctgggctggcttgggcttcctcgcttactctactctcctccgctctcggtcaaggtcggcggccttggatgctcgttcgcttctctttttaaaatgtctttttgtccctccccacctctttcctgtgatcatttattcactcggcccccgcccgccaacacacacatttatgaacccccactttttttttccttctccttttcccttcccctcctcagggagcctcctccttcagtcagtccatttgtcccttgatctggccttgctgtcctcagtccccacggctcctctcacagatgataaatttcgcccgtagtatccatattggggaaacagatttgctctgtttccaacacgctcttccttcctctaaacataggaccccgctctgcgccgctggcgaccccactcttccccctccagactctggcccgccccagcctagctgtgtaattgtacggcctctgcaatgccagaag

SEQ ID NO: 9142 - DNA, 571 bp, Homo sapiens
  source 1..571: mol_type = unassigned DNA; mol_type = unassigned DNA
aaaacgtgcccagtgtttccctccgagggcactgcgtgccgcgcaggcgcaaagggccaggtgctggaggtgctgtcatggcctgcctcaacccggtgctctgggaaaccaaggttttgcagtctaaagcaacagaagacttcttcagaaatagcatccaatcacctctgtttactcttcagttgccgcacagcttgcaccaaacattgcaatcgtcaacagcatcattagttattcctgctggtagaactcttccaagttttaccacagcagaactgggcacttcaaactccagtgcaaactttacttttcctggttatcccattcatgtaccagcaggtgtgacactacagactgtatctggtcacctttataaagtcaatgtaccaattatggtgacagagacttctggaagagcaggtattcttcagcatccaattcagcaagtatttcaacagcttggccagccttcagtaatacaaactagtgttccacaattgaatccatggtctcttcaagcaactactgaaaaatcacagagaattgaaaccgtgctacagcaacccgcaat

SEQ ID NO: 9143 - DNA, 1082 bp, Homo sapiens
  source 1..1082: mol_type = unassigned DNA; mol_type = unassigned DNA
aaaacgtgcccagtgtttccctccgagggcactgcgtgccgcgcaggcgcaaagggccaggtgctggaggtgctgtcatggcctgcctcaacccggtgcctaaactctacagatctgtaattgaagatgtaattgaaggagttcggaatctatttgctgaagaaggtatagaggaacaagttttaaaagacttgaagcagctctgggaaaccaaggttttgcagtctaaagcaacagaagacttcttcagaaatagcatccaatcacctctgtttactcttcagttgccgcacagcttgcaccaaacattgcaatcgtcaacaggttggataccattagtaaatgagtactcatcattagttattcctgctggtagaactcttccaagttttaccacagcagaactgggcacttcaaactccagtgcaaactttacttttcctggttatcccattcatgtaccagcaggtgtgacactacagactgtatctggtcacctttataaagtcaatgtaccaattatggtgacagagacttctggaagagcaggtattcttcagcatccaattcagcaagtatttcaacagcttggccagccttcagtaatacaaactagtgttccacaattgaatccatggtctcttcaagcaactactgaaaaatcacagagaattgaaaccgtgctacagcaacccgcaattctaccttctgggccagtagataggaaacacttagaaaatgccaccagtgatatacttgtatctcctggaaatgagcataaaatcgtgcctgaagctttgttgtgtcatcaggaaagttctcactatatcagtcttccaggtgttgtattttctccacaggtctctcaaacaaattctaatgtggagtcagtgctcagtggttcagctagcatggctcaaaatctgcatgatgagtccctctccacaagccctcatggggctctccaccagcacgtgactgatattcagcttcatattcttaaaaataggatgtatggatgtgattctgtaaagcaaccaagaaatatagaggaacccagcaacatacctgtatcagagaag

SEQ ID NO: 9144 - DNA, 1639 bp, Homo sapiens
  source 1..1639: mol_type = unassigned DNA; mol_type = unassigned DNA
gcgcaggcgcaaagggccaggtgctggaggtgctgtcatggcctgcctcaacccggtgcctaaactctacagatctgtaattgaagatgtaattgaaggagttcggaatctatttgctgaagaaggtatagaggaacaagttttaaaagacttgaagcagctctgggaaaccaaggttttgcagtctaaagcaacagaagacttcttcagaaatagcatccaatcacctctgtttactcttcagttgccgcacagcttgcaccaaacattgcaatcgtcaacagcatcattagttattcctgctggtagaactcttccaagttttaccacagcagaactgggcacttcaaactccagtgcaaactttacttttcctggttatcccattcatgtaccagcaggtgtgacactacagactgtatctggtcacctttataaagtcaatgtaccaattatggtgacagagacttctggaagagcaggtattcttcagcatccaattcagcaagtatttcaacagcttggccagccttcagtaatacaaactagtgttccacaattgaatccatggtctcttcaagcaactactgaaaaatcacagagaattgaaaccgtgctacagcaacccgcaattctaccttctgggccagtagataggaaacacttagaaaatgccaccagtgatatacttgtatctcctggaaatgagcataaaatcgtgcctgaagctttgttgtgtcatcaggaaagttctcactatatcagtcttccaggtgttgtattttctccacaggtctctcaaacaaattctaatgtggagtcagtgctcagtggttcagctagcatggctcaaaatctgcatgatgagtccctctccacaagccctcatggggctctccaccagcacgtgactgatattcagcttcatattcttaaaaataggatgtatggatgtgattctgtaaagcaaccaagaaatatagaggaacccagcaacatacctgtatcagagaaggattctaattctcaggtggatttaagcattcgggttactgatgatgatattggtgaaataattcaagtagatggaagcggtgatacatcttccaatgaagaaataggaagtacaagagatgcagatgagaatgaatttctagggaatattgacgggggagatctgaaggtacctgaagaagaagctgacagtatttcaaatgaggattcagccacaaacagtagtgataatgaagaccctcaagtaaacattgtagaagaggaccctttaaattctggagatgatgttagtgaacaggatgtgccagacctgtttgacacggataatgttattgtctgtcagtatgataagattcatcgaagcaagaacaaatggaaattctatttgaaagatggtgttatgtgttttggagggagagactatgtatttgcaaaagccattggtgatgcagagtggtaaaccttgtgagctcagtacatctattttgtgaacatcagttggattatattgcatattgtgaattcatttttattttgaatatagtccagcacagagctgttcaaatttttagttcactgtatggaatttaataaaattataattcagatgcagatacaattacac

SEQ ID NO: 9145 - DNA, 473 bp, Homo sapiens
  source 1..473: mol_type = unassigned DNA; mol_type = unassigned DNA
aaagggccaggtgctggaggtgctgtcatggcctgcctcaacccggtgctctgggaaaccaaggttttgcagtctaaagcaacagaagacttcttcagaaatagcatccaatcacctctgtttactcttcagttgccgcacagcttgcaccaaacattgcaatcgtcaacaggttggataccattacatcattagttattcctgctggtagaactcttccaagttttaccacagcagaactgggcacttcaaactccagtgcaaactttacttttcctggttatcccattcatgtaccagcaggtgtgacactacagactgtatctggtcacctttataaagtcaatgtaccaattatggtgacagagacttctggaagagcaggtattcttcagcatccaattcagcaagtatttcaacagcttggccagccttcagtaatacaaactagtgttccacaattgaatccatgg

SEQ ID NO: 9146 - DNA, 600 bp, Homo sapiens
  source 1..600: mol_type = unassigned DNA; mol_type = unassigned DNA
aggtgctggaggtgctgtcatggcctgcctcaacccggtggggctggggctcttcttcacgtctgtgttggaggaagctgctgagggccagtagttcagcaggaagttgggccagccccgccaaaagaacaacctaaactctacagatctgtaattgaagatgtaattgaaggagttcggaatctatttgctgaagaaggtatagaggaacaagttttaaaagacttgaagcagctctgggaaaccaaggttttgcagtctaaagcaacagaagacttcttcagaaatagcatccaatcacctctgtttactcttcagttgccgcacagcttgcaccaaacattgcaatcgtcaacagcatcattagttattcctgctggtagaactcttccaagttttaccacagcagaactgggcacttcaaactccagtgcaaactttacttttcctggttatcccattcatgtaccagcaggtgtgacactacagactgtatctggtcacctttataaagtcaatgtaccaattatggtgacagagacttctggaagagcaggtattcttcagcatccaattcagcaagtatttcaacagcttggc

SEQ ID NO: 9147 - DNA, 532 bp, Homo sapiens
  source 1..532: mol_type = unassigned DNA; mol_type = unassigned DNA
agcggtgatacatcttccaatgaagaaataggaagtacaagagatgcagatgagaatgaatttctagggaatattgacgggggagatctgaaggtacctgaagaagaagctgacagtatttcaaatgaggattcagccacaaacagtagtgataatgaagaccctcaagtaaacattgtagaagaggaccctttaaattctggagatgatgttagtgaacaggatgtgccagacctgtttgacacggataatgttattgtctgtcagtatgataaggcattcccaagaaggacatcgtttaacacctaaactcatttaacaaaggatccgagaagaacagggacagtgtgggaagaaatcttcttgtgatggcatatttgcttcctatatttcttctggaatcatgttcgcttggcttcctgattaaaaacacagttttattgctctctgcactgccaaaccaataaatttacagaagagaaagctgtattccactgtaccccttgcagcatcaataaaactgacagccaaa

SEQ ID NO: 9148 - DNA, 1575 bp, Homo sapiens
  source 1..1575: mol_type = unassigned DNA; mol_type = unassigned DNA
aaaacgtgcccagtgtttccctccgagggcactgcgtgccgcgcaggcgcaaagggccaggtgctggaggtgctgtcatggcctgcctcaacccggtgctctgggaaaccaaggttttgcagtctaaagcaacagaagacttcttcagaaatagcatccaatcacctctgtttactcttcagttgccgcacagcttgcaccaaacattgcaatcgtcaacagcatcattagttattcctgctggtagaactcttccaagttttaccacagcagaactgggcacttcaaactccagtgcaaactttacttttcctggttatcccattcatgtaccagcaggtgtgacactacagactgtatctggtcacctttataaagtcaatgtaccaattatggtgacagagacttctggaagagcaggtattcttcagcatccaattcagcaagtatttcaacagcttggccagccttcagtaatacaaactagtgttccacaattgaatccatggtctcttcaagcaactactgaaaaatcacagagaattgaaaccgtgctacagcaacccgcaattctaccttctgggccagtagataggaaacacttagaaaatgccaccagtgatatacttgtatctcctggaaatgagcataaaatcgtgcctgaagctttgttgtgtcatcaggaaagttctcactatatcagtcttccaggtgttgtattttctccacaggtctctcaaacaaattctaatgtggagtcagtgctcagtggttcagctagcatggctcaaaatctgcatgatgagtccctctccacaagccctcatggggctctccaccagcacgtgactgatattcagcttcatattcttaaaaataggatgtatggatgtgattctgtaaagcaaccaagaaatatagaggaacccagcaacatacctgtatcagagaaggattctaattctcaggtggatttaagcattcgggttactgatgatgatattggtgaaataattcaagtagatggaagcggtgatacatcttccaatgaagaaataggaagtacaagagatgcagatgagaatgaatttctagggaatattgacgggggagatctgaaggtacctgaagaagaagctgacagtatttcaaatgaggattcagccacaaacagtagtgataatgaagaccctcaagtaaacattgtagaagaggaccctttaaattctggagatgatgttagtgaacaggatgtgccagacctgtttgacacggataatgttattgtctgtcagtatgataagattcatcgaagcaagaacaaatggaaattctatttgaaagatggtgttatgtgttttggagggagagactatgtatttgcaaaagccattggtgatgcagagtggtaaaccttgtgagctcagtacatctattttgtgaacatcagttggattatattgcatattgtgaattcatttttattttgaatatagtccagcacagagctgttcaaatttttagttcactgtatggaatttaataaaattataattcagatgcagatacaattac

SEQ ID NO: 9149 - DNA, 1351 bp, Homo sapiens
  source 1..1351: mol_type = unassigned DNA; mol_type = unassigned DNA
acgactgcgtgggtgagtcgtctataaaaactcatctctgcgcgtctcttcgccacattcgcttcctgctttcggtgtgtctgttgtgtcttgttgcgggcaccgcagtcgccgtgaagatggcgtctaccagccgtttggatgctcttccaagagtcacatgtccaaaccatccagatgcgattttagtggaggactacagagccggtgatatgatctgtcctgaatgtggcttggttgtaggtgaccgggttattgatgtgggatctgaatggcgaactttcagcaatgacaaagcaacaaaagatccatctcgagttggagattctcagaatcctcttctgagtgatggagatttgtctaccatgattggcaagggcacaggagctgcaagttttgacgaatttggcaattctaagtaccagaatcggagaacaatgagcagttctgatcgggcaatgatgaatgcattcaaagaaatcactaccatggcagacagaatcaatctacctcgaaatatagttgatcgaacaaataatttattcaagcaagtatatgaacagaagagcctgaagggaagagctaatgatgctatagcttctgcttgtctctatattgcctgtagacaagaaggggttcctaggacatttaaagaaatatgtgccgtatcacgaatttctaagaaagaaattggtcggtgttttaaacttattttgaaagcgctagaaaccagtgtggatttgattacaactggggacttcatgtccaggttctgttccaacctttgtcttcctaaacaagtacagatggcagctacacatatagcccgtaaagctgtggaactggacttggttcctgggaggagccccatctctgtggcagcggcagctatttacatggcctcacaggcatcagctgaaaagaggacccaaaaagaaattggagatattgctggtgttgctgatgttacaatcagacagtcctatagactgatctatcctcgagccccagatctgtttcctacagacttcaaatttgacaccccagtggacaaactaccacagctataaattgaggcagctaacgtcaaattcttgaatacaaaactttgcctgttgtacatagcctatacaaaatgctgggttgagcctttcatgaggaaaaacaaaagacatggtacgcattccagggctgaatactattgcttggcattctgtatgtatatactagtgaaacatatttaatgatttaaatttcttatcaaatttcttttgtagcaatctaggaaactgtattttggaagatatttgaaattatgtaattcttgaataaaacatttttcaaaactcaa

SEQ ID NO: 9150 - DNA, 770 bp, Homo sapiens
  source 1..770: mol_type = unassigned DNA; mol_type = unassigned DNA
gcgtctaccagccgtttggatgctcttccaagagtcacatgtccaaaccatccagatgcgattttagtggaggactacagagccggtgatatgatctgtcctgaatgtggcttggttgtaggtgaccgggttattgatgtgggatctgaatggcgaactttcagcaatgacaaagcaacaaaagatccatctcgagttggagattctcagaatcctcttctgagtgatggagatttgtctaccatgattggcaagggcacaggagctgcaagttttgacgaatttggcaattctaagtaccagaatcggagaacaatgagcagttctgatcgggcaatgatgaatgcattcaaagaaatcactaccatggcagacagaatcaatctacctcgaaatatagttgatcgaacaaataatttattcaagcaagtatatgaacagaagagcctgaagggaagagctaatgatgctatagcttctgcttgtctctatattgcctgtagacaagaaggggttcctaggacatttaaagaaatatgtgccgtatcacgaatttctaagaaagaaattggtcggtgttttaaacttattttgaaagcgctagaaaccagtgtggatttgattacaactggggacttcatgtccagaaattggagatattgctggtgttgctgatgttacaatcagacagtcctatagactgatctatcctcgagccccagatctgtttcctacagacttcaaatttgacaccccagtggacaaactac

SEQ ID NO: 9151 - DNA, 893 bp, Homo sapiens
  source 1..893: mol_type = unassigned DNA; mol_type = unassigned DNA
tgttgcgggcaccgcagtcgccgtgaagatggcgtctaccagccgtttggatgctcttccaagagtcacatgtccaaaccatccagatgcgattttagtggaggactacagagccggtgatatgatctgtcctgaatgtggcttggttgtaggtgaccgggttattgatgtgggatctgaatggcgaactttcagcaatgacaaagcaacaaaagatccatctcgagttggagattctcagaatcctcttctgagtgatggagatttgtctaccatgattggcaagggcacaggagctgcaagttttgacgaatttggcaattctaagtaccagaatcggagaacaatgagcagttctgatcgggcaatgatgaatgcattcaaagaaatcactaccatggcagacagaatcaatctacctcgaaatatagttgatcgaacaaataatttattcaagcaagtatatgaacagaagagcctgaagggaagagctaatgatgctatagcttctgcttgtctctatattgcctgtagacaagaaggggttcctaggacatttaaagtttgcagttacatgtgaatatgtgataatttgttcagtgttgctcactgacttccactaccaaagctcagtttagctgaagactatacttaaccctttattcatccaaaatatgtgccgtatcacgaatttctaagaaagaaattggtcggtgttttaaacttattttgaaagcgctagaaaccagtgtggatttgattacaactggggacttcatgtccaggttctgttccaacctttgtcttcctaaacaagtacagatggcagctacacatatagcccgtaaagctgtggaactggacttggttcctgggaggagccccatctctgt

SEQ ID NO: 9152 - DNA, 783 bp, Homo sapiens
  source 1..783: mol_type = unassigned DNA; mol_type = unassigned DNA
actcatctctgcgcgtctcttcgccacattcgcttcctgctttcggtgtgtctgttgtgtcttgttgcgggcaccgcagtcgccgtgaagatggcgtctaccagccgtttggatgctcttccaagagtcacatgtccaaaccatccagatgcgattttagtggaggactacagagccggtgatatgatctgtcctgaatgtgaccgggttattgatgtgggatctgaatggcgaactttcagcaatgacaaagcaacaaaagatccatctcgagttggagattctcagaatcctcttctgagtgatggagatttgtctaccatgattggcaagggcacaggagctgcaagttttgacgaatttggcaattctaagtaccagaatcggagaacaatgagcagttctgatcgggcaatgatgaatgcattcaaagaaatcactaccatggcagacagaatcaatctacctcgaaatatagttgatcgaacaaataatttattcaagcaagtatatgaacagaagagcctgaagggaagagctaatgatgctatagcttctgcttgtctctatattgcctgtagacaagaaggggttcctaggacatttaaagaaatatgtgccgtatcacgaatttctaagaaagaaattggtcggtgttttaaacttattttgaaagcgctagaaaccagtgtggatttgattacaactggggacttcatgtccaggttctgttccaacctttgtcttcctaaacaagtacagatggcagctacacatatagcc

SEQ ID NO: 9153 - DNA, 528 bp, Homo sapiens
  source 1..528: mol_type = unassigned DNA; mol_type = unassigned DNA
tctcccgacccgtagccctgctctgctacgactgcgtgggtgagtcgtctataaaaactcatctctgcgcgtctcttcgccacattcgcttcctgctttcggtgtgtctgttgtgtcttgttgcgggcaccgcagtcgccgtgaagatggcgtctaccagccggtgaccgggttattgatgtgggatctgaatggcgaactttcagcaatgacaaagcaacaaaagatccatctcgagttggagattctcagaatcctcttctgagtgatggagatttgtctaccatgattggcaagggcacaggagctgcaagttttgacgaatttggcaattctaagtaccagaatcggagaacaatgagcagttctgatcgggcaatgatgaatgcattcaaagaaatcactaccatggcagacagaatcaatctacctcgaaatatagttgtaagttcttgtctacctcctttaagccattctggcattgactttgcataatttaatgaacacatgaaattttgatattgcagc

SEQ ID NO: 9154 - DNA, 593 bp, Homo sapiens
  source 1..593: mol_type = unassigned DNA; mol_type = unassigned DNA
tttaagattaatgtgtcaaaaaaagatgaatgtgtcttctgcaaactgctttgttgttcaaaataaattgagctaattattaatatcacagataacaagtagcttttgaaacaatttcttgaatgataaattcaataactcaattctggactaaaggaaatcatcaagtcttaagttcagcagagcaacttctaccatccctcatttctatacttactgggttcagtgtactatttaaatctgttactaaagtagttaacaagtagaaaaatacagagagaaattgttctctgactagagaaataagtggcaaagagcacaaactggatggtaatgtaaatgctgcaggttattacgtttggatgctcttccaagagtcacatgtccaaaccatccagatgcgattttagtggaggactacagagccggtgatatgatctgtcctgaatgtggcttggttgtaggtgaccgggttattgatgtgggatctgaatggcgaactttcagcaatgacaaagcaacaaaagatccatctcgagttggagattctcagaatcctcttctgagtgatggagatttgtctaccatgattg

SEQ ID NO: 9155 - DNA, 516 bp, Homo sapiens
  source 1..516: mol_type = unassigned DNA; mol_type = unassigned DNA
ggctgggggcggggtaggtggtggccgtgagaaggtagccgtgagaaggtgggagaggaaggggtggttaaactattagggatgcaggctttggcaccactacgaagccagggttttctttgtgttttaactgtcagattgagagtagctctgttgtagcccctttgcagggttcccatgagacttttcctaggtagttacgttgactcgcttagcaacatagcaaattacagaaacggagtaagaacgtaagaaatcgcaaagcacgtgacgtatgggatctcactgttcttggcccttctcccgacccgtagccctgctctgctacgactgcgtggtttggatgctcttccaagagtcacatgtccaaaccatccagatgcgattttagtggaggactacagagccggtgatatgatctgtcctgaatgtggcttggttgtaggtgaccgggttattgatgtgggatctgaatggcgaactttcagcaatgacaaagcaacaaaagatccatct

SEQ ID NO: 9156 - DNA, 516 bp, Homo sapiens
  source 1..516: mol_type = unassigned DNA; mol_type = unassigned DNA
ggcatggtgatggtgagcccggagatgaatcctaccatctgctcggtgtttgaggcagagatagtcttactgttccatgccaccaccttccgacgaggattccaggtgacagtacacgtgggcaacgtacgtcagacggcagtggtggaaaagatccatgccaaggacaaactgcggacaggcgagaaggcagtggtacgtttccgcttcctgaaacacccagagtacctgaaggttcagagttccagtattgtaaccaagtattgtggcctattttccgtagttcaagtgagcagaatactgaggcctttcacgtgaaataggtagctaccctgtatttgaagagttggccacttgctagtggtcagaatagtaaggagcccacttctgtgccctggcagagatacagtgccagctacttaaagaagagtagaatttagagacaaaaggtaaagagcagctgatatgtaaattgcaaagcccaccccaggaataaagaaagaaaatcttacatca

SEQ ID NO: 9157 - DNA, 1394 bp, Homo sapiens
  source 1..1394: mol_type = unassigned DNA; mol_type = unassigned DNA
tgggatttgccgtgagggggaccagctggtggtgggccccacggatgatggctgcttcctggagctgagagtatgcagcatccagcgcaaccgctctgcctgtcgtgtgctgcgagctggtcaggctgctacactggcgcttggggactttgaccgtgcactgcttcgcaagggcatggtgatggtgagcccggagatgaatcctaccatctgctcggtgtttgaggcagagatagtcttactgttccatgccaccaccttccgacgaggattccaggtgacagtacacgtgggcaacgtacgtcagacggcagtggtggaaaagatccatgccaaggacaaactgcggacaggcgagaaggcagtggctagggagagaggggtgctgtctgccacttgctccctgccaactttctggagaggtgccaaacttggtgtggccaggaaagggcagtcctgagggagaagacaggattcagggcagtgctccgaagctgtgtgctcacctggttggctcatcaaacctggcaaccctgtggcctgtctgccggagctgactggatccactcatcaattcttcgtccccactactaagactgggcatgttttgctggtgtggtctctgcacttcaggaatggtcacaacagggggtagccctcaaaagcactcctttttctatacctcttctcaaggccatgtaagttgcccatctctacctggctgtggacaaaaggttatctgctcttggccatctggtggtggtggcggcccagagtctgaagaaatggcacagggacagtgaatggtagtgttgccaccctgtgctgaggcctgaggcctcttcctcagctttatctccctttccttcactcaagggccatttccccagtccctatctcccccatcccctcccggcttataggccccacaggtgctatttgttgtgctggcccaggcgtggggctaccaagcaaaggcttggcatataccaaaggccagctgcatgcccatcagtctggtctttttcctctgcggtcatgttggctttcatgctggatcaaatgttttactttcccagactggtggcatctgagttccccatcctaccactctcaccccactttcctgccccacctaaaccctcgttttagtaatttgtagtgactgttcccttccctctgttgcagggaaccaggaggaaagggaaagatgttgccatatttcctactctttaggcatggactctcctttccctttgttagtgtcctgggttcccatggactcagggatttgttggctaaggtttctctgtgcatatatatatatatacatatgtatatatatttaaatacacatatatattgtacagaataaaaatgttttattgaataca

SEQ ID NO: 9158 - DNA, 1850 bp, Homo sapiens
  source 1..1850: mol_type = unassigned DNA; mol_type = unassigned DNA
tgggatttgccgtgagggggaccagctggtggtgggccccacggatgatggctgcttcctggagctgagagtatgcagcatccagcgcaaccgctctgcctgtcgtgtgctgcgagctggtcaggctgctacactggcgcttggggactttgaccgtgcactgcttcgcaagggcatggtgatggtgagcccggagatgaatcctaccatctgctcggtgtttgaggcagagatagtcttactgttccatgccaccaccttccgacgaggattccaggtgacagtacacgtgggcaacgtacgtcagacggcagtggtggaaaagatccatgccaaggtgagagggacctggccttccatttctccagaggtcagaaaagagggaggcctgccccagactggcagagaactccttgatcccacaatgggaataaaaccccacttagggtgggtagcggcctgataggcctctggagggtggagagccacggctggcagagaatgggacagaaggcactggccaggggagtgaccacttatttgctgcaggacaaactgcggacaggcgagaaggcagtggtacgtttccgcttcctgaaacacccagagtacctgaaggtgggcgccaaactgctgttccgggagggtgtcaccaagggcatcggccatgtcactgatgtacaagccattacagcaggagaagcccaggccaacatgggcttctgaacccttcaggcagggacagttctattgctgtccctacaatatataaggtgacttctggccatgctgccctgccattggcggctctgtgtgttaataggctagggagagaggggtgctgtctgccacttgctccctgccaactttctggagaggtgccaaacttggtgtggccaggaaagggcagtcctgagggagaagacaggattcagggcagtgctccgaagctgtgtgctcacctggttggctcatcaaacctggcaaccctgtggcctgtctgccggagctgactggatccactcatcaattcttcgtccccactactaagactgggcatgttttgctggtgtggtctctgcacttcaggaatggtcacaacagggggtagccctcaaaagcactcctttttctatacctcttctcaaggccatgtaagttgcccatctctacctggctgtggacaaaaggttatctgctcttggccatctggtggtggtggcggcccagagtctgaagaaatggcacagggacagtgaatggtagtgttgccaccctgtgctgaggcctgaggcctcttcctcagctttatctccctttccttcactcaagggccatttccccagtccctatctcccccatcccctcccggcttataggccccacaggtgctatttgttgtgctggcccaggcgtggggctaccaagcaaaggcttggcatataccaaaggccagctgcatgcccatcagtctggtctttttcctctgcggtcatgttggctttcatgctggatcaaatgttttactttcccagactggtggcatctgagttccccatcctaccactctcaccccactttcctgccccacctaaaccctcgttttagtaatttgtagtgactgttcccttccctctgttgcagggaaccaggaggaaagggaaagatgttgccatatttcctactctttaggcatggactctcctttccctttgttagtgtcctgggttcccatggactcagggatttgttggctaaggtttctctgtgcatatatatatatatacatatgtatatatatttaaatacacatatatattgtacagaataaaaatgttttattgaataca

SEQ ID NO: 9159 - DNA, 2816 bp, Homo sapiens
  source 1..2816: mol_type = unassigned DNA; mol_type = unassigned DNA
gtgggaattgaggggaagtagggattgggtctgtacagtgtatggtaactgctcactgtttcttttcaggctgaagatggaaacattgaatataaattgaagctggtgaatccatcccagtaccgctttgagcacctggtgacacaaatgaagtggcggctccaggagggacgtggtgaggccgtctaccagattggggtagaggacaatgggctgctggtggggctggctgaggaggaaatgcgagcttcgctcaagaccctgcaccggatggcagagaaggttggggcagacataaccgttcttcgagagcgagaagtggattatgatagcgacatgccccggaagatcaccgaggtgctagtacgaaaggtccctgacaaccaacagttcctagacctccgtgtggccgtcctggggaatgtggactctgggaagtcaactctgcttggagtcctgacccagggagagctggacaatgggcggggccgggctcggctcaaccttttccgccacctgcatgagattcagtctggccgaacctccagcatcagcttcgagatcctgggctttaacagcaagggagaggtggtgaattacagcgactcacggacagcagaagagatctgtgagagcagctccaagatgatcaccttcatcgacctggcaggccaccataagtacctacacaccaccatctttggcctcacatcatactgccccgactgcgccctgctcctcgtcagtgccaacactgggattgctggcaccacaagggaacatctggggctggccctggccctgaaagtgcccttcttcatcgtggtcagcaagatcgacctatgtgccaagaccacagtggagaggacagtacgccagctggagcgggtcctcaagcagcctggctgccacaaggtccccatgctggtcacctctgaggatgatgccgtcactgctgcccagcagtttgctcagtcacccaatgtcacccccatcttcacattgtccagtgtgtctggagagagtctggacctcctcaaagtctttctgaatattctgccgccactcaccaacagcaaagagcaggaggaactcatgcagcagctgacggagttccaggtggatgaaatctacacagtaccagaggtggggactgttgttggaggaacactttccagtgggatttgccgtgagggggaccagctggtggtgggccccacggatgatggctgcttcctggagctgagagtatgcagcatccagcgcaaccgctctgcctgtcgtgtgctgcgagctggtcaggctgctacactggcgcttggggactttgaccgtgcactgcttcgcaagggcatggtgatggtgagcccggagatgaatcctaccatctgctcggtgtttgaggcagagatagtcttactgttccatgccaccaccttccgacgaggattccaggtgacagtacacgtgggcaacgtacgtcagacggcagtggtggaaaagatccatgccaaggacaaactgcggacaggcgagaaggcagtggtacgtttccgcttcctgaaacacccagagtacctgaaggtgggcgccaaactgctgttccgggagggtgtcaccaagggcatcggccatgtcactgatgtacaagccattacagcaggagaagcccaggccaacatgggcttctgaacccttcaggcagggacagttctattgctgtccctacaatatataaggtgacttctggccatgctgccctgccattggcggctctgtgtgttaataggctagggagagaggggtgctgtctgccacttgctccctgccaactttctggagaggtgccaaacttggtgtggccaggaaagggcagtcctgagggagaagacaggattcagggcagtgctccgaagctgtgtgctcacctggttggctcatcaaacctggcaaccctgtggcctgtctgccggagctgactggatccactcatcaattcttcgtccccactactaagactgggcatgttttgctggtgtggtctctgcacttcaggaatggtcacaacagggggtagccctcaaaagcactcctttttctatacctcttctcaaggccatgtaagttgcccatctctacctggctgtggacaaaaggttatctgctcttggccatctggtggtggtggcggcccagagtctgaagaaatggcacagggacagtgaatggtagtgttgccaccctgtgctgaggcctgaggcctcttcctcagctttatctccctttccttcactcaagggccatttccccagtccctatctcccccatcccctcccggcttataggccccacaggtgctatttgttgtgctggcccaggcgtggggctaccaagcaaaggcttggcatataccaaaggccagctgcatgcccatcagtctggtctttttcctctgcggtcatgttggctttcatgctggatcaaatgttttactttcccagactggtggcatctgagttccccatcctaccactctcaccccactttcctgccccacctaaaccctcgttttagtaatttgtagtgactgttcccttccctctgttgcagggaaccaggaggaaagggaaagatgttgccatatttcctactctttaggcatggactctcctttccctttgttagtgtcctgggttcccatggactcagggatttgttggctaaggtttctctgtgcatatatatatatatacatatgtatatatatttaaatacacatatatattgtacagaataaaaatgttttattgaataca

SEQ ID NO: 9160 - DNA, 2933 bp, Homo sapiens
  source 1..2933: mol_type = unassigned DNA
atggactcgcgggtatcggagctgttcggcggctgctgccggcccggagggggcccggccgtgggcggaaccctcaaggctaggggggccggcagcagcagcggctgcggggggccaaagggaaagaagaagaacggaaggaacagagggggcaaagccaacaaccccccgtatttgccccccgaggctgaagatggaaacattgaatataaattgaagctggtgaatccatcccagtaccgctttgagcacctggtgacacaaatgaagtggcggctccaggagggacgtggtgaggccgtctaccagattggggtagaggacaatgggctgctggtggggctggctgaggaggaaatgcgagcttcgctcaagaccctgcaccggatggcagagaaggttggggcagacataaccgttcttcgagagcgagaagtggattatgatagcgacatgccccggaagatcaccgaggtgctagtacgaaaggtccctgacaaccaacagttcctagacctccgtgtggccgtcctggggaatgtggactctgggaagtcaactctgcttggagtcctgacccagggagagctggacaatgggcggggccgggctcggctcaaccttttccgccacctgcatgagattcagtctggccgaacctccagcatcagcttcgagatcctgggctttaacagcaagggagaggtggtgaattacagcgactcacggacagcagaagagatctgtgagagcagctccaagatgatcaccttcatcgacctggcaggccaccataagtacctacacaccaccatctttggcctcacatcatactgccccgactgcgccctgctcctcgtcagtgccaacactgggattgctggcaccacaagggaacatctggggctggccctggccctgaaagtgcccttcttcatcgtggtcagcaagatcgacctatgtgccaagaccacagtggagaggacagtacgccagctggagcgggtcctcaagcagcctggctgccacaaggtccccatgctggtcacctctgaggatgatgccgtcactgctgcccagcagtttgctcagtcacccaatgtcacccccatcttcacattgtccagtgtgtctggagagagtctggacctcctcaaagtctttctgaatattctgccgccactcaccaacagcaaagagcaggaggaactcatgcagcagctgacggagttccaggtggatgaaatctacacagtaccagaggtggggactgttgttggaggaacactttccagtgggatttgccgtgagggggaccagctggtggtgggccccacggatgatggctgcttcctggagctgagagtatgcagcatccagcgcaaccgctctgcctgtcgtgtgctgcgagctggtcaggctgctacactggcgcttggggactttgaccgtgcactgcttcgcaagggcatggtgatggtgagcccggagatgaatcctaccatctgctcggtgtttgaggcagagatagtcttactgttccatgccaccaccttccgacgaggattccaggtgacagtacacgtgggcaacgtacgtcagacggcagtggtggaaaagatccatgccaaggacaaactgcggacaggcgagaaggcagtggtacgtttccgcttcctgaaacacccagagtacctgaaggtgggcgccaaactgctgttccgggagggtgtcaccaagggcatcggccatgtcactgatgtacaagccattacagcaggagaagcccaggccaacatgggcttctgaacccttcaggcagggacagttctattgctgtccctacaatatataaggtgacttctggccatgctgccctgccattggcggctctgtgtgttaataggctagggagagaggggtgctgtctgccacttgctccctgccaactttctggagaggtgccaaacttggtgtggccaggaaagggcagtcctgagggagaagacaggattcagggcagtgctccgaagctgtgtgctcacctggttggctcatcaaacctggcaaccctgtggcctgtctgccggagctgactggatccactcatcaattcttcgtccccactactaagactgggcatgttttgctggtgtggtctctgcacttcaggaatggtcacaacagggggtagccctcaaaagcactcctttttctatacctcttctcaaggccatgtaagttgcccatctctacctggctgtggacaaaaggttatctgctcttggccatctggtggtggtggcggcccagagtctgaagaaatggcacagggacagtgaatggtagtgttgccaccctgtgctgaggcctgaggcctcttcctcagctttatctccctttccttcactcaagggccatttccccagtccctatctcccccatcccctcccggcttataggccccacaggtgctatttgttgtgctggcccaggcgtggggctaccaagcaaaggcttggcatataccaaaggccagctgcatgcccatcagtctggtctttttcctctgcggtcatgttggctttcatgctggatcaaatgttttactttcccagactggtggcatctgagttccccatcctaccactctcaccccactttcctgccccacctaaaccctcgttttagtaatttgtagtgactgttcccttccctctgttgcagggaaccaggaggaaagggaaagatgttgccatatttcctactctttaggcatggactctcctttccctttgttagtgtcctgggttcccatggactcagggatttgttggctaaggtttctctgtgcatatatatatatatacatatgtatatatatttaaatacacatatatattgtacagaataaaaatgttttattgaataca

SEQ ID NO: 9161 - DNA, 721 bp, Homo sapiens
  source 1..721: mol_type = unassigned DNA
gtggatgaaatctacacagtaccagaggtggggactgttgttggaggaacactttccagattaggctttcactatcagaagagctggagaacggtagtctgttggctttggagggaagaaacagtattgctgcctattggggaatctccaggcccctgagagagaagtgtgggtcttgagctccaggaagaaaactagagtgtattcaactgacttcatctcacacagggaaatgagagacgtcacttaagactcttctttctttctttctttcttttttttgagacagagtctcgctctgttgcccaggctggattgcagtggagcgatcttggctcactgcaacctctgcctcctgggttccagcaattctcctgcctcagccttgagtagctggaattacaggcgcctaccaccatgcccggctaatttttgtatttttagtagagatggggtcgtcaccatattggccaggctggtcttgaattcctgacctcaagtgatccacctgcctcagcctccccaagtgctaggattacaggtgtgagccaacgcggctggcctaagactctgcaaagcagagaatgaaacccaaggggataacttgctccttcagtgattaggtgttcggtgttgttaaaccagcaagtgtctctctgtccaccatcactgctggccttttatgaaattagtcttctgattctgaactctggcagtgagc

SEQ ID NO: 9162 - DNA, 946 bp, Homo sapiens
  source 1..946: mol_type = unassigned DNA
cccagggaggaggggcacgggaggagaacacctctttcaggtcccgggaccccagggaggaagggcagagactggactctcaggctgaagatggaaacattgaatataaattgaagctggtgaatccatcccagtaccgctttgagcacctggtgacacaaatgaagtggcggctccaggagggacgtggtgaggccgtctaccagattggggtagaggacaatgggctgctggtggggctggctgaggaggaaatgcgagcttcgctcaagaccctgcaccggatggcagagaaggttggggcagacataaccgttcttcgagagcgagaagtggattatgatagcgacatgccccggaagatcaccgaggtgctagtacgaaaggtccctgacaaccaacagttcctagacctccgtgtggccgtcctggggaatgtggactctgggaagtcaactctgcttggagtcctgacccagggagagctggacaatgggcggggccgggctcggctcaaccttttccgccacctgcatgagattcagtctggccgaacctccagcatcagcttcgagatcctgggctttaacagcaagggagaggtggtgaattacagcgactcacggacagcagaagagatctgtgagagcagctccaagatgatcaccttcatcgacctggcaggccaccataagtacctacacaccaccatctttggcctcacatcatactgccccgactgcgccctgctcctcgtcagtgccaacactgggattgctggcaccacaagggaacatctggggctggccctggccctgaaagtgcccttcttcatcgtggtcagcaagatcgacctatgtgccaagaccacagtggagaggacagtacgccagctggagcgggtcctcaagcagcctggctgccacaaggtccccatgctggtcac

SEQ ID NO: 9163 - DNA, 898 bp, Homo sapiens
  source 1..898: mol_type = unassigned DNA
ggttggggcagacataaccgttcttcgagagcgagaagtggattatgatagcgacatgccccggaagatcaccgaggtgctagtacgaaaggtccctgacaaccaacagttcctagacctccgtgtggccgtcctggggaatgtggactctgggaagtcaactctgcttggagtcctgacccagggagagctggacaatgggcggggccgggctcggctcaaccttttccgccacctgcatgagattcagtctggccgaacctccagcatcagcttcgagatcctgggctttaacagcaagggagaggtgcatgggatcaatgggacccaatggggccagactctgaggatgggatggtagtagtgaaggacataggatgggggtagagtgtggagactttttgaaatagtatagatgaatgccctgaggggactgtgaacaagctctgcccctcttaggaaatcaatggggaatcaactaaattaaataaaaaatggggtcaagattaagaggcagggtcacccagggaatggtttaggtcctggcaactctgaaggggttggaagggctggcaggaggcactgagggccctgggccctgggccaggtggtgaattacagcgactcacggacagcagaagagatctgtgagagcagctccaagatgatcaccttcatcgacctggcaggccaccataagtacctacacaccaccatctttggcctcacatcatactgccccgactgcgccctgctcctcgtcagtgccaacactgggattgctggcaccacaagggaacatctggggctggccctggccctgaaagtgcccttcttcatcgtggtcagcaagatcgacctatgtgccaagaccacagtggagaggacagtacgccag

SEQ ID NO: 9164 - DNA, 681 bp, Homo sapiens
  source 1..681: mol_type = unassigned DNA
atggactcgcgggtatcggagctgttcggcggctgctgccggcccggagggggcccggccgtgggcggaaccctcaaggctaggggggccggcagcagcagcggctgcggggggccaaagggaaagaagaagaacggaaggaacagagggggcaaagccaacaaccccccgtatttgccccccgaggctgaagatggaaacattgaatataaataccgctttgagcacctggtgacacaaatgaagtggcggctccaggagggacgtggtgaggccgtctaccagattggggtagaggacaatgggctgctggtggggctggctgaggaggaaatgcgagcttcgctcaagaccctgcaccggatggcagagaaggttggggcagacataaccgttcttcgagagcgagaagtggattatgatagcgacatgccccggaagatcaccgaggtgctagtacgaaaggtccctgacaaccaacagttcctagacctccgtgtggccgtcctggggaatgtggactctgggaagtcaactctgcttggagtcctgacccagggagagctggacaatgggcggggccgggctcggctcaaccttttccgccacctgcatgagattcagtctggccgaacctccagcatcagcttcgagatcctgggctttaacagcaagggagag

SEQ ID NO: 9165 - DNA, 2830 bp, Homo sapiens
  source 1..2830: mol_type = unassigned DNA; mol_type = unassigned DNA
gtttcctagaccagtgacaaagaaaggttttaacagcctgggcacagaggagacatagacttctgggaaaagcaggctgaagatggaaacattgaatataaattgaagctggtgaatccatcccagtaccgctttgagcacctggtgacacaaatgaagtggcggctccaggagggacgtggtgaggccgtctaccagattggggtagaggacaatgggctgctggtggggctggctgaggaggaaatgcgagcttcgctcaagaccctgcaccggatggcagagaaggttggggcagacataaccgttcttcgagagcgagaagtggattatgatagcgacatgccccggaagatcaccgaggtgctagtacgaaaggtccctgacaaccaacagttcctagacctccgtgtggccgtcctggggaatgtggactctgggaagtcaactctgcttggagtcctgacccagggagagctggacaatgggcggggccgggctcggctcaaccttttccgccacctgcatgagattcagtctggccgaacctccagcatcagcttcgagatcctgggctttaacagcaagggagaggtggtgaattacagcgactcacggacagcagaagagatctgtgagagcagctccaagatgatcaccttcatcgacctggcaggccaccataagtacctacacaccaccatctttggcctcacatcatactgccccgactgcgccctgctcctcgtcagtgccaacactgggattgctggcaccacaagggaacatctggggctggccctggccctgaaagtgcccttcttcatcgtggtcagcaagatcgacctatgtgccaagaccacagtggagaggacagtacgccagctggagcgggtcctcaagcagcctggctgccacaaggtccccatgctggtcacctctgaggatgatgccgtcactgctgcccagcagtttgctcagtcacccaatgtcacccccatcttcacattgtccagtgtgtctggagagagtctggacctcctcaaagtctttctgaatattctgccgccactcaccaacagcaaagagcaggaggaactcatgcagcagctgacggagttccaggtggatgaaatctacacagtaccagaggtggggactgttgttggaggaacactttccagtgggatttgccgtgagggggaccagctggtggtgggccccacggatgatggctgcttcctggagctgagagtatgcagcatccagcgcaaccgctctgcctgtcgtgtgctgcgagctggtcaggctgctacactggcgcttggggactttgaccgtgcactgcttcgcaagggcatggtgatggtgagcccggagatgaatcctaccatctgctcggtgtttgaggcagagatagtcttactgttccatgccaccaccttccgacgaggattccaggtgacagtacacgtgggcaacgtacgtcagacggcagtggtggaaaagatccatgccaaggacaaactgcggacaggcgagaaggcagtggtacgtttccgcttcctgaaacacccagagtacctgaaggtgggcgccaaactgctgttccgggagggtgtcaccaagggcatcggccatgtcactgatgtacaagccattacagcaggagaagcccaggccaacatgggcttctgaacccttcaggcagggacagttctattgctgtccctacaatatataaggtgacttctggccatgctgccctgccattggcggctctgtgtgttaataggctagggagagaggggtgctgtctgccacttgctccctgccaactttctggagaggtgccaaacttggtgtggccaggaaagggcagtcctgagggagaagacaggattcagggcagtgctccgaagctgtgtgctcacctggttggctcatcaaacctggcaaccctgtggcctgtctgccggagctgactggatccactcatcaattcttcgtccccactactaagactgggcatgttttgctggtgtggtctctgcacttcaggaatggtcacaacagggggtagccctcaaaagcactcctttttctatacctcttctcaaggccatgtaagttgcccatctctacctggctgtggacaaaaggttatctgctcttggccatctggtggtggtggcggcccagagtctgaagaaatggcacagggacagtgaatggtagtgttgccaccctgtgctgaggcctgaggcctcttcctcagctttatctccctttccttcactcaagggccatttccccagtccctatctcccccatcccctcccggcttataggccccacaggtgctatttgttgtgctggcccaggcgtggggctaccaagcaaaggcttggcatataccaaaggccagctgcatgcccatcagtctggtctttttcctctgcggtcatgttggctttcatgctggatcaaatgttttactttcccagactggtggcatctgagttccccatcctaccactctcaccccactttcctgccccacctaaaccctcgttttagtaatttgtagtgactgttcccttccctctgttgcagggaaccaggaggaaagggaaagatgttgccatatttcctactctttaggcatggactctcctttccctttgttagtgtcctgggttcccatggactcagggatttgttggctaaggtttctctgtgcatatatatatatatacatatgtatatatatttaaatacacatatatattgtacagaataaaaatgttttattgaatacactgtgctt

SEQ ID NO: 9166 - DNA, 470 bp, Homo sapiens
  source 1..470: mol_type = unassigned DNA
ggaaaacagctacggagggaaggatgagaagcaatgcaaagtgacatataccatcctggccacagcttcccaagttgggtcctttgctgggtgcactcatgtggccatgagggacatctcagagagactgcagagatcagaaaaactcatcaaaatggagacctgcaaataagaggaggaagagggaggagagagagcacagaaatcttccaagtggcttcagtgacagaaggggaggagtcaccacctgccatttgcatggaagtgtttttgttcctctggtttattgctcctatttatgcatgcgtgtgcaggatcttcaaaatccaggtaagaaacacagtgaagaactcatctactgcaagcttggccccatccatcagtaccagtgaagagagacaaatcaggatagaaagacatcactaccatctctatggtcagtgatattatggactaatgaataaaaataa

SEQ ID NO: 9167 - DNA, 2715 bp, Homo sapiens
  source 1..2715: mol_type = unassigned DNA
acacagtgatttctgttatggcgattgggcggctgcagagaccaggactcagttcccctgccctagtctgagcctagtgggtgggactcagctcagagtcagttttccagaagcaggtttcagtgcagagttttcctacacttttcctgcgctagagcagcgagcagcctggaacagacccaggcggaggacacctgtgggggagggagcgcctggaggagcttagagaccccagccgggcgtgatctcaccatgtgcggatttgcgaggcgcgccctggagctgctagagatccggaagcacagccccgaggtgtgcgaagccaccaaacatcccagttaccagtgtccttgaattgatagtggcttctgtttgtcagtctcatataagaactacagctcatcaggaggagatcgcagcagggtaagagacaccaacaccatgttctgcacgaagctcaaggatctcaagatcacaggagagtgtcctttctccttactggcaccaggtcaagttcctaacgagtcttcagaggaggcagcaggaagctcagagagctgcaaagcaaccgtgcccatctgtcaagacattcctgagaagaacatacaagaaagtcttcctcaaagaaaaaccagtcggagccgagtctatcttcacactttggcagagagtatttgcaaactgattttcccagagtttgaacggctgaatgttgcacttcagagaacattggcaaagcacaaaataaaagaaagcaggaaatctttggaaagagaagactttgaaaaaacaattgcagagcaagcagttgcagcaggagttccagtggaggttatcaaagaatctcttggtgaagaggtttttaaaatatgttacgaggaagatgaaaacatccttggggtggttggaggcacccttaaagattttttaaacagcttcagtacccttctgaaacagagcagccattgccaagaagcaggaaaaaggggcaggcttgaggacgcctccattctatgcctggataaggaggatgattttctacatgtttactacttcttccctaagagaaccacctccctgattcttcccggcatcataaaggcagctgctcacgtattatatgaaacggaagtggaagtgtcgttaatgcctccctgcttccataatgattgcagcgagtttgtgaatcagccctacttgttgtactccgttcacatgaaaagcaccaagccatccctgtcccccagcaaaccccagtcctcgctggtgattcccacatcgctattctgcaagacatttccattccatttcatgtttgacaaagatatgacaattctgcaatttggcaatggcatcagaaggctgatgaacaggagagactttcaaggaaagcctaattttgaagaatactttgaaattctgactccaaaaatcaaccagacgtttagcgggatcatgactatgttgaatatgcagtttgttgtacgagtgaggagatgggacaactctgtgaaaaaatcttcaagggttatggacctcaaaggccaaatgatctacattgttgaatccagtgcaatcttgtttttggggtcaccctgtgtggacagattagaagattttacaggacgagggctctacctctcagacatcccaattcacaatgcactgagggatgtggtcttaataggggaacaagcccgagctcaagatggcctgaagaagaggctggggaagctgaaggctacccttgagcaagcccaccaagccctggaggaggagaagaaaaagacagtagaccttctgtgctccatatttccctgtgaggttgctcagcagctgtggcaagggcaagttgtgcaagccaagaagttcagtaatgtcaccatgctcttctcagacatcgttgggttcactgccatctgctcccagtgctcaccgctgcaggtcatcaccatgctcaatgcactgtacactcgcttcgaccagcagtgtggagagctggatgtctacaaggtggagaccattggcgatgcctattgtgtagctgggggattacacaaagagagtgatactcatgctgttcagatagcgctgatggccctgaagatgatggagctctctgatgaagttatgtctccccatggagaacctatcaagatgcgaattggactgcactctggatcagtttttgctggcgtcgttggagttaaaatgccccgttactgtctttttggaaacaatgtcactctggctaacaaatttgagtcctgcagtgtaccacgaaaaatcaatgtcagcccaacaacttacagattactcaaagactgtcctggtttcgtgtttacccctcgatcaagggaggaacttccaccaaacttccctagtgaaatccccggaatctgccattttctggatgcttaccaacaaggaacaaactcaaaaccatgcttccaaaagaaagatgtggaagatggcaatgccaattttttaggcaaagcatcaggaatagattagcaacctatatacctatttataagtctttggggtttgactcattgaagatgtgtagagcctctgaaagcactttagggattgtagatggctaacaagcagtattaaaatttcaggagccaagtcacaatctttctcctgtttaacatgacaaaatgtatgtactcacttcagtacttcagctcttcaagaaaaaaaaaaaaa

SEQ ID NO: 9168 - DNA, 2992 bp, Homo sapiens
  source 1..2992: mol_type = unassigned DNA; mol_type = unassigned DNA
ttatggcgattgggcggctgcagagaccaggactcagttcccctgccctagtctgagcctagtgggtgggactcagctcagagtcagttttccagaagcaggtttcagtgcagagttttcctacacttttcctgcgctagagcagcgagcagcctggaacagacccaggcggaggacacctgtgggggagggagcgcctggaggagcttagagaccccagccgggcgtgatctcaccatgtgcggatttgcgaggcgcgccctggagctgctagagatccggaagcacagccccgaggtgtgcgaagccaccaagactgcggctcttggagaaagcgtgagcagggggccaccgcggtctccgcgcctgtctgcaccctgtcgcctgagctgcctgacagtgacaatgacatcccagttaccagtgtccttgaattgatagtggcttctgtttgtcagtctcatataagaactacagctcatcaggaggagatcgcagcagggtaagagacaccaacaccatgttctgcacgaagctcaaggatctcaagatcacaggagagtgtcctttctccttactggcaccaggtcaagttcctaacgagtcttcagaggaggcagcaggaagctcagagagctgcaaagcaaccgtgcccatctgtcaagacattcctgagaagaacatacaagaaagtcttcctcaaagaaaaaccagtcggagccgagtctatcttcacactttggcagagagtatttgcaaactgattttcccagagtttgaacggctgaatgttgcacttcagagaacattggcaaagcacaaaataaaagaaagcaggaaatctttggaaagagaagactttgaaaaaacaattgcagagcaagcagttgcagcaggagttccagtggaggttatcaaagaatctcttggtgaagaggtttttaaaatatgttacgaggaagatgaaaacatccttggggtggttggaggcacccttaaagattttttaaacagcttcagtacccttctgaaacagagcagccattgccaagaagcaggaaaaaggggcaggcttgaggacgcctccattctatgcctggataaggaggatgattttctacatgtttactacttcttccctaagagaaccacctccctgattcttcccggcatcataaaggcagctgctcacgtattatatgaaacggaagtggaagtgtcgttaatgcctccctgcttccataatgattgcagcgagtttgtgaatcagccctacttgttgtactccgttcacatgaaaagcaccaagccatccctgtcccccagcaaaccccagtcctcgctggtgattcccacatcgctattctgcaagacatttccattccatttcatgtttgacaaagatatgacaattctgcaatttggcaatggcatcagaaggctgatgaacaggagagactttcaaggaaagcctaattttgaagaatactttgaaattctgactccaaaaatcaaccagacgtttagcgggatcatgactatgttgaatatgcagtttgttgtacgagtgaggagatgggacaactctgtgaaaaaatcttcaagggttatggacctcaaaggccaaatgatctacattgttgaatccagtgcaatcttgtttttggggtcaccctgtgtggacagattagaagattttacaggacgagggctctacctctcagacatcccaattcacaatgcactgagggatgtggtcttaataggggaacaagcccgagctcaagatggcctgaagaagaggctggggaagctgaaggctacccttgagcaagcccaccaagccctggaggaggagaagaaaaagacagtagaccttctgtgctccatatttccctgtgaggttgctcagcagctgtggcaagggcaagttgtgcaagccaagaagttcagtaatgtcaccatgctcttctcagacatcgttgggttcactgccatctgctcccagtgctcaccgctgcaggtcatcaccatgctcaatgcactgtacactcgcttcgaccagcagtgtggagagctggatgtctacaaggtggagaccattggcgatgcctattgtgtagctgggggattacacaaagagagtgatactcatgctgttcagatagcgctgatggccctgaagatgatggagctctctgatgaagttatgtctccccatggagaacctatcaagatgcgaattggactgcactctggatcagtttttgctggcgtcgttggagttaaaatgccccgttactgtctttttggaaacaatgtcactctggctaacaaatttgagtcctgcagtgtaccacgaaaaatcaatgtcagcccaacaacttacagattactcaaagactgtcctggtttcgtgtttacccctcgatcaagggaggaacttccaccaaacttccctagtgaaatccccggaatctgccattttctggatgcttaccaacaaggaacaaactcaaaaccatgcttccaaaagaaagatgtggaagatggcaatgccaattttttaggcaaagcatcaggaatagattagcaacctatatacctatttataagtctttggggtttgactcattgaagatgtgtagagcctctgaaagcactttagggattgtagatggctaacaagcagtattaaaatttcaggagccaagtcacaatctttctcctgtttaacatgacaaaatgtatgtactcacttcagtacttcagctcttcaagaaaaaaaaaaaaaaccttaaaaagctacttttgtgggagtatttctattatataaccagcacttactacctgtactcaaaattcagcaccttgtacatatatcagataattgtagtcaattgtacaaactgatggagtcacctgcaatctcatatcctggtggaatgccatggttattaaagtgtgtttgtgatagtgtcgtcaaaaaaaa

SEQ ID NO: 9169 - DNA, 1540 bp, Homo sapiens
  source 1..1540: mol_type = unassigned DNA; mol_type = unassigned DNA
tttcagtgcagagttttcctacacttttcctgcgctagagcagcgagcagcctggaacagacccaggcggaggacacctgtgggggagggagcgcctggaggagcttagagaccccagccgggcgtgatctcaccatgtgcggatttgcgaggcgcgccctggagctgctagagatccggaagcacagccccgaggtgtgcgaagccaccaaacatcccagttaccagtgtccttgaattgatagtggcttctgtttgtcagtctcatataagaactacagctcatcaggaggagatcgcagcagggtaagagacaccaacaccatgttctgcacgaagctcaaggatctcaagatcacaggagagtgtcctttctccttactggcaccaggtcaagttcctaacgagtcttcagaggaggcagcaggaagctcagagagctgcaaagcaaccgtgcccatctgtcaagacattcctgagaagaacatacaagaaagtcttcctcaaagaaaaaccagtcggagccgagtctatcttcacactttggcagagagtatttgcaaactgattttcccagagtttgaacggctgaatgttgcacttcagagaacattggcaaagcacaaaataaaagaaagcaggaaatctttggaaagagaagactttgaaaaaacaattgcagagcaagcagttgcagcaggagttccagtggaggttatcaaagaatctcttggtgaagaggtttttaaaatatgttacgaggaagatgaaaacatccttggggtggttggaggcacccttaaagattttttaaacagcttcagtacccttctgaaacagagcagccattgccaagaagcaggaaaaaggggcaggcttgaggacgcctccattctatgcctggataaggaggatgattttctacatgtttactacttcttccctaagagaaccacctccctgattcttcccggcatcataaaggcagctgctcacgtattatatgaaacggaagtggaagtgtcgttaatgcctccctgcttccataatgattgcagcgagtttgtgaatcagccctacttgttgtactccgttcacatgaaaagcaccaagccatccctgtcccccagcaaaccccagtcctcgctggtgattcccacatcgctattctgcaagacatttccattccatttcatgtttgacaaagatatgacaattctgcaatttggcaatggcatcagaaggctgatgaacaggagagactttcaaggaaagcctaattttgaagaatactttgaaattctgactccaaaaatcaaccagacgtttagcgggatcatgactatgttgaatatgcagtttgttgtacgagtgaggagatgggacaactctgtgaaaaaatcttcaagggtaaggaaaacataatactatcttgaatatgaaagctatttcatatttaagagcaagaaacaaaagggtaaaaatatatgcatcacttcaaatgtttgataaaacatatgtaaaacaatggtaaaagaat

SEQ ID NO: 9170 - DNA, 2552 bp, Homo sapiens
  source 1..2552: mol_type = unassigned DNA; mol_type = unassigned DNA
acacttttcctgcgctagagcagcgagcagcctggaacagacccaggcggaggacacctgtgggggagggagcgcctggaggagcttagagaccccagccgggcgtgatctcaccatgtgcggatttgcgaggcgcgccctggagctgctagagatccggaagcacagccccgaggtgtgcgaagccaccaaacatcccagttaccagtgtccttgaattgatagtggcttctgtttgtcagtctcatataagaactacagctcatcaggaggagatcgcagcagggtaagagacaccaacaccatgttctgcacgaagctcaaggatctcaagatcacaggagagtgtcctttctccttactggcaccaggtcaagttcctaacgagtcttcagaggaggcagcaggaagctcagagagctgcaaagcaaccgtgcccatctgtcaagacattcctgagaagaacatacaagaaagtcttcctcaaagaaaaaccagtcggagccgagtctatcttcacactttggcagagagtatttgcaaactgattttcccagagtttgaacggctgaatgttgcacttcagagaacattggcaaagcacaaaataaaagaaagcaggaaatctttggaaagagaagactttgaaaaaacaattgcagagcaagcagttgcagcaggagttccagtggaggttatcaaagaatctcttggtgaagaggtttttaaaatatgttacgaggaagatgaaaacatccttggggtggttggaggcacccttaaagattttttaaacagcttcagtacccttctgaaacagagcagccattgccaagaagcaggaaaaaggggcaggcttgaggacgcctccattctatgcctggataaggaggatgattttctacatgtttactacttcttccctaagagaaccacctccctgattcttcccggcatcataaaggcagctgctcacgtattatatgaaacggaagtggaagtgtcgttaatgcctccctgcttccataatgattgcagcgagtttgtgaatcagccctacttgttgtactccgttcacatgaaaagcaccaagccatccctgtcccccagcaaaccccagtcctcgctggtgattcccacatcgctattctgcaagacatttccattccatttcatgtttgacaaagatatgacaattctgcaatttggcaatggcatcagaaggctgatgaacaggagagactttcaaggaaagcctaattttgaagaatactttgaaattctgactccaaaaatcaaccagacgtttagcgggatcatgactatgttgaatatgcagtttgttgtacgagtgaggagatgggacaactctgtgaaaaaatcttcaagggttatggacctcaaaggccaaatgatctacattgttgaatccagtgcaatcttgtttttggggtcaccctgtgtggacagattagaagattttacaggacgagggctctacctctcagacatcccaattcacaatgcactgagggatgtggtcttaataggggaacaagcccgagctcaagatggcctgaagaagaggctggggaagctgaaggctacccttgagcaagcccaccaagccctggaggaggagaagaaaaagacagtagaccttctgtgctccatatttccctgtgaggttgctcagcagctgtggcaagggcaagttgtgcaagccaagaagttcagtaatgtcaccatgctcttctcagacatcgttgggttcactgccatctgctcccagtgctcaccgctgcaggtcatcaccatgctcaatgcactgtacactcgcttcgaccagcagtgtggagagctggatgtctacaaggtggagaccattggcgatgcctattgtgtagctgggggattacacaaagagagtgatactcatgctgttcagatagcgctgatggccctgaagatgatggagctctctgatgaagttatgtctccccatggagaacctatcaagatgcgaattggactgcactctggatcagtttttgctggcgtcgttggagttaaaatgccccgttactgtctttttggaaacaatgtcactctggctaacaaatttgagtcctgcagtgtaccacgaaaaatcaatgtcagcccaacaacttacaggtagtaattatgttaaacacctaaaatctcttgtttttatttatatacaattgccatttgccccactgatttgattcattcttcataacttttttcttccttagtcgtaaggaaaaaagaaacgtgataacttttatcatcctcactttaacttttttacactgcttattagcctcctaagaatgacttgcctgaggtgtttgtggcccagccataaatccatgacagatattacatagtcttccatcattcttcttttagaagcacatattaatactcttagtatgttgataggtgttctgacatcaactagtacactgcagtgcagttctggcagtaaacacccagactcagcacagtcataaccacaagttaca

SEQ ID NO: 9171 - DNA, 577 bp, Homo sapiens
  source 1..577: mol_type = unassigned DNA; mol_type = unassigned DNA
gagaccccagccgggcgtgatctcaccatgtgcggatttgcgaggcgcgccctggagctgctagagatccggaagcacagccccgaggtgtgcgaagccaccaaacatcccagttaccagtgtccttgaattgatagtggcttctgtttgtcagtctcatataagaactacagctcatcaggaggagatcgcagcagggtcaagttcctaacgagtcttcagaggaggcagcaggaagctcagagagctgcaaagcaaccgtgcccatctgtcaagacattcctgagaagaacatacaagaaagtcttcctcaaagaaaaaccagtcggagccgagtctatcttcacactttggcagagagtatttgcaaactgattttcccagagtttgaacggctgaatgttgcacttcagagaacattggcaaagcacaaaataaaagaaagcaggaaatctttggaaagagaagactttgaaaaaacaattgcagagcaagcagttgcagcaggagttccagtggaggttatcaaagaatctcttggtgaagaggtttttaaaatatgttacgaggaagatga

SEQ ID NO: 9172 - DNA, 2631 bp, Homo sapiens
  source 1..2631: mol_type = unassigned DNA; mol_type = unassigned DNA
atggtgcgttttggctgctactttctttttcagtctttcggtgcggagaaggggaggaggcgggcagaggtctgaaaaaatcgaatgccttatggaaaggaactgcaagggttcctttggggtgatcaaagagggagacacagacacagagagacaaaggcaaggaggactgtctgggagccacgcgggcgatacagtttccgaggcacgccgcgtcccgcctagcctgttgaacagtgcggatttgcgaggcgcgccctggagctgctagagatccggaagcacagccccgaggtgtgcgaagccaccaatctcatataagaactacagctcatcaggaggagatcgcagcagggtaagagacaccaacaccatgttctgcacgaagctcaaggatctcaagatcacaggagagtgtcctttctccttactggcaccaggtcaagttcctaacgagtcttcagaggaggcagcaggaagctcagagagctgcaaagcaaccgtgcccatctgtcaagacattcctgagaagaacatacaagaaagtcttcctcaaagaaaaaccagtcggagccgagtctatcttcacactttggcagagagtatttgcaaactgattttcccagagtttgaacggctgaatgttgcacttcagagaacattggcaaagcacaaaataaaagaaagcaggaaatctttggaaagagaagactttgaaaaaacaattgcagagcaagcagttgcagcaggagttccagtggaggttatcaaagaatctcttggtgaagaggtttttaaaatatgttacgaggaagatgaaaacatccttggggtggttggaggcacccttaaagattttttaaacagcttcagtacccttctgaaacagagcagccattgccaagaagcaggaaaaaggggcaggcttgaggacgcctccattctatgcctggataaggaggatgattttctacatgtttactacttcttccctaagagaaccacctccctgattcttcccggcatcataaaggcagctgctcacgtattatatgaaacggaagtggaagtgtcgttaatgcctccctgcttccataatgattgcagcgagtttgtgaatcagccctacttgttgtactccgttcacatgaaaagcaccaagccatccctgtcccccagcaaaccccagtcctcgctggtgattcccacatcgctattctgcaagacatttccattccatttcatgtttgacaaagatatgacaattctgcaatttggcaatggcatcagaaggctgatgaacaggagagactttcaaggaaagcctaattttgaagaatactttgaaattctgactccaaaaatcaaccagacgtttagcgggatcatgactatgttgaatatgcagtttgttgtacgagtgaggagatgggacaactctgtgaaaaaatcttcaagggttatggacctcaaaggccaaatgatctacattgttgaatccagtgcaatcttgtttttggggtcaccctgtgtggacagattagaagattttacaggacgagggctctacctctcagacatcccaattcacaatgcactgagggatgtggtcttaataggggaacaagcccgagctcaagatggcctgaagaagaggctggggaagctgaaggctacccttgagcaagcccaccaagccctggaggaggagaagaaaaagacagtagaccttctgtgctccatatttccctgtgaggttgctcagcagctgtggcaagggcaagttgtgcaagccaagaagttcagtaatgtcaccatgctcttctcagacatcgttgggttcactgccatctgctcccagtgctcaccgctgcaggtcatcaccatgctcaatgcactgtacactcgcttcgaccagcagtgtggagagctggatgtctacaaggtggagaccattggcgatgcctattgtgtagctgggggattacacaaagagagtgatactcatgctgttcagatagcgctgatggccctgaagatgatggagctctctgatgaagttatgtctccccatggagaacctatcaagatgcgaattggactgcactctggatcagtttttgctggcgtcgttggagttaaaatgccccgttactgtctttttggaaacaatgtcactctggctaacaaatttgagtcctgcagtgtaccacgaaaaatcaatgtcagcccaacaacttacagattactcaaagactgtcctggtttcgtgtttacccctcgatcaagggaggaacttccaccaaacttccctagtgaaatccccggaatctgccattttctggatgcttaccaacaaggaacaaactcaaaaccatgcttccaaaagaaagatgtggaagatggcaatgccaattttttaggcaaagcatcaggaatagattagcaacctatatacctatttataagtctttggggtttgactcattgaagatgtgtagagcctctgaaagcactttagggattgtagatggctaacaagcagtattaaaatttcaggagccaagtcacaatctttctcctgtttaacatgacaaaatgtatgtactcacttcagtacttcagctcttc

SEQ ID NO: 9173 - DNA, 1273 bp, Homo sapiens
  source 1..1273: mol_type = unassigned DNA; mol_type = unassigned DNA
atcgaatgccttatggaaaggaactgcaagggttcctttggggtgatcaaagagggagacacagacacagagagacaaaggcaaggaggactgtctgggagccacgcgggcgatacagtttccgaggcacgccgcgtcccgcctagcctgttgaacaggtagacatgagcgacccaagctgcggatttgcgaggcgcgccctggagctgctagagatccggaagcacagccccgaggtgtgcgaagccaccaaacatcccagttaccagtgtccttgaattgatagtggcttctgtttgtcagtctcatataagaactacagctcatcaggaggagatcgcagcagggtaagagacaccaacaccatgttctgcacgaagctcaaggatctcaagatcacaggagagtgtcctttctccttactggcaccaggtcaagttcctaacgagtcttcagaggaggcagcaggaagctcagagagctgcaaagcaaccgtgcccatctgtcaagacattcctgagaagaacatacaagaaagtcttcctcaaagaaaaaccagtggagaccattggcgatgcctattgtgtagctgggggattacacaaagagagtgatactcatgctgttcagatagcgctgatggccctgaagatgatggagctctctgatgaagttatgtctccccatggagaacctatcaagatgcgaattggactgcactctggatcagtttttgctggcgtcgttggagttaaaatgccccgttactgtctttttggaaacaatgtcactctggctaacaaatttgagtcctgcagtgtaccacgaaaaatcaatgtcagcccaacaacttacagattactcaaagactgtcctggtttcgtgtttacccctcgatcaagggaggaacttccaccaaacttccctagtgaaatccccggaatctgccattttctggatgcttaccaacaaggaacaaactcaaaaccatgcttccaaaagaaagatgtggaagatggcaatgccaattttttaggcaaagcatcaggaatagattagcaacctatatacctatttataagtctttggggtttgactcattgaagatgtgtagagcctctgaaagcactttagggattgtagatggctaacaagcagtattaaaatttcaggagccaagtcacaatctttctcctgtttaacatgacaaaatgtatgtactcacttcagtacttcagctcttcaagaaaaaaaaaaaaaaccttaaaaagct

SEQ ID NO: 9174 - DNA, 4352 bp, Homo sapiens
  source 1..4352: mol_type = unassigned DNA; mol_type = unassigned DNA
agacacagagagacaaaggcaaggaggactgtctgggagccacgcgggcgatacagtttccgaggcacgccgcgtcccgcctagcctgttgaacaggtagacatgagcgacccaagctgcggatttgcgaggcgcgccctggagctgctagagatccggaagcacagccccgaggtgtgcgaagccaccaaacatcccagttaccagtgtccttgaattgatagtggcttctgtttgtcagtctcatataagaactacagctcatcaggaggagatcgcagcagggtaagagacaccaacaccatgttctgcacgaagctcaaggatctcaagatcacaggagagtgtcctttctccttactggcaccaggtcaagttcctaacgagtcttcagaggaggcagcaggaagctcagagagctgcaaagcaaccgtgcccatctgtcaagacattcctgagaagaacatacaagaaagtcttcctcaaagaaaaaccagtcggagccgagtctatcttcacactttggcagagagtatttgcaaactgattttcccagagtttgaacggctgaatgttgcacttcagagaacattggcaaagcacaaaataaaagaaagcaggaaatctttggaaagagaagactttgaaaaaacaattgcagagcaagcagttgcagcagagcagccattgccaagaagcaggaaaaaggggcaggcttgaggacgcctccattctatgcctggataaggaggatgattttctacatgtttactacttcttccctaagagaaccacctccctgattcttcccggcatcataaaggcagctgctcacgtattatatgaaacggaagtggaagtgtcgttaatgcctccctgcttccataatgattgcagcgagtttgtgaatcagccctacttgttgtactccgttcacatgaaaagcaccaagccatccctgtcccccagcaaaccccagtcctcgctggtgattcccacatcgctattctgcaagacatttccattccatttcatgtttgacaaagatatgacaattctgcaatttggcaatggcatcagaaggctgatgaacaggagagactttcaaggaaagcctaattttgaagaatactttgaaattctgactccaaaaatcaaccagacgtttagcgggatcatgactatgttgaatatgcagtttgttgtacgagtgaggagatgggacaactctgtgaaaaaatcttcaagggttatggacctcaaaggccaaatgatctacattgttgaatccagtgcaatcttgtttttggggtcaccctgtgtggacagattagaagattttacaggacgagggctctacctctcagacatcccaattcacaatgcactgagggatgtggtcttaataggggaacaagcccgagctcaagatggcctgaagaagaggctggggaagctgaaggctacccttgagcaagcccaccaagccctggaggaggagaagaaaaagacagtagaccttctgtgctccatatttccctgtgaggttgctcagcagctgtggcaagggcaagttgtgcaagccaagaagttcagtaatgtcaccatgctcttctcagacatcgttgggttcactgccatctgctcccagtgctcaccgctgcaggtcatcaccatgctcaatgcactgtacactcgcttcgaccagcagtgtggagagctggatgtctacaaggtggagaccattggcgatgcctattgtgtagctgggggattacacaaagagagtgatactcatgctgttcagatagcgctgatggccctgaagatgatggagctctctgatgaagttatgtctccccatggagaacctatcaagatgcgaattggactgcactctggatcagtttttgctggcgtcgttggagttaaaatgccccgttactgtctttttggaaacaatgtcactctggctaacaaatttgagtcctgcagtgtaccacgaaaaatcaatgtcagcccaacaacttacagattactcaaagactgtcctggtttcgtgtttacccctcgatcaagggaggaacttccaccaaacttccctagtgaaatccccggaatctgccattttctggatgcttaccaacaaggaacaaactcaaaaccatgcttccaaaagaaagatgtggaagatggcaatgccaattttttaggcaaagcatcaggaatagattagcaacctatatacctatttataagtctttggggtttgactcattgaagatgtgtagagcctctgaaagcactttagggattgtagatggctaacaagcagtattaaaatttcaggagccaagtcacaatctttctcctgtttaacatgacaaaatgtatgtactcacttcagtacttcagctcttcaagaaaaaaaaaaaaaaccttaaaaagctacttttgtgggagtatttctattatataaccagcacttactacctgtactcaaaattcagcaccttgtacatatatcagataattgtagtcaattgtacaaactgatggagtcacctgcaatctcatatcctggtggaatgccatggttattaaagtgtgtttgtgatagtgtcgtcaaaaaaaaggtttttgaatagaaattacattctttgacaccctcagttctttcaaactttcaactctgcattttattgcattttctcatttaactgttagtatatgtttgaatataggctgactttttttctctattgcactttcttctttttttctttttagaaaataagcaattaggggttagatgcaatatgaatataaaatagttctgtaaataccaaatattatttttagttctggaagttaaaaatactctccatagtaacgtgtgttataataataaatatttcttttgtttgacttttttaaaattctacaatggtaaaagctattttaatccatgttagcaatttaattcctattaattcattttactatcataatagcaaagtattcagaataaaagaggtttatatcttctattaaaatgcagtaatactattcaaatctaatttagctggaagcaacatgggagtaaagtaatcatccaggggacccaccataaaggacattggtaaaacatttacacacgtaaacacacgtgcaggcacacttggaacaatatggacccacttcagcagacatcttctattgccatgctgagctgtttaaagttttaagaagaaaatctaagtatggaagtagaaaataagacttgttcttttggtggatatctcatttttcttgagtatttgtgctgaacattttggtgtatgtctatgaactaagaatcaagtttttgtctcattaaatatacatatatgaagtgtttttattctacttgaaatatcttgacttaaaaaaaacgactgttagtattgatgaagcaaatgaggcagtgactacattatggaaatgtctaagtattttttccggaacttcaactttttctttttgttttacataaacatttaagcagctaggaacttttagttttagttaggtcagttgaagttctctggtgaactaaaaaatctacattttggttggggataaagatttgattttaaaaacagcttgaatttaaagcaagaaaaagatgaacgttatagttttaaaatcaatattagcagagccatagataggctgagctcttatttggggttctgagaaataactcagtttaaaacttctttaactgcctcccttagtacccaggctagcccatggtgacatcagggatattcattactgattggcctctagtattccaagggtactactatagatattacaatgatgctgtttactaagtgataaccccgtatcttacaggactgactttgactcaataaaccactcagcctattattggaaagtgccataggccttgagaaagtatagttacatcctcacaaatatatgaagttaagtcactacttacaaggaaaaaaaatgtaaatacatttttctttctggaaccgaactcttattatggggaaataatagaaataaagaaaatgtaaaagcatgaaatggaatgtagtcttgatcaaacatttcagcagacctcaatttgcttacaatctgtactcaaaaagtttataattcaatcagaattcaaaaagtattttgtgtgtttgtgatgtattagcatatacacaaaacaaatgaggggaatgtatataatcttggtgaaaagttgtatgggagttttttgtacgattcctgcaacttttctataaacgtggcattatatctaaataaaaaattaccaaaaaaca

SEQ ID NO: 9175 - DNA, 4286 bp, Homo sapiens
  source 1..4286: mol_type = unassigned DNA; mol_type = unassigned DNA
ggactgtctgggagccacgcgggcgatacagtttccgaggcacgccgcgtcccgcctagcctgttgaacaggtagacatgagcgacccaagctgcggatttgcgaggcgcgccctggagctgctagagatccggaagcacagccccgaggtgtgcgaagccaccaagtcaagttcctaacgagtcttcagaggaggcagcaggaagctcagagagctgcaaagcaaccgtgcccatctgtcaagacattcctgagaagaacatacaagaaagtcttcctcaaagaaaaaccagtcggagccgagtctatcttcacactttggcagagagtatttgcaaactgattttcccagagtttgaacggctgaatgttgcacttcagagaacattggcaaagcacaaaataaaagaaagcaggaaatctttggaaagagaagactttgaaaaaacaattgcagagcaagcagttgcagcaggagttccagtggaggttatcaaagaatctcttggtgaagaggtttttaaaatatgttacgaggaagatgaaaacatccttggggtggttggaggcacccttaaagattttttaaacagcttcagtacccttctgaaacagagcagccattgccaagaagcaggaaaaaggggcaggcttgaggacgcctccattctatgcctggataaggaggatgattttctacatgtttactacttcttccctaagagaaccacctccctgattcttcccggcatcataaaggcagctgctcacgtattatatgaaacggaagtggaagtgtcgttaatgcctccctgcttccataatgattgcagcgagtttgtgaatcagccctacttgttgtactccgttcacatgaaaagcaccaagccatccctgtcccccagcaaaccccagtcctcgctggtgattcccacatcgctattctgcaagacatttccattccatttcatgtttgacaaagatatgacaattctgcaatttggcaatggcatcagaaggctgatgaacaggagagactttcaaggaaagcctaattttgaagaatactttgaaattctgactccaaaaatcaaccagacgtttagcgggatcatgactatgttgaatatgcagtttgttgtacgagtgaggagatgggacaactctgtgaaaaaatcttcaagggttatggacctcaaaggccaaatgatctacattgttgaatccagtgcaatcttgtttttggggtcaccctgtgtggacagattagaagattttacaggacgagggctctacctctcagacatcccaattcacaatgcactgagggatgtggtcttaataggggaacaagcccgagctcaagatggcctgaagaagaggctggggaagctgaaggctacccttgagcaagcccaccaagccctggaggaggagaagaaaaagacagtagaccttctgtgctccatatttccctgtgaggttgctcagcagctgtggcaagggcaagttgtgcaagccaagaagttcagtaatgtcaccatgctcttctcagacatcgttgggttcactgccatctgctcccagtgctcaccgctgcaggtcatcaccatgctcaatgcactgtacactcgcttcgaccagcagtgtggagagctggatgtctacaaggtggagaccattggcgatgcctattgtgtagctgggggattacacaaagagagtgatactcatgctgttcagatagcgctgatggccctgaagatgatggagctctctgatgaagttatgtctccccatggagaacctatcaagatgcgaattggactgcactctggatcagtttttgctggcgtcgttggagttaaaatgccccgttactgtctttttggaaacaatgtcactctggctaacaaatttgagtcctgcagtgtaccacgaaaaatcaatgtcagcccaacaacttacagattactcaaagactgtcctggtttcgtgtttacccctcgatcaagggaggaacttccaccaaacttccctagtgaaatccccggaatctgccattttctggatgcttaccaacaaggaacaaactcaaaaccatgcttccaaaagaaagatgtggaagatggcaatgccaattttttaggcaaagcatcaggaatagattagcaacctatatacctatttataagtctttggggtttgactcattgaagatgtgtagagcctctgaaagcactttagggattgtagatggctaacaagcagtattaaaatttcaggagccaagtcacaatctttctcctgtttaacatgacaaaatgtatgtactcacttcagtacttcagctcttcaagaaaaaaaaaaaaaaccttaaaaagctacttttgtgggagtatttctattatataaccagcacttactacctgtactcaaaattcagcaccttgtacatatatcagataattgtagtcaattgtacaaactgatggagtcacctgcaatctcatatcctggtggaatgccatggttattaaagtgtgtttgtgatagtgtcgtcaaaaaaaaggtttttgaatagaaattacattctttgacaccctcagttctttcaaactttcaactctgcattttattgcattttctcatttaactgttagtatatgtttgaatataggctgactttttttctctattgcactttcttctttttttctttttagaaaataagcaattaggggttagatgcaatatgaatataaaatagttctgtaaataccaaatattatttttagttctggaagttaaaaatactctccatagtaacgtgtgttataataataaatatttcttttgtttgacttttttaaaattctacaatggtaaaagctattttaatccatgttagcaatttaattcctattaattcattttactatcataatagcaaagtattcagaataaaagaggtttatatcttctattaaaatgcagtaatactattcaaatctaatttagctggaagcaacatgggagtaaagtaatcatccaggggacccaccataaaggacattggtaaaacatttacacacgtaaacacacgtgcaggcacacttggaacaatatggacccacttcagcagacatcttctattgccatgctgagctgtttaaagttttaagaagaaaatctaagtatggaagtagaaaataagacttgttcttttggtggatatctcatttttcttgagtatttgtgctgaacattttggtgtatgtctatgaactaagaatcaagtttttgtctcattaaatatacatatatgaagtgtttttattctacttgaaatatcttgacttaaaaaaaacgactgttagtattgatgaagcaaatgaggcagtgactacattatggaaatgtctaagtattttttccggaacttcaactttttctttttgttttacataaacatttaagcagctaggaacttttagttttagttaggtcagttgaagttctctggtgaactaaaaaatctacattttggttggggataaagatttgattttaaaaacagcttgaatttaaagcaagaaaaagatgaacgttatagttttaaaatcaatattagcagagccatagataggctgagctcttatttggggttctgagaaataactcagtttaaaacttctttaactgcctcccttagtacccaggctagcccatggtgacatcagggatattcattactgattggcctctagtattccaagggtactactatagatattacaatgatgctgtttactaagtgataaccccgtatcttacaggactgactttgactcaataaaccactcagcctattattggaaagtgccataggccttgagaaagtatagttacatcctcacaaatatatgaagttaagtcactacttacaaggaaaaaaaatgtaaatacatttttctttctggaaccgaactcttattatggggaaataatagaaataaagaaaatgtaaaagcatgaaatggaatgtagtcttgatcaaacatttcagcagacctcaatttgcttacaatctgtactcaaaaagtttataattcaatcagaattcaaaaagtattttgtgtgtttgtgatgtattagcatatacacaaaacaaatgaggggaatgtatataatcttggtgaaaagttgtatgggagttttttgtacgattcctgcaacttttctataaacgtggcattatatctaaataaaaaattaccaaaaaa

SEQ ID NO: 9176 - DNA, 4400 bp, Homo sapiens
  source 1..4400: mol_type = unassigned DNA; mol_type = unassigned DNA
aggtagacatgagcgacccaagctgcggatttgcgaggcgcgccctggagctgctagagatccggaagcacagccccgaggtgtgcgaagccaccaaacatcccagttaccagtgtccttgaattgatagtggcttctgtttgtcagtctcatataagaactacagctcatcaggaggagatcgcagcagggtaagagacaccaacaccatgttctgcacgaagctcaaggatctcaagatcacaggagagtgtcctttctccttactggcaccaggtcaagttcctaacgagtcttcagaggaggcagcaggaagctcagagagctgcaaagcaaccgtgcccatctgtcaagacattcctgagaagaacatacaagaaagtcttcctcaaagaaaaaccagtcggagccgagtctatcttcacactttggcagagagtatttgcaaactgattttcccagagtttgaacggctgaatgttgcacttcagagaacattggcaaagcacaaaataaaagaaagcaggaaatctttggaaagagaagactttgaaaaaacaattgcagagcaagcagttgcagcaggagttccagtggaggttatcaaagaatctcttggtgaagaggtttttaaaatatgttacgaggaagatgaaaacatccttggggtggttggaggcacccttaaagattttttaaacagcttcagtacccttctgaaacagagcagccattgccaagaagcaggaaaaaggggcaggcttgaggacgcctccattctatgcctggataaggaggatgattttctacatgtttactacttcttccctaagagaaccacctccctgattcttcccggcatcataaaggcagctgctcacgtattatatgaaacggaagtggaagtgtcgttaatgcctccctgcttccataatgattgcagcgagtttgtgaatcagccctacttgttgtactccgttcacatgaaaagcaccaagccatccctgtcccccagcaaaccccagtcctcgctggtgattcccacatcgctattctgcaagacatttccattccatttcatgtttgacaaagatatgacaattctgcaatttggcaatggcatcagaaggctgatgaacaggagagactttcaaggaaagcctaattttgaagaatactttgaaattctgactccaaaaatcaaccagacgtttagcgggatcatgactatgttgaatatgcagtttgttgtacgagtgaggagatgggacaactctgtgaaaaaatcttcaagggttatggacctcaaaggccaaatgatctacattgttgaatccagtgcaatcttgtttttggggtcaccctgtgtggacagattagaagattttacaggacgagggctctacctctcagacatcccaattcacaatgcactgagggatgtggtcttaataggggaacaagcccgagctcaagatggcctgaagaagaggctggggaagctgaaggctacccttgagcaagcccaccaagccctggaggaggagaagaaaaagacagtagaccttctgtgctccatatttccctgtgaggttgctcagcagctgtggcaagggcaagttgtgcaagccaagaagttcagtaatgtcaccatgctcttctcagacatcgttgggttcactgccatctgctcccagtgctcaccgctgcaggtcatcaccatgctcaatgcactgtacactcgcttcgaccagcagtgtggagagctggatgtctacaaggtggagaccattggcgatgcctattgtgtagctgggggattacacaaagagagtgatactcatgctgttcagatagcgctgatggccctgaagatgatggagctctctgatgaagttatgtctccccatggagaacctatcaagatgcgaattggactgcactctggatcagtttttgctggcgtcgttggagttaaaatgccccgttactgtctttttggaaacaatgtcactctggctaacaaatttgagtcctgcagtgtaccacgaaaaatcaatgtcagcccaacaacttacagattactcaaagactgtcctggtttcgtgtttacccctcgatcaagggaggaacttccaccaaacttccctagtgaaatccccggaatctgccattttctggatgcttaccaacaaggaacaaactcaaaaccatgcttccaaaagaaagatgtggaagatggcaatgccaattttttaggcaaagcatcaggaatagattagcaacctatatacctatttataagtctttggggtttgactcattgaagatgtgtagagcctctgaaagcactttagggattgtagatggctaacaagcagtattaaaatttcaggagccaagtcacaatctttctcctgtttaacatgacaaaatgtatgtactcacttcagtacttcagctcttcaagaaaaaaaaaaaaaaccttaaaaagctacttttgtgggagtatttctattatataaccagcacttactacctgtactcaaaattcagcaccttgtacatatatcagataattgtagtcaattgtacaaactgatggagtcacctgcaatctcatatcctggtggaatgccatggttattaaagtgtgtttgtgatagtgtcgtcaaaaaaaaggtttttgaatagaaattacattctttgacaccctcagttctttcaaactttcaactctgcattttattgcattttctcatttaactgttagtatatgtttgaatataggctgactttttttctctattgcactttcttctttttttctttttagaaaataagcaattaggggttagatgcaatatgaatataaaatagttctgtaaataccaaatattatttttagttctggaagttaaaaatactctccatagtaacgtgtgttataataataaatatttcttttgtttgacttttttaaaattctacaatggtaaaagctattttaatccatgttagcaatttaattcctattaattcattttactatcataatagcaaagtattcagaataaaagaggtttatatcttctattaaaatgcagtaatactattcaaatctaatttagctggaagcaacatgggagtaaagtaatcatccaggggacccaccataaaggacattggtaaaacatttacacacgtaaacacacgtgcaggcacacttggaacaatatggacccacttcagcagacatcttctattgccatgctgagctgtttaaagttttaagaagaaaatctaagtatggaagtagaaaataagacttgttcttttggtggatatctcatttttcttgagtatttgtgctgaacattttggtgtatgtctatgaactaagaatcaagtttttgtctcattaaatatacatatatgaagtgtttttattctacttgaaatatcttgacttaaaaaaaacgactgttagtattgatgaagcaaatgaggcagtgactacattatggaaatgtctaagtattttttccggaacttcaactttttctttttgttttacataaacatttaagcagctaggaacttttagttttagttaggtcagttgaagttctctggtgaactaaaaaatctacattttggttggggataaagatttgattttaaaaacagcttgaatttaaagcaagaaaaagatgaacgttatagttttaaaatcaatattagcagagccatagataggctgagctcttatttggggttctgagaaataactcagtttaaaacttctttaactgcctcccttagtacccaggctagcccatggtgacatcagggatattcattactgattggcctctagtattccaagggtactactatagatattacaatgatgctgtttactaagtgataaccccgtatcttacaggactgactttgactcaataaaccactcagcctattattggaaagtgccataggccttgagaaagtatagttacatcctcacaaatatatgaagttaagtcactacttacaaggaaaaaaaatgtaaatacatttttctttctggaaccgaactcttattatggggaaataatagaaataaagaaaatgtaaaagcatgaaatggaatgtagtcttgatcaaacatttcagcagacctcaatttgcttacaatctgtactcaaaaagtttataattcaatcagaattcaaaaagtattttgtgtgtttgtgatgtattagcatatacacaaaacaaatgaggggaatgtatataatcttggtgaaaagttgtatgggagttttttgtacgattcctgcaacttttctataaacgtggcattatatctaaataaaaaattaccaaaaaacata

SEQ ID NO: 9177 - DNA, 1282 bp, Homo sapiens
  source 1..1282: mol_type = unassigned DNA; mol_type = unassigned DNA
attcgcagtgcggatttgcgaggcgcgccctggagctgctagagatccggaagcacagccccgaggtgtgcgaagccaccaaacatcccagttaccagtgtccttgaattgatagtggcttctgtttgtcagtctcatataagaactacagctcatcaggaggagatcgcagcagggtaagagacaccaacaccatgttctgcacgaagctcaaggatctcaagatcacaggagagtgtcctttctccttactggcaccaggtcaagttcctaacgagtcttcagaggaggcagcaggaagctcagagagctgcaaagcaaccgtgcccatctgtcaagacattcctgagaagaacatacaagaaagtcttcctcaaagaaaaaccagtcggagccgagtctatcttcacactttggcagagagtatttgcaaactgattttcccagagtttgaacggctgaatgttgcacttcagagaacattggcaaagcacaaaataaaagaaagcaggaaatctttggaaagagaagactttgaaaaaacaattgcagagcaagcagttgcagcaggtggagaccattggcgatgcctattgtgtagctgggggattacacaaagagagtgatactcatgctgttcagatagcgctgatggccctgaagatgatggagctctctgatgaagttatgtctccccatggagaacctatcaagatgcgaattggactgcactctggatcagtttttgctggcgtcgttggagttaaaatgccccgttactgtctttttggaaacaatgtcactctggctaacaaatttgagtcctgcagtgtaccacgaaaaatcaatgtcagcccaacaacttacagattactcaaagactgtcctggtttcgtgtttacccctcgatcaagggaggaacttccaccaaacttccctagtgaaatccccggaatctgccattttctggatgcttaccaacaaggaacaaactcaaaaccatgcttccaaaagaaagatgtggaagatggcaatgccaattttttaggcaaagcatcaggaatagattagcaacctatatacctatttataagtctttggggtttgactcattgaagatgtgtagagcctctgaaagcactttagggattgtagatggctaacaagcagtattaaaatttcaggagccaagtcacaatctttctcctgtttaacatgacaaaatgtatgtactcacttcagtacttcagctcttcaagaaaaaaaaaaaaaaccttaaaaa

SEQ ID NO: 9178 - DNA, 2656 bp, Homo sapiens
  source 1..2656: mol_type = unassigned DNA; mol_type = unassigned DNA
gacgggggtgggcgccgagcagcgccgcgccggctgctgagctcgcggggccgggccgtgagaacgcgcggggcgcgccggggccgctggtctcccacggccagggcgcctgggccccagagcccatcagccgcgtgcagcgctgcggcctccggcgcgccggcaggcaagcgagcgggcgcagctgggggatgcctggaccccggaggcagcagggctggaggcggtggcgggcttcagggcaacttcacccggccggctgcggcgtggacatcccagttaccagtgtccttgaattgatagtggcttctgtttgtcagtctcatataagaactacagctcatcaggaggagatcgcagcagggtaagagacaccaacaccatgttctgcacgaagctcaaggatctcaagatcacaggagagtgtcctttctccttactggcaccaggtcaagttcctaacgagtcttcagaggaggcagcaggaagctcagagagctgcaaagcaaccgtgcccatctgtcaagacattcctgagaagaacatacaagaaagtcttcctcaaagaaaaaccagtcggagccgagtctatcttcacactttggcagagagtatttgcaaactgattttcccagagtttgaacggctgaatgttgcacttcagagaacattggcaaagcacaaaataaaagaaagcaggaaatctttggaaagagaagactttgaaaaaacaattgcagagcaagcagttgcagcaggagttccagtggaggttatcaaagaatctcttggtgaagaggtttttaaaatatgttacgaggaagatgaaaacatccttggggtggttggaggcacccttaaagattttttaaacagcttcagtacccttctgaaacagagcagccattgccaagaagcaggaaaaaggggcaggcttgaggacgcctccattctatgcctggataaggaggatgattttctacatgtttactacttcttccctaagagaaccacctccctgattcttcccggcatcataaaggcagctgctcacgtattatatgaaacggaagtggaagtgtcgttaatgcctccctgcttccataatgattgcagcgagtttgtgaatcagccctacttgttgtactccgttcacatgaaaagcaccaagccatccctgtcccccagcaaaccccagtcctcgctggtgattcccacatcgctattctgcaagacatttccattccatttcatgtttgacaaagatatgacaattctgcaatttggcaatggcatcagaaggctgatgaacaggagagactttcaaggaaagcctaattttgaagaatactttgaaattctgactccaaaaatcaaccagacgtttagcgggatcatgactatgttgaatatgcagtttgttgtacgagtgaggagatgggacaactctgtgaaaaaatcttcaagggttatggacctcaaaggccaaatgatctacattgttgaatccagtgcaatcttgtttttggggtcaccctgtgtggacagattagaagattttacaggacgagggctctacctctcagacatcccaattcacaatgcactgagggatgtggtcttaataggggaacaagcccgagctcaagatggcctgaagaagaggctggggaagctgaaggctacccttgagcaagcccaccaagccctggaggaggagaagaaaaagacagtagaccttctgtgctccatatttccctgtgaggttgctcagcagctgtggcaagggcaagttgtgcaagccaagaagttcagtaatgtcaccatgctcttctcagacatcgttgggttcactgccatctgctcccagtgctcaccgctgcaggtcatcaccatgctcaatgcactgtacactcgcttcgaccagcagtgtggagagctggatgtctacaaggtggagaccattggcgatgcctattgtgtagctgggggattacacaaagagagtgatactcatgctgttcagatagcgctgatggccctgaagatgatggagctctctgatgaagttatgtctccccatggagaacctatcaagatgcgaattggactgcactctggatcagtttttgctggcgtcgttggagttaaaatgccccgttactgtctttttggaaacaatgtcactctggctaacaaatttgagtcctgcagtgtaccacgaaaaatcaatgtcagcccaacaacttacagattactcaaagactgtcctggtttcgtgtttacccctcgatcaagggaggaacttccaccaaacttccctagtgaaatccccggaatctgccattttctggatgcttaccaacaaggaacaaactcaaaaccatgcttccaaaagaaagatgtggaagatggcaatgccaattttttaggcaaagcatcaggaatagattagcaacctatatacctatttataagtctttggggtttgactcattgaagatgtgtagagcctctgaaagcactttagggattgtagatggctaacaagcagtattaaaatttcaggagccaagtcacaatctttctcctgtttaacatgacaaaatgtatgtactcacttcagtacttcagctcttcaagaaaaaaaaaaaaa

SEQ ID NO: 9179 - DNA, 1788 bp, Homo sapiens
  source 1..1788: mol_type = unassigned DNA; mol_type = unassigned DNA
ttatggcgattgggcggctgcagagaccaggactcagttcccctgccctagtctgagcctagtgggtgggactcagctcagagtcagttttccagaagcaggtttcagtgcagagttttcctacacttttcctgcgctagagcagcgagcagcctggaacagacccaggcggaggacacctgtgggggagggagcgcctggaggagcttagagaccccagccgggcgtgatctcaccatgtgcggatttgcgaggcgcgccctggagctgctagagatccggaagcacagccccgaggtgtgcgaagccaccaagactgcggctcttggagaaagcgtgagcagggggccaccgcggtctccgcgcctgtctgcaccctgtcgcctgagctgcctgacagtgacaatgacatcccagttaccagtgtccttgaattgatagtggcttctgtttgtcagtctcatataagaactacagctcatcaggaggagatcgcagcagggtaagagacaccaacaccatgttctgcacgaagctcaaggatctcaagatcacaggagagtgtcctttctccttactggcaccaggtcaagttcctaacgagtcttcagaggaggcagcaggaagctcagagagctgcaaagcaaccgtgcccatctgtcaagacattcctgagaagaacatacaagaaagtcttcctcaaagaaaaaccagtcggagccgagtctatcttcacactttggcagagagtatttgcaaactgattttcccagagtttgaacggctgaatgttgcacttcagagaacattggcaaagcacaaaataaaagaaagcaggaaatctttggaaagagaagactttgaaaaaacaattgcagagcaagcagttgcagcaggtggagaccattggcgatgcctattgtgtagctgggggattacacaaagagagtgatactcatgctgttcagatagcgctgatggccctgaagatgatggagctctctgatgaagttatgtctccccatggagaacctatcaagatgcgaattggactgcactctggatcagtttttgctggcgtcgttggagttaaaatgccccgttactgtctttttggaaacaatgtcactctggctaacaaatttgagtcctgcagtgtaccacgaaaaatcaatgtcagcccaacaacttacagattactcaaagactgtcctggtttcgtgtttacccctcgatcaagggaggaacttccaccaaacttccctagtgaaatccccggaatctgccattttctggatgcttaccaacaaggaacaaactcaaaaccatgcttccaaaagaaagatgtggaagatggcaatgccaattttttaggcaaagcatcaggaatagattagcaacctatatacctatttataagtctttggggtttgactcattgaagatgtgtagagcctctgaaagcactttagggattgtagatggctaacaagcagtattaaaatttcaggagccaagtcacaatctttctcctgtttaacatgacaaaatgtatgtactcacttcagtacttcagctcttcaagaaaaaaaaaaaaaaccttaaaaagctacttttgtgggagtatttctattatataaccagcacttactacctgtactcaaaattcagcaccttgtacatatatcagataattgtagtcaattgtacaaactgatggagtcacctgcaatctcatatcctggtggaatgccatggttattaaagtgtgtttgtgatagtgtcgtc

SEQ ID NO: 9180 - DNA, 1956 bp, Homo sapiens
  source 1..1956: mol_type = unassigned DNA; mol_type = unassigned DNA
cttcccggcagccggggctgggcaccaggcggcgcgcgggcttgcgggcaggggctgcagggaggaggagaggacccgcgcccgcgggggctggcggaggcggggccgggcttccggacagaggccaatcgctgccctcggggcctccagcgccggctctgggccgaggcagccagagcgcggaagaggcctggaaatccacgcggattcccggagacggcgcctctgctctgcgggttcgtggcgaggaagtccacccactgctcccgggcgcaggtctgcaggtccgcgcccactgcccgcggcgccactgaccatgtcggtgactgatcaggcttttgtcacactagccaccaatgacatctactgccagggcgccctggtcctggggcagtcactgaggagacacaggctgacgaggaagctggtggtgttgatcactcctcaggtgtccagcctgctcagggtcatcctctcgaaggtgttcgatgaagtcattgaagtgaatctaatcgatagtgccgactacatccacctggcctttctgaagagacctgagctcgggctcaccctcaccaagcttcactgttggactctcactcactacagcaagtgtgtcttcctggatgcagacactctggtgctgtccaatgtcgatgagctgtttgacaggggagagttttctgcggccccggaccccggatggccggattgcttcaatagcggggtgtttgtcttccagccttctctccacacgcataaactcctgctacagcacgccatggaacacggcagctttgacggggcagaccaaggcttactgaatagtttcttcaggaactggtcgaccacagacatccacaagcacctgccgttcatctataacttgagtagtaacacgatgtacacttacagccctgccttcaagcaattcggttccagtgcaaaggtcgtccactttttggggtccatgaaaccttggaactacaagtacaatccacagagtggctcggtgttggagcaaggctcagcgtccagcagccagcaccaggcggcattccttcatctctggtggacggtctaccagaacaacgtgctgcccctttataaaagcgtccaagcgggggaagcacgcgcgtctcctggtcacacactttgccacagtgatgtgggggggccgtgtgcggattcagcctctggtgttggagagccgtgtgaaaattcaacacccagtgcgggcgtgccgtgtgcaaattcaccactgggttctaaccagcctgctcagggccttccggagccgacccagatagtggatgagaccctgtccctacctgaaggacgccgttcagaagatatgatagcttgtcctgaaactgagactcctgccgtgataacgtgtgacccactgtcccagccttcccctcagcctgcagacttcacagagactgaaaccatcttgcagccagcaaataaagtcgaaagtgtctcatccgaggaaaccttcgaaccaagccaggaactccctgctgaggctctcagggaccccagtctgcaggatgcactggaggtcgacctggccgtctctgtttcccagatctccatcgaagagaaggtgaaggaattgagccccgaggaagagaggaggaagtgggaggaaggccgtatcgactacatggggaaggacgcgtttgctcgcatccaggagaagctggaccggttcctgcagtaatccggcagctggtgggcgttgtgtgtagttagacaatgtcctgttgggtggtcctgttgcgtggagatctcctctggtcctttcaaagggaaacgctgttgaaccttgtgcctctatttatgcttaatccatttgagtgcctcacacaaaaaacgtagagtatagaaatccaccttaaagcccctcgccccaacttctccaccaacgccttctgggctttcttcaga

SEQ ID NO: 9181 - DNA, 3393 bp, Homo sapiens
  source 1..3393: mol_type = unassigned DNA; mol_type = unassigned DNA
cgcgggcttgcgggcaggggctgcagggaggaggagaggacccgcgcccgcgggggctggcggaggcggggccgggcttccggacagaggccaatcgctgccctcggggcctccagcgccggctctgggccgaggcagccagagcgcggaagaggcctggaaatccacgcggattcccggagacggcgcctctgctctgcgggttcgtggcgaggaagtccacccactgctcccgggcgcaggtctgcaggtccgcgcccactgcccgcggcgccactgaccatgtcggagacagagtttcaccatggtgcccaggctggtctcgaactcctgaggtcaagcaattcacccacctcagcctcccaaagtgctggaatgacagtgactgatcaggcttttgtcacactagccaccaatgacatctactgccagggcgccctggtcctggggcagtcactgaggagacacaggctgacgaggaagctggtggtgttgatcactcctcaggtgtccagcctgctcagggtcatcctctcgaaggtgttcgatgaagtcattgaagtgaatctaatcgatagtgccgactacatccacctggcctttctgaagagacctgagctcgggctcaccctcaccaagcttcactgttggactctcactcactacagcaagtgtgtcttcctggatgcagacactctggtgctgtccaatgtcgatgagctgtttgacaggggagagttttctgcggccccggaccccggatggccggattgcttcaatagcggggtgtttgtcttccagccttctctccacacgcataaactcctgctacagcacgccatggaacacggcagctttgacggggcagaccaaggcttactgaatagtttcttcaggaactggtcgaccacagacatccacaagcacctgccgttcatctataacttgagtagtaacacgatgtacacttacagccctgccttcaagcaattcggttccagtgcaaaggtcgtccactttttggggtccatgaaaccttggaactacaagtacaatccacagagtggctcggtgttggagcaaggctcagcgtccagcagccagcaccaggcggcattccttcatctctggtggacggtctaccagaacaacgtgctgcccctttataaaagcgtccaagcgggggaagcacgcgcgtctcctggtcacacactttgccacagtgatgtgggggggccgtgtgcggattcagcctctggtgttggagagccgtgtgaaaattcaacacccagtgcgggcgtgccgtgtgcaaattcaccactgggttctaaccagcctgctcagggccttccggagccgacccagatagtggatgagaccctgtccctacctgaaggacgccgttcagaagatatgatagcttgtcctgaaactgagactcctgccgtgataacgtgtgacccactgtcccagccttcccctcagcctgcagacttcacagagactgaaaccatcttgcagccagcaaataaagtcgaaagtgtctcatccgaggaaaccttcgaaccaagccaggaactccctgctgaggctctcagggaccccagtctgcaggatgcactggaggtcgacctggccgtctctgtttcccagatctccatcgaagagaaggtgaaggaattgagccccgaggaagagaggaggaagtgggaggaaggccgtatcgactacatggggaaggacgcgtttgctcgcatccaggagaagctggaccggttcctgcagtaatccggcagctggtgggcgttgtgtgtagttagacaatgtcctgttgggtggtcctgttgcgtggagatctcctctggtcctttcaaagggaaacgctgttgaaccttgtgcctctatttatgcttaatccatttgagtgcctcacacaaaaaacgtagagtatagaaatccaccttaaagcccctcgccccaacttctccaccaacgccttctgggctttcttcagaggtcacttctacccttgaagctgtcggcaaaagcgagcagtaataacattctagtagactctcgatggtggtctccgctcttgcccgaaggacctctgaagtacgctggagctgtgttgtacaggtgctgtgagacctaccctattcagaattaaacctcactgcaaatttcctcccatcacgaagctaacaacactaatatacgtatttagcacctctgaggctttgccatggagacccatttctgtagggctaaggaaacatttagacgtggtgactgactttcatttggacttggcgaagtgtatctgagaaacacctcggctgtggtctctctgctttaaatcctaacaggacttcctagagcgttgacagaaattctactcgtggacgttgggaagaaagattgtaggtggcttggggaatgtgggtggcttagaggatctaaaccgattcacttcctggttgagaagcaacgagggcttgctctaaatcgtttagaggataacaggatctagagatgctctctgcttgacaacaaaagtcagggtgcagtcggtccacccttgactgctcttggcttggtctctaccctcactacctcagttctcaataacttagtgaatcactgccctcctcaaagccatttccactcagctctttccagagaattctcagttttatgagacgggaaactttatttcacgagaaagcctcattgtcagaagtatcttcattcaatgggcacaatatgctgtgtatctcaccaggtagctgtcaggggccaccgagagtgtcgttaaaaatgggcatggttgtaataaaggaggaaagtgcgacttttgaaatgtttggaaggtttatttctcatgcacattccagggaaaagcagagagtaaattagagacgggataggaaggccgtgggagaactcgatcctagcctgtgtcagctggatgtgtttacgtggagaggcgtggccactttttaggtcacctgaagcagtttagcctttggatagaggaacctgcctgaatttatggcattagtggtggcatttttttgtgtacaagatgtgggtgatggaggggctgtttctttttccgtgtgggtggttaataatcgtcagtctcggagggcgaggctcgtaggatatttcaggtgagtcagggttggatggtcatcggctttcagaaggagaccacgggaatgttcagggaaacaatgtcagcttctctgaggaccagaattcatgttcacgggcagtgatgagttggcttatggagtgagtccagtctggaattccgccgtgcattctagcctgtatcatctcatttggacaaatgctggcacgttgaaattaaaatgttaaaaaaca

SEQ ID NO: 9182 - DNA, 2852 bp, Homo sapiens
  source 1..2852: mol_type = unassigned DNA; mol_type = unassigned DNA
aatcgctgccctcggggcctccagcgccggctctgggccgaggcagccagagcgcggaagaggcctggaaatccacgcggattcccggagacggcgcctctgctctgcgggttcgtggcgaggaagtccacccactgctcccgggcgcaggtctgcaggtccgcgcccactgcccgcggcgccactgaccatgtcggggtcatcctctcgaaggtgttcgatgaagtcattgaagtgaatctaatcgatagtgccgactacatccacctggcctttctgaagagacctgagctcgggctcaccctcaccaagcttcactgttggactctcactcactacagcaagtgtgtcttcctggatgcagacactctggtgctgtccaatgtcgatgagctgtttgacaggggagagttttctgcggccccggaccccggatggccggattgcttcaatagcggggtgtttgtcttccagccttctctccacacgcataaactcctgctacagcacgccatggaacacggcagctttgacggggcagaccaaggcttactgaatagtttcttcaggaactggtcgaccacagacatccacaagcacctgccgttcatctataacttgagtagtaacacgatgtacacttacagccctgccttcaagcaattcggttccagtgcaaaggtcgtccactttttggggtccatgaaaccttggaactacaagtacaatccacagagtggctcggtgttggagcaaggctcagcgtccagcagccagcaccaggcggcattccttcatctctggtggacggtctaccagaacaacgtgctgcccctttataaaagcgtccaagcgggggaagcacgcgcgtctcctggtcacacactttgccacagtgatgtgggggggccgtgtgcggattcagcctctggtgttggagagccgtgtgaaaattcaacacccagtgcgggcgtgccgtgtgcaaattcaccactgggttctaaccagcctgctcagggccttccggagccgacccagatagtggatgagaccctgtccctacctgaaggacgccgttcagaagatgtcgacctggccgtctctgtttcccagatctccatcgaagagaaggtgaaggaattgagccccgaggaagagaggaggaagtgggaggaaggccgtatcgactacatggggaaggacgcgtttgctcgcatccaggagaagctggaccggttcctgcagtaatccggcagctggtgggcgttgtgtgtagttagacaatgtcctgttgggtggtcctgttgcgtggagatctcctctggtcctttcaaagggaaacgctgttgaaccttgtgcctctatttatgcttaatccatttgagtgcctcacacaaaaaacgtagagtatagaaatccaccttaaagcccctcgccccaacttctccaccaacgccttctgggctttcttcagaggtcacttctacccttgaagctgtcggcaaaagcgagcagtaataacattctagtagactctcgatggtggtctccgctcttgcccgaaggacctctgaagtacgctggagctgtgttgtacaggtgctgtgagacctaccctattcagaattaaacctcactgcaaatttcctcccatcacgaagctaacaacactaatatacgtatttagcacctctgaggctttgccatggagacccatttctgtagggctaaggaaacatttagacgtggtgactgactttcatttggacttggcgaagtgtatctgagaaacacctcggctgtggtctctctgctttaaatcctaacaggacttcctagagcgttgacagaaattctactcgtggacgttgggaagaaagattgtaggtggcttggggaatgtgggtggcttagaggatctaaaccgattcacttcctggttgagaagcaacgagggcttgctctaaatcgtttagaggataacaggatctagagatgctctctgcttgacaacaaaagtcagggtgcagtcggtccacccttgactgctcttggcttggtctctaccctcactacctcagttctcaataacttagtgaatcactgccctcctcaaagccatttccactcagctctttccagagaattctcagttttatgagacgggaaactttatttcacgagaaagcctcattgtcagaagtatcttcattcaatgggcacaatatgctgtgtatctcaccaggtagctgtcaggggccaccgagagtgtcgttaaaaatgggcatggttgtaataaaggaggaaagtgcgacttttgaaatgtttggaaggtttatttctcatgcacattccagggaaaagcagagagtaaattagagacgggataggaaggccgtgggagaactcgatcctagcctgtgtcagctggatgtgtttacgtggagaggcgtggccactttttaggtcacctgaagcagtttagcctttggatagaggaacctgcctgaatttatggcattagtggtggcatttttttgtgtacaagatgtgggtgatggaggggctgtttctttttccgtgtgggtggttaataatcgtcagtctcggagggcgaggctcgtaggatatttcaggtgagtcagggttggatggtcatcggctttcagaaggagaccacgggaatgttcagggaaacaatgtcagcttctctgaggaccagaattcatgttcacgggcagtgatgagttggcttatggagtgagtccagtctggaattccgccgtgcattctagcctgtatcatctcatttggacaaatgctggcacgttgaaattaaaatgttaaaaaac

SEQ ID NO: 9183 - DNA, 624 bp, Homo sapiens
  source 1..624: mol_type = unassigned DNA; mol_type = unassigned DNA
agtgcgccgagccagggcaccgagtgctggggaatacaggccgtccaggcgcggcggggcgcggggagacggaggctgccggagcctggaaatccacgcggattcccggagacggcgcctctgctctgcgggttcgtggcgaggaagtccacccactgctcccgggcgcaggtctgcaggtccgcgcccactgcccgcggcgccactgaccatgtcggtgactgatcaggcttttgtcacactagccaccaatgacatctactgccagggcgccctggtcctggggcagtcactgaggagacacaggctgacgaggaagctggtggtgttgatcactcctcaggtgtccagcctgctcagggtcatcctctcgaaggtgttcgatgaagtcattgaagtgaatctaatcgatagtgccgactacatccacctggcctttctgaagagacctgagctcgggctcaccctcaccaagcttcactgttggactctcactcactacagcaagtgtgtcttcctggatgcagacactctggtgctgtccaatgtcgatgagctgtttgacaggggagagttttctgcggccccggaccccggatggccggattgcttcaatagcggggt

SEQ ID NO: 9184 - DNA, 566 bp, Homo sapiens
  source 1..566: mol_type = unassigned DNA; mol_type = unassigned DNA
gcctggaaatccacgcggattcccggagacggcgcctctgctctgcgggttcgtggcgaggaagtccacccactgctcccgggcgcaggtctgcaggtccgcgcccactgcccgcggcgccactgaccatgtcggtgactgatcaggcttttgtcacactagccaccaatgacatctactgccagggcgccctggtcctggggcagtcactgaggagacacaggctgacgaggaagctggtggtgttgatcactcctcaggtgtccagcctgctcaggtgctgtccaatgtcgatgagctgtttgacaggggagagttttctgcggccccggaccccggatggccggattgcttcaatagcggggtgtttgtcttccagccttctctccacacgcataaactcctgctacagcacgccatggaacacggcagctttgacggggcagaccaaggcttactgaatagtttcttcaggaactggtcgaccacagacatccacaagcacctgccgttcatctataacttgagtagtaacacgatgtacacttacagccctgccttcaagc

SEQ ID NO: 9185 - DNA, 1293 bp, Homo sapiens
  source 1..1293: mol_type = unassigned DNA; mol_type = unassigned DNA
atgtcggagacagagtttcaccatggtgcccaggctggtctcgaactcctgaggtcaagcaattcacccacctcagcctcccaaagtgctggaatgacagtgactgatcaggcttttgtcacactagccaccaatgacatctactgccagggcgccctggtcctggggcagtcactgaggagacacaggctgacgaggaagctggtggtgttgatcactcctcaggtgtccagcctgctcagggtcatcctctcgaaggtgttcgatgaagtcattgaagtgaatctaatcgatagtgccgactacatccacctggcctttctgaagagacctgagctcgggctcaccctcaccaagcttcactgttggactctcactcactacagcaagtgtgtcttcctggatgcagacactctggtgctgtccaatgtcgatgagctgtttgacaggggagagttttctgcggccccggaccccggatggccggattgcttcaatagcggggtgtttgtcttccagccttctctccacacgcataaactcctgctacagcacgccatggaacacggcagctttgacggggcagaccaaggcttactgaatagtttcttcaggaactggtcgaccacagacatccacaagcacctgccgttcatctataacttgagtagtaacacgatgtacacttacagccctgccttcaagcaattcggttccagtgcaaaggtcgtccactttttggggtccatgaaaccttggaactacaagtacaatccacagagtggctcggtgttggagcaaggctcagcgtccagcagccagcaccaggcggcattccttcatctctggtggacggtctaccagaacaacgtgctgcccctttataaaagcgtccaagcgggggaagcacgcgcgtctcctggtcacacactttgccacagtgatgtgggggggccgtgtgcggattcagcctctggtgttggagagccgtgtgaaaattcaacacccagtgcgggcgtgccgtgtgcaaattcaccactgggttctaaccagcctgctcagggccttccggagccgacccagatagtggatgagaccctgtccctacctgaaggacgccgttcagaagatgtcgacctggccgtctctgtttcccagatctccatcgaagagaaggtgaaggaattgagccccgaggaagagaggaggaagtgggaggaaggccgtatcgactacatggggaaggacgcgtttgctcgcatccaggagaagctggaccggttcctgcagtaa

SEQ ID NO: 9186 - DNA, 1158 bp, Homo sapiens
  source 1..1158: mol_type = unassigned DNA; mol_type = unassigned DNA
tgaagagacctgagctcgggctcaccctcaccaagcttcactgttggactctcactcactacagcaagtgtgtcttcctggatgcagacactctggtgctgtccaatgtcgatgagctgtttgacaggggagagttttctgcggccccggaccccggatggccggattgcttcaatagcggggtgtttgtcttccagccttctctccacacgcataaactcctgctacagcacgccatggaacacggcagctttgacggggcagaccaaggcttactgaatagtttcttcaggaactggtcgaccacagacatccacaagcacctgccgttcatctataacttgagtagtaacacgatgtacacttacagccctgccttcaagcaattcggttccagtgcaaaggtcgtccactttttggggtccatgaaaccttggaactacaagtacaatccacagagtggctcggtgttggagcaaggctcagcgtccagcagccagcaccaggcggcattccttcatctctggtggacggtctaccagaacaacgtgctgcccctttataaaagcgtccaagcgggggaagcacgcgcgtctcctggtcacacactttgccacagtgatgtgggggggccgtgtgcggattcagcctctggtgttggagagccgtgtgaaaattcaacacccagtgcgggcgtgccgtgtgcaaattcaccactgggttctaaccagcctgctcagggccttccggagccgacccagatagtggatgagaccctgtccctacctgaaggacgccgttcagaagatatgatagcttgtcctgaaactgagactcctgccgtgataacgtgtgacccactgtcccagccttcccctcagcctgcagacttcacagagactgaaaccatcttgcagccagcaaataaagtcgaaagtgtctcatccgaggaaaccttcgaaccaagccaggaactccctgctgaggctctcagggaccccagtctgcaggatgcactggaggtggtatccaaattcttccccttgcccaaggctcccggtgggggccatccaccgtcactgaggtcaactgcatgcacacaacagctgttaatttttcagcctcatttaacaaaaaataagaatcggcttccctctt

SEQ ID NO: 9187 - DNA, 731 bp, Homo sapiens
  source 1..731: mol_type = unassigned DNA; mol_type = unassigned DNA
gctacagcacgccatggaacacggcagctttgacggggcagaccaaggcttactgaatagtttcttcaggaactggtcgaccacagacatccacaagcacctgccgttcatctataacttgagtagtaacacgatgtacacttacagccctgccttcaagcaattcggttccagtgcaaaggtcgtccactttttggggtccatgaaaccttggaactacaagtacaatccacagagtggctcggtgttggagcaaggctcagcgtccagcagccagcaccaggcggcattccttcatctctggtggacggtctaccagaacaacgtgctgcccctttataaaagcgtccaagcgggggaagcacgcgcgtctcctggtcacacactttgccacagtgatgtgggggggccgtgtgcggattcagcctctggtgttggagagccgtgtgaaaattcaacacccagtgcgggcgtgccgtgtgcaaattcaccactgggttctaaccagcctgctcagggccttccggagccgacccagatagtggatgagaccctgtccctacctgaaggacgccgttcagaagatatgatagcttgtcctgaaactgagactcctgccgtgataacgtgtgacccactgtcccagccttcccctcagcctgcagacttcacagagactgaaaccatcttggtcgacctggccgtctctgtttcccagatctccatcgaag

SEQ ID NO: 9188 - DNA, 2900 bp, Homo sapiens
  source 1..2900: mol_type = unassigned DNA; mol_type = unassigned DNA
ttcgtagagacagagtttcaccatggtgcccaggctggtctcgaactcctgaggtcaagcaattcacccacctcagcctcccaaagtgctggaatgacagtgactgatcaggcttttgtcacactagccaccaatgacatctactgccagggcgccctggtcctggggcagtcactgaggagacacaggctgacgaggaagctggtggtgttgatcactcctcaggtgtccagcctgctcagggtcatcctctcgaaggtgttcgatgaagtcattgaagtgaatctaatcgatagtgccgactacatccacctggcctttctgaagagacctgagctcgggctcaccctcaccaagcttcactgttggactctcactcactacagcaagtgtgtcttcctggatgcagacactctggtgctgtccaatgtcgatgagctgtttgacaggggagagttttctgcggccccggaccccggatggccggattgcttcaatagcggggtgtttgtcttccagccttctctccacacgcataaactcctgctacagcacgccatggaacacggcagctttgacggggcagaccaaggcttactgaatagtttcttcaggaactggtcgaccacagacatccacaagcacctgccgttcatctataacttgagtagtaacacgatgtacacttacagccctgccttcaagcaattcggttccagtgcaaaggtcgtccactttttggggtccatgaaaccttggaactacaagtacaatccacagagtggctcggtgttggagcaaggctcagcgtccagcagccagcaccaggcggcattccttcatctctggtggacggtctaccagaacaacgtgctgcccctttataaaagcgtccaagcgggggaagcacgcgcgtctcctggtcacacactttgccacagtgatgtgggggggccgtgtgcggattcagcctctggtgttggagagccgtgtgaaaattcaacacccagtgcgggcgtgccgtgtgcaaattcaccactgggttctaaccagcctgctcagggccttccggagccgacccagatagtggatgagaccctgtccctacctgaaggacgccgttcagaagatgtcgacctggccgtctctgtttcccagatctccatcgaagagaaggtgaaggaattgagccccgaggaagagaggaggaagtgggaggaaggccgtatcgactacatggggaaggacgcgtttgctcgcatccaggagaagctggaccggttcctgcagtaatccggcagctggtgggcgttgtgtgtagttagacaatgtcctgttgggtggtcctgttgcgtggagatctcctctggtcctttcaaagggaaacgctgttgaaccttgtgcctctatttatgcttaatccatttgagtgcctcacacaaaaaacgtagagtatagaaatccaccttaaagcccctcgccccaacttctccaccaacgccttctgggctttcttcagaggtcacttctacccttgaagctgtcggcaaaagcgagcagtaataacattctagtagactctcgatggtggtctccgctcttgcccgaaggacctctgaagtacgctggagctgtgttgtacaggtgctgtgagacctaccctattcagaattaaacctcactgcaaatttcctcccatcacgaagctaacaacactaatatacgtatttagcacctctgaggctttgccatggagacccatttctgtagggctaaggaaacatttagacgtggtgactgactttcatttggacttggcgaagtgtatctgagaaacacctcggctgtggtctctctgctttaaatcctaacaggacttcctagagcgttgacagaaattctactcgtggacgttgggaagaaagattgtaggtggcttggggaatgtgggtggcttagaggatctaaaccgattcacttcctggttgagaagcaacgagggcttgctctaaatcgtttagaggataacaggatctagagatgctctctgcttgacaacaaaagtcagggtgcagtcggtccacccttgactgctcttggcttggtctctaccctcactacctcagttctcaataacttagtgaatcactgccctcctcaaagccatttccactcagctctttccagagaattctcagttttatgagacgggaaactttatttcacgagaaagcctcattgtcagaagtatcttcattcaatgggcacaatatgctgtgtatctcaccaggtagctgtcaggggccaccgagagtgtcgttaaaaatgggcatggttgtaataaaggaggaaagtgcgacttttgaaatgtttggaaggtttatttctcatgcacattccagggaaaagcagagagtaaattagagacgggataggaaggccgtgggagaactcgatcctagcctgtgtcagctggatgtgtttacgtggagaggcgtggccactttttaggtcacctgaagcagtttagcctttggatagaggaacctgcctgaatttatggcattagtggtggcatttttttgtgtacaagatgtgggtgatggaggggctgtttctttttccgtgtgggtggttaataatcgtcagtctcggagggcgaggctcgtaggatatttcaggtgagtcagggttggatggtcatcggctttcagaaggagaccacgggaatgttcagggaaacaatgtcagcttctctgaggaccagaattcatgttcacgggcagtgatgagttggcttatggagtgagtccagtctggaattccgccgtgcattctagcctgtatcatctcatttggacaaatgctggcacgttgaaattaaaatgttaaaaaacagc

SEQ ID NO: 9189 - DNA, 639 bp, Homo sapiens
  source 1..639: mol_type = unassigned DNA; mol_type = unassigned DNA
aggcctggaaatccacgcggcttcccaaagacggcgcctctgttctgcgggttcgtgacgaggatttatttccacccactgcgcctgggcgcaggtctgcgggtccgcgcccactgcgtgcggcgccacggaccatgtcggtgactgatcaggcttttgtcacactggccacagatgacatctactgccagggcgccctggtcctggggcagtcactgaggagacacaggctgacgaggaagctggtggtgttgatcactcctcaggtgtccagcctgctcagtctctccaaaaggtgcaagatatcatccagccacttggactgagagctcatcccaatccagttcctgatcagatggggccctgccactcgttccagccaggtgacctggtgttcgttaaaaagttccagaaagaaggactcctgcttagaaaagacctcatactgtcatccttaccaccccaatggctctaaaagtagaaaggaatgcttacattcatgacaccccctagtacaaagcatgtttaactgtaatctatgactaactaccctaattactggattggcagaaccctttttctccttctcttgtttagtcttccaaccattatatattaaaattagtttcttaaatttgt

SEQ ID NO: 9190 - DNA, 944 bp, Homo sapiens
  source 1..944: mol_type = unassigned DNA; mol_type = unassigned DNA
gccagaagagaagactcaactctttgcagaaaacagaaactgcctttgagtagagaagggctgagaaggaagatgctaaggatattctgaggggtgatcagaagattccttgagtgcaggggggcaggcaaggggtagaaagaaactgttgtcacagagtcataaaattctaagccactgcaatctccaggctggacttgattttgtgacagtgtctcctttttgtgggctgtagtgtagtgacaagttcttttgctgtttttccactccgtgcctttgctgaaagtctgccgcactggcacatgaagtggaaactccctctttgaatgcagcagcattggataattgtggatgttctgtggcgccgcaccacgacttgatcaccagttgtttcttcagggcaagggtctcactctgtcacccaggctggagtagagtggtacaatcacagctcactgcagcctcaaactcccaggctcaagtatcctcctacctcagcctcccaagtagctgtaactacagtgactgatcaggcttttgtcacactggccacagatgacatctactgccagggcgccctggtcctggggcagtcactgaggagacacaggctgacgaggaagctggtggtgttgatcactcctcaggtgtccagcctgctcagggtcttaccgtgttgcttaggctggagtgcagcggcaccgtcagggctcacagcagtcttgacctcccaggctcaagtcatcctcttgcctcagccccgctagtacctgggatgacagacttgcacgaccatgcacagggaacacgcagccttattgccacgtacctgtcctggggcaccttgccgcctgccagctggaccacaggagggaacacgtccatcaggctcgtgggctctccaatcactcagccagccaggagcaccctgggccagtggaaaa

SEQ ID NO: 9191 - DNA, 623 bp, Homo sapiens
  source 1..623: mol_type = unassigned DNA; mol_type = unassigned DNA
aggcctggaaatccacgcggcttcccaaagacggcgcctctgttctgcgggttcgtgacgaggatttatttccacccactgcgcctgggcgcaggtctgcgggtccgcgcccactgcgtgcggcgccacggaccatgtcggtgactgatcaggcttttgtcacactggccacagatgacatctactgccagggcgccctggtcctggggcagtcactgaggagacacaggctgacgaggaagctggtggtgttgatcactcctcaggtgtccagcctgctcagggacatggatgaagctggaaaccatgactctgagcaaactattgcagggatagaaaaccaaacactgcatgttctcactcataggtgggaattgaacaatgagaacacttggacacagggtggagaacatcacacactggagccagtcgtggggcggggagaggggggagggatagctttaggagatatacctaatgtaaatgatgagtaaacgggtgcagcacaccaacatggtacatgtatatatatgtatcaaacctgcacattgtgcacatgtaccctagaacttaaagtataataaaaaaaatttataaataaaaatgtttaggcaattaaaaaa

SEQ ID NO: 9192 - DNA, 694 bp, Homo sapiens
  source 1..694: mol_type = unassigned DNA; mol_type = unassigned DNA
ctgggcgcaggtctgcgggtccgcgcccactgcgtgcggcgccacggaccatgtcggggtctcactctgtcacccaggctggagtagagtggtacaatcacagctcactgcagcctcaaactcccaggctcaagtatcctcctacctcagcctcccaagtagctgtaactacagtgactgatcaggcttttgtcacactggccacagatgacatctactgccagggcgccctggtcctggggcagtcactgaggagacacaggctgacgaggaagctggtggtgttgatcactcctcaggtgtccagcctgctcagggtctcactcgtcgcccaggcttgagtgcagtgataccatctcggctcactgcaacctctccctcactggcccaagtgatcttccctcctcagccttctaagcagctgggaccacaagtatgtgcccgcatgcttggctatttttatttttattttttgtatttttggtagagacagggtttcgtcacattgcctaggctgatcttgaactcctggactcactcagtccacccaggttggcctcccaaagtgctgggattacaggcatgagccacggcgccctgccaaggagtctttttaaaaataatttccttttacaattccctttgtctttaattctcaaataaagcaaatacataaataaatgcatctaatgaa

SEQ ID NO: 9193 - DNA, 149 bp, Homo sapiens
  source 1..149: mol_type = unassigned DNA; mol_type = unassigned DNA
atgtcggtgactgatcaggcttttgtcacactggccacagatgacatctactgccagggcgccctggtcctggggcagtcactgaggagacacaggctgacgaggaagctggtggtgttgatcactcctcaggtgtccagcctgctcag

SEQ ID NO: 9194 - DNA, 3574 bp, Homo sapiens
  source 1..3574: mol_type = unassigned DNA; mol_type = unassigned DNA
agtgacgctgcggcctccttctgcctaggtcccaacgcttcggggcaggggtgcggtcttgcaataggaagccgagcgtcttgcaagcttcccgtcgggcaccagctactcggccccgcaccctacctggtgcattccctagacacctccggggtccctacctggagatccccggagccccccttcctgcgccagccatgcctttaaaccgcactttgtccatgtcctcactgccaggactggaggactgggaggatgaattcgacctggagaacgcagtgctcttcgaagtggcctgggaggtggctaacaaggtgggtggcatctacacggtgctgcagacgaaggcgaaggtgacaggggacgaatggggcgacaactacttcctggtggggccgtacacggagcagggcgtgaggacccaggtggaactgctggaggcccccaccccggccctgaagaggacactggattccatgaacagcaagggctgcaaggtgtatttcgggcgctggctgatcgagggaggccctctggtggtgctcctggacgtgggtgcctcagcttgggccctggagcgctggaagggagagctctgggatacctgcaacatcggagtgccgtggtacgaccgcgaggccaacgacgctgtcctctttggctttctgaccacctggttcctgggtgagttcctggcacagagtgaggagaagccacatgtggttgctcacttccatgagtggttggcaggcgttggactctgcctgtgtcgtgcccggcgactgcctgtagcaaccatcttcaccacccatgccacgctgctggggcgctacctgtgtgccggtgccgtggacttctacaacaacctggagaacttcaacgtggacaaggaagcaggggagaggcagatctaccaccgatactgcatggaaagggcggcagcccactgcgctcacgtcttcactactgtgtcccagatcaccgccatcgaggcacagcacttgctcaagaggaaaccagatattgtgacccccaatgggctgaatgtgaagaagttttctgccatgcatgagttccagaacctccatgctcagagcaaggctcgaatccaggagtttgtgcggggccatttttatgggcatctggacttcaacttggacaagaccttatacttctttatcgccggccgctatgagttctccaacaagggtgctgacgtcttcctggaggcattggctcggctcaactatctgctcagagtgaacggcagcgagcagacagtggttgccttcttcatcatgccagcgcggaccaacaatttcaacgtggaaaccctcaaaggccaagctgtgcgcaaacagctttgggacacggccaacacggtgaaggaaaagttcgggaggaagctttatgaatccttactggttgggagccttcccgacatgaacaagatgctggataaggaagacttcactatgatgaagagagccatctttgcaacgcagcggcagtctttcccccctgtgtgcacccacaatatgctggatgactcctcagaccccatcctgaccaccatccgccgaatcggcctcttcaatagcagtgccgacagggtgaaggtgattttccacccggagttcctctcctccacaagccccctgctccctgtggactatgaggagtttgtccgtggctgtcaccttggagtcttcccctcctactatgagccttggggctacacaccggctgagtgcacggttatgggaatccccagtatctccaccaatctctccggcttcggctgcttcatggaggaacacatcgcagacccctcagcttacggtatctacattcttgaccggcggttccgcagcctggatgattcctgctcgcagctcacctccttcctctacagtttctgtcagcagagccggcggcagcgtatcatccagcggaaccgcacggagcgcctctccgaccttctggactggaaatacctaggccggtactatatgtctgcgcgccacatggcgctgtccaaggcctttccagagcacttcacctacgagcccaacgaggcggatgcggcccaggggtaccgctacccacggccagcctcggtgccaccgtcgccctcgctgtcacgacactccagcccgcaccagagtgaggacgaggaggatccccggaacgggccgctggaggaagacggcgagcgctacgatgaggacgaggaggccgccaaggaccggcgcaacatccgtgcaccagagtggccgcgccgagcgtcctgcacctcctccaccagcggcagcaagcgcaactctgtggacacggccacctccagctcactcagcaccccgagcgagcccctcagccccaccagctccctgggcgaggagcgtaactaagtccgccccaccacactccccgcctgtcctgcctctctgctccagagagaggatgcagaggggtgctgctcctaaacccccgctccagatctgcactgggtgtggccccgcagtgcccccacccagtccgccaaacactccaccccctccagctccagtttccaagttcctgcactccagaatccacaaagccgtgcctttctctggctccagaatatgcataatcagcgccctggagtcccctgggcctggaccgcttcccagaggccaggaatctgccattactctgcggtggtgccagaggttttaggaaacctggcatggtgctttcaggtctggggcttttagagccccccgtgtggcttacaaattctacagcatacagagcaggccacgctcaggcccggcatgcgggccaccaagttctggaaaccacgtggtgtccctgcgaatggggcgatcaagtccagagccggggcactttcagagtttgaaggtaactgagagcagatggtcctccatttcaactccagaagtggggctctgggagggatgttctagccctccctggcatgtcagagccaggctctgcctggaggatccctccatccggctcctgtcatcccctacactttggccaagcaagaggtggtagaaccacttggctgctcattccttctggaggacacacagtctcagtccagatgccttcctgtctttctggccctttctggaccagatcctactcttcctttctaaatctgagatctccctccagggaatccgcctgcagaggacagagctggctgtcttcccccacccctaacctggcttattcccaactgctctgcccactgtgaaaccactaggttctaggtcctggcttctagatctggaaccttaccacgttactgcatactgatccctttcccatgatccagaactgaggtcactgggttctagaacccccacatttacctcgaggctcttccatccccaaactgtgccctgccttcagctttggtgaaagggagggcccctcatgtgtgctgtgctgtgtctgcaccgcttggtttgcagttgagaggggagggcaggaggggtgtgattggagtgtgtccggagatgagatgaaaaaaatacatctatatttaagaatccca

SEQ ID NO: 9195 - DNA, 3378 bp, Homo sapiens
  source 1..3378: mol_type = unassigned DNA; mol_type = unassigned DNA
cagtgacgctgcggcctccttctgcctaggtcccaacgcttcggggcaggggtgcggtcttgcaataggaagccgagcgtcttgcaagcttcccgtcgggcaccagctactcggccccgcaccctacctggtgcattccctagacacctccggggtccctacctggagatccccggagccccccttcctgcgccagccatgcctttaaaccgcactttgtccatgtcctcactgccaggactggaggactgggaggatgaattcgacctggagaacgcagtgctcttcgaagtggcctgggaggtggctaacaaggtgggtggcatctacacggtgctgcagacgaaggcgaaggtgacaggggacgaatggggcgacaactacttcctggtggggccgtacacggagcagggcgtgaggacccaggtggaactgctggaggcccccaccccggccctgaagaggacactggattccatgaacagcaagggctgcaagttcctggcacagagtgaggagaagccacatgtggttgctcacttccatgagtggttggcaggcgttggactctgcctgtgtcgtgcccggcgactgcctgtagcaaccatcttcaccacccatgccacgctgctggggcgctacctgtgtgccggtgccgtggacttctacaacaacctggagaacttcaacgtggacaaggaagcaggggagaggcagatctaccaccgatactgcatggaaagggcggcagcccactgcgctcacgtcttcactactgtgtcccagatcaccgccatcgaggcacagcacttgctcaagaggaaaccagatattgtgacccccaatgggctgaatgtgaagaagttttctgccatgcatgagttccagaacctccatgctcagagcaaggctcgaatccaggagtttgtgcggggccatttttatgggcatctggacttcaacttggacaagaccttatacttctttatcgccggccgctatgagttctccaacaagggtgctgacgtcttcctggaggcattggctcggctcaactatctgctcagagtgaacggcagcgagcagacagtggttgccttcttcatcatgccagcgcggaccaacaatttcaacgtggaaaccctcaaaggccaagctgtgcgcaaacagctttgggacacggccaacacggtgaaggaaaagttcgggaggaagctttatgaatccttactggttgggagccttcccgacatgaacaagatgctggataaggaagacttcactatgatgaagagagccatctttgcaacgcagcggcagtctttcccccctgtgtgcacccacaatatgctggatgactcctcagaccccatcctgaccaccatccgccgaatcggcctcttcaatagcagtgccgacagggtgaaggtgattttccacccggagttcctctcctccacaagccccctgctccctgtggactatgaggagtttgtccgtggctgtcaccttggagtcttcccctcctactatgagccttggggctacacaccggctgagtgcacggttatgggaatccccagtatctccaccaatctctccggcttcggctgcttcatggaggaacacatcgcagacccctcagcttacggtatctacattcttgaccggcggttccgcagcctggatgattcctgctcgcagctcacctccttcctctacagtttctgtcagcagagccggcggcagcgtatcatccagcggaaccgcacggagcgcctctccgaccttctggactggaaatacctaggccggtactatatgtctgcgcgccacatggcgctgtccaaggcctttccagagcacttcacctacgagcccaacgaggcggatgcggcccaggggtaccgctacccacggccagcctcggtgccaccgtcgccctcgctgtcacgacactccagcccgcaccagagtgaggacgaggaggatccccggaacgggccgctggaggaagacggcgagcgctacgatgaggacgaggaggccgccaaggaccggcgcaacatccgtgcaccagagtggccgcgccgagcgtcctgcacctcctccaccagcggcagcaagcgcaactctgtggacacggccacctccagctcactcagcaccccgagcgagcccctcagccccaccagctccctgggcgaggagcgtaactaagtccgccccaccacactccccgcctgtcctgcctctctgctccagagagaggatgcagaggggtgctgctcctaaacccccgctccagatctgcactgggtgtggccccgcagtgcccccacccagtccgccaaacactccaccccctccagctccagtttccaagttcctgcactccagaatccacaaagccgtgcctttctctggctccagaatatgcataatcagcgccctggagtcccctgggcctggaccgcttcccagaggccaggaatctgccattactctgcggtggtgccagaggttttaggaaacctggcatggtgctttcaggtctggggcttttagagccccccgtgtggcttacaaattctacagcatacagagcaggccacgctcaggcccggcatgcgggccaccaagttctggaaaccacgtggtgtccctgcgaatggggcgatcaagtccagagccggggcactttcagagtttgaaggtaactgagagcagatggtcctccatttcaactccagaagtggggctctgggagggatgttctagccctccctggcatgtcagagccaggctctgcctggaggatccctccatccggctcctgtcatcccctacactttggccaagcaagaggtggtagaaccacttggctgctcattccttctggaggacacacagtctcagtccagatgccttcctgtctttctggccctttctggaccagatcctactcttcctttctaaatctgagatctccctccagggaatccgcctgcagaggacagagctggctgtcttcccccacccctaacctggcttattcccaactgctctgcccactgtgaaaccactaggttctaggtcctggcttctagatctggaaccttaccacgttactgcatactgatccctttcccatgatccagaactgaggtcactgggttctagaacccccacatttacctcgaggctcttccatccccaaactgtgccctgccttcagctttggtgaaagggagggcccctcatgtgtgctgtgctgtgtctgcaccgcttggtttgcagttgagaggggagggcaggaggggtgtgattggagtgtgtccggagatgagatgaaaaaaatacatctatatttaagaa

SEQ ID NO: 9196 - DNA, 427 bp, Homo sapiens
  source 1..427: mol_type = unassigned DNA; mol_type = unassigned DNA
gtatctacattcttgaccggcggttccgcagcctggatgattcctgctcgcagctcacctccttcctctacagtttctgtcagcagagccggcggcagcgtatcatccagcggaaccgcacggagcgcctctccgaccttctggactggaaatacctaggccgggtaggacccccactttcctatcctctcctggcaaatcagcagctcctggctaggggtctttggtgcagggtgcagggtctcatcctacttgtaacagttgctgtccctttaagcaatgaaccaggccgatcgcgatggtggctcatggttgtaatcccagcactttgggaggcctaacaggaaggatcgcatgagctcaggagttaagagaccagcctgggcaacattttatttttactaaaaataaaaaaaaatcagccgag

SEQ ID NO: 9197 - DNA, 578 bp, Homo sapiens
  source 1..578: mol_type = unassigned DNA; mol_type = unassigned DNA
atgaacaagatgctggataaggaagacttcactatgatgaagagagccatctttgcaacgcagcggcagtctttcccccctgtgtgcacccacaatatgctggatgactcctcagaccccatcctgaccaccatccgccgaatcggcctcttcaatagcagtgccgacagggtgaaggtgattttccacccggagttcctctcctccacaagccccctgctccctgtggactatgaggagtttgtccgtggctgtcaccttggagtcttcccctcctactatgagccttggggctacacaccggctgagtgcacggttatgggaatccccagtatctccaccaatctctccggcttcggctgcttcatggaggaacacatcgcagacccctcagcttacggtcagcgcccaggcccctgaggattctggaagggggcttgagaacagtgactcctggatcctgggaaggaggagcttgcacccttggagaccaggggcaccaggaaatgggggggctctcgggccgctgggagaggaggggtcctggtgccacagagtcctggagaccatgaagatct

SEQ ID NO: 9198 - DNA, 536 bp, Homo sapiens
  source 1..536: mol_type = unassigned DNA; mol_type = unassigned DNA
aaacaaactaactaaagaagcctaacagtaaatggcagctggtgtgtatgtgaccctgttgctctgcttcctccagggacacggccaacacggtgaaggaaaagttcgggaggaagctttatgaatccttactggttgggagccttcccgacatgaacaagatgctggataaggaagacttcactatgatgaagagagccatctttgcaacgcagcggcagtctttcccccctgtgtgcacccacaatatgctggatgactcctcagaccccatcctgaccaccatccgccgaatcggcctcttcaatagcagtgccgacagggtgaaggtgattttccacccggagttcctctcctccacaagccccctgctccctgtggactatgaggagtttgtccgtggctgtcaccttggagtcttcccctcctactatgagccttggggctacacaccggctgagtgcacggttatgggaatccccagtatctccaccaatctctccggcttcggctgcttcatggaggaacacatcgca

SEQ ID NO: 9199 - DNA, 459 bp, Homo sapiens
  source 1..459: mol_type = unassigned DNA; mol_type = unassigned DNA
caagaggaaaccagatattgtgacccccaatgggctgaatgtgaagaagttttctgccatgcatgagttccagaacctccatgctcagagcaaggctcgaatccaggagtttgtgcggggccatttttatgggcatctggacttcaacttggacaagaccttatacttctttatcgccggccgctatgagttctccaacaagggtgctgacgtcttcctggaggcattggctcggctcaactatctgctcagagtgaacggcagcgagcagacagtggttgccttcttcatcatgccagcgcggaccaacaatttcaacgtggaaaccctcaaaggccaagctgtgcgcaaacagctttggttagcagccctcgctccggcccctggcgcagcccactcccagatgcatgctttgggtcctgtgtttctcctagagtctcagttttttgttttgtttgt

SEQ ID NO: 9200 - DNA, 718 bp, Homo sapiens
  source 1..718: mol_type = unassigned DNA; mol_type = unassigned DNA
aggtcccaacgcttcggggcaggggtgcggtcttgcaataggaagccgagcgtcttgcaagcttcccgtcgggcaccagctactcggccccgcaccctacctggtgcattccctagacacctccggggtccctacctggagatccccggagccccccttcctgcgccagccatgcctttaaaccgcactttgtccatgtcctcactgccaggactggaggactgggaggatgaattcgacctggagaacgcagtgctcttcgaagtggcctgggaggtggctaacaagggccccagaactatggacctcggccggggcctgccctcacacgcttgggcccacagtgggtggcatctacacggtgctgcagacgaaggcgaaggtgacaggggacgaatggggcgacaactacttcctggtggggccgtacacggagcagggcgtgaggacccaggtggaactgctggaggcccccaccccggccctgaagaggacactggattccatgaacagcaagggctgcaaggtgtatttcgggcgctggctgatcgagggaggccctctggtggtgctcctggacgtgggtgcctcagcttgggccctggagcgctggaagggagagctctgggatacctgcaacatcggagtgccgtggtacgaccgcgaggccaacgacgctgtcctctttggctttctgaccacctggttcctgggtgag

SEQ ID NO: 9201 - DNA, 4835 bp, Homo sapiens
  source 1..4835: mol_type = unassigned DNA
gttcctaccggcctggtccagcggacagcggctgcagcgggggcgccggctgggagctgtttttggaaggaagaaagatggaaagcggtgcagttctgctggaatccaaatcctccccatttaacctactgcatgagatgcatgagcttcgcctcctgggtcacctgtgtgacgtgacagtcagcgtggagtatcagggtgtccgcaaagacttcatggcccacaaggcagtgctggctgccaccagcaagttttttaaggaagtgttccttaatgagaagagtgtggatggtactaggactaatgtctacttaaatgaagtgcaggttgctgactttgcttcatttcttgagtttgtctacactgcaaaggtacaggtggaagaagatcgggtgcagcgaatgctggaagtggctgaaaagctgaaatgtttggatttatcagaaacttgttttcaattaaagaaacagatgttagagtcagtacttttggagttgcaaaatttctcagagtctcaggaggtggaggtgagcagtggctcccaagttagtgctgctcctgcccccagggcaagtgtggccaccgatggccctcaccccagtggtctcacggattccttggactacccaggagagagagccagcaatggcatgtcttcagatttgccaccgaagaagtccaaggacaaactagacaagaagaaagaggtagttaaacctccctaccctaaaatcaggagagctagtggaaggctggctgggaggaaggtctttgtggagatccctaaaaagaaatatacgagaagactccgagagcagcagaaaactgctgagggtgatgtgggggactacaggtgtccccaggaccaaagcccggacagggtgggcacggagatggagcaggtttccaaaaatgagggttgccaggcaggtgctgagttggaggaattgtcaaagaaagcagggccggaggaggaagaggaggaggaggaggaggacgaagaaggggagaagaagaagagcaactttaagtgcagcatttgcgagaaggcgtttctgtatgagaagagcttcctgaagcacagcaagcaccgccacggcgtggccaccgaggtggtgtaccgctgcgacacctgcggccagaccttcgccaaccgctgcaacctgaagagccaccagcgccacgtgcacagcagcgagcgccatttcccatgcgagctgtgcgggaagaagttcaagcgcaagaaggacgtgaagcggcacgtgctgcaggtgcatgagggcggcggcgagcggcaccgctgcggccagtgcggcaagggcctgagttccaagacagcgctgcggctgcacgagcgcacacacacgggagaccggccctacggctgcaccgagtgcggcgccaggttctcgcagccgtccgcgctcaagacgcacatgagaattcatacaggggaaaaaccttttgtctgtgatgaatgtggtgcaagattcactcagaaccacatgctgatttatcataaaaggtgtcacacaggtgaaagaccttttatgtgtgaaacatgtggcaagagttttgcttctaaggagtacttaaaacaccacaatagaatccatactggatccaaaccctttaaatgtgaagtatgtttcaggacttttgcccagcggaattcactgtaccagcatattaaagtccacacaggggagcgtccctactgctgtgaccagtgcggcaagcagttcacccagctcaacgccctccagcgccaccgccgcatccacacaggggagaggccattcatgtgcaatgcgtgcggacggacattcaccgacaagtccactcttcggcggcacacctcaatacacgataagaatactccatggaagtctttccttgtcattgtagatggctcgcccaagaacgatgacggacacaagactgaacagcctgacgaagagtatgtgtcatccaagctttcggataaattgctgtcttttgcagaaaatggccatttccacaacctggctgcagtccaagacactgtacctaccatgcaggagaacagttctgctgacacagcctgcaaggcagatgactccgtggtgtcccaggacaccctcctggccaccaccatcagtgagcttagcgagctgaccccacagacagactcgatgcccacacagcttcactctttgagcaacatggaataagagcttcaagcagttcccatcctgttagtctgcgtgtgtggtagctgaactcaagatgatgtggggctaagaaaaataattgtccatgtgcaaagatgtgggcaagaatggcctctgcagattttcctgaacttctgctaacttgcacggctttatcacagcatttttaaagctttccctcaaaaatcctgatctgcatgatctcagctactttattgacaaaaaggcagtgaacataacctcacttaattctggtgtagggtgtatgtgctaatcgttctaattcttgattacctagtttatagataactgctggtcttaattgcagagtacagagaactgaaccagctcctgatattgtagttagcagtcttcctggcttctcactctgccttatatttccatgtgggtttacttctctcataactactttcaaggtatttttcttccaagctgaaataaaactggggccacatattttcagtcatttcttccctgttgaattgaagcaaatcagattttctgtggggaccctcaaatgcaactgaagaaatagattgttgcattcattcctccccaccccccatttgtaggcagtaaacaaagtatgactgacagattgaacacctgcaaaactgctagcgtaatctcagcacatacgcagctaggaagtttgtcataaaatcaacttagaaatgagatgaggctgttcagtttgtcttaaaaaaatcagattaggtaaaagctgtcctaccaaagagtctagcaaaacaatatagtatttttttgcagaggcatgaaaaattaagacgctttagagtacttgaaagttgtgtagtcattttatttgcaaaatgaggtgactgtggcaaattatagaacacagagtattattacttttgccaggtttttctgacttgatttctgtaatttccagaaacccagacttctcatttccacacctagagatggaaacaggcaagtaactgacatgtctatttccttgggagcatgtgagaacatagcagtagggaccaaaagtctcagcacacttacctccgattatgccttaaagagttgattgtgaagaaccagtaactttgtcccaaatgcttctttggctgtttcatgcaggacttaattattgcttttaaaaattcacaatgaaaagacgattctgctgtatttgttaaacgttgacatttggttctagggccttgagtatgtgccacgtgcttgtgaaatgctatgattcacatgtaacatttaaacattaatttaaaaagggaaccttggagaattcttttgttcactagttccttttttctctacatttttaatttattaaacttgctgtgaaaacactttgattttctaagaggaaggtactttaagttccagaatgaacatgtagctgcactatgccagaaattaatgagggaagactttcttcctaagtgcttatgttttaacttatgttagtgaaaccactacaaggtgtttcaggcgctgataacatgcttcacacctgcccttggaggtcacagtactaatttacttcaaatttagttatgacagtgtcactgtatcctagttatgtttacagcacaaataaataatgactgtcatacatccagaggagaccgaacctgcccagctgatgtactgttttatggaataaagtcacttgatcagaaggaattgaaacaatagatcattttgttacctactggagggatttttgtcttgaatttgtttccttagaaattctacaaaaaaatgttgttaataaatgtctgctttgtaaaagcagttttgcaattttttaaagatctatttctgttataatttaggttctgcagaaatatgattcttaattgaaacatataatttgcttaattacgtgaataatgaaatgtaaaatccgggtccataagcctttatttcatacagtcctaggattaagctgtttaactgcttggatcccagttggtctctggcagtgggatcctggagaggagaaatcctggcctctgctcatgcgcaggccacaaccgggctggaagtgcggttgagctctctgccactttcttcaatgtaaaaagtaggcatcaaagatacgacttctactatatacatttctctgtccctgagaacagagaaacgtaaccctgtaggggactggttacagaggacctcctggagcatctgccccattcctccaagtccaagcacagccatgctgagtggaagcgaggccaccatctgagtggattggtcccaagtgtgtaatgaggaaagtggccaggtgccggcacagtgcctctcccagagcctcaagaagggccatttaggagcttgcttcaaccattttccaaccattttctgtgaaatgctgtcagcccaaactccaaagggatgtgcagcctttcgttttaccaaattctttgctgtcgtttggaaaaaatgggccatgtggtggagacctttatttaaggtgatttttacagaaatgtgattttgctgtaggtgattatccaaacaagtaaatttgagtgtataatttaatttttaacctgttaaataaaccttgtccctccaaggagttcatttttgggaaac

SEQ ID NO: 9202 - DNA, 795 bp, Homo sapiens
  source 1..795: mol_type = unassigned DNA
ggacctgcgcgtctcggggatgcgggagcgggggcagggggcggcccgagggcctgatccacgcggccccggatgcccgcgtcgggaggcggcgcgtcgggccgaggaggggcttctctgtggctgcagtagtttgttctctgggtcgtctttggagtggccgagcggcgtccgggcgctggggcggccaagtggcgcgggaagggtgggaggtgccgtgagggcggcgaggacagcggcggatttaagccccactggaaaccccggcccttgtggccgtggactgggctgcgggtagcagcgtctcctggaagggctctggccccgtgagcctcggggattcaggggccgccgacgttggtgcagatgccgggcgcactgggaggcggccggaatgccaatgagattcggcggatacgcagctgtcaccggccgcagactgccctgtcgccacctccagtgcctgcactccagtagccaagcaacataggaaatcgcgctcagaacccactttgttgattgagaaatcagacacgttgaatccgaggtgacatctgtggtctggccgaaggaggctagaaggaaggcatgtgctttggatggatggaaacaggaatcaaagaggaagctgtttttggaaggaagaaagatggaaagcggtgcagttctgctggaatccaaatcctccccatttaacctactgcatgagatgcatgagcttcgcctcctgggtcacctgtgtgacgtgacagtcagcgtggagtatcagggtgtccgcaaagacttcatggccca

SEQ ID NO: 9203 - DNA, 675 bp, Homo sapiens
  source 1..675: mol_type = unassigned DNA
atgagggttgccaggcaggtgctgagttggaggaattgtcaaagaaagcagggccggaggaggaagaggaggaggaggaggaggacgaagaaggggagaagaagaagagcaactttaagtgcagcatttgcgagaaggcgtttctgtatgagaagagcttcctgaagcacagcaagcaccgccacggcgtggccaccgaggtggtgtaccgctgcgacacctgcggccagaccttcgccaaccgctgcaacctgaagagccaccagcgccacgtgcacagcagcgagcgccatttcccatgcgagctgtgcgggaagaagttcaagcgcaagaaggacgtgaagcggcacgtgctgcaggtgcatgagggcggcggcgagcggcaccgctgcggccagtgcggcaagggcctgagttccaagacagcgctgcggctgcacgagcgcacacacacgggagaccggccctacggctgcaccgagtgcggcgccaggttctcgcagccgtccgcgctcaagacgcacatgaggtgaaagaccttttatgtgtgaaacatgtggcaagagttttgcttctaaggagtacttaaaacaccacaatagaatccatactggatccaaaccctttaaatgtgaagtatgtttcaggacttttgcccagcggaattcactgtac

SEQ ID NO: 9204 - DNA, 390 bp, Homo sapiens
  source 1..390: mol_type = unassigned DNA
atgtttcaggacttttgcccagcggaattcactgtaccagcatattaaagtccacacagatacacgataagaatactccatggaagtctttccttgtcattgtagatggctcgcccaagaacgatgacggacacaagactgaacagcctgacgaagagtatgtgtcatccaagctttcggataaattgctgtcttttgcagaaaatggccatttccacaacctggctgcagtccaagacactgtacctaccatgcaggagaacagttctgctgacacagcctgcaaggcagatgactccgtggtgtcccaggacaccctcctggccaccaccatcagtgagcttagcgagctgaccccacagacagactcgatgcccacacagcttcact

SEQ ID NO: 9205 - DNA, 4740 bp, Homo sapiens
  source 1..4740: mol_type = unassigned DNA
atggaaagcggtgcagttctgctggaatccaaatcctccccatttaacctactgcatgagatgcatgagcttcgcctcctgggtcacctgtgtgacgtgacagtcagcgtggagtatcagggtgtccgcaaagacttcatggcccacaaggcagtgctggctgccaccagcaagttttttaaggaagtgttccttaatgagaagagtgtggatggtactaggactaatgtctacttaaatgaagtgcaggttgctgactttgcttcatttcttgagtttgtctacactgcaaaggtacaggtggaagaagatcgggtgcagcgaatgctggaagtggctgaaaagctgaaatgtttggatttatcagaaacttgttttcaattaaagaaacagatgttagagtcagtacttttggagttgcaaaatttctcagagtctcaggaggtggaggtgagcagtggctcccaagttagtgctgctcctgcccccagggcaagtgtggccaccgatggccctcaccccagtggtctcacggattccttggactacccaggagagagagccagcaatggcatgtcttcagatttgccaccgaagaagtccaaggacaaactagacaagaagaaagaggtagttaaacctccctaccctaaaatcaggagagctagtggaaggctggctgggaggaaggtctttgtggagatccctaaaaagaaatatacgagaagactccgagagcagcagaaaactgctgagggtgatgtgggggactacaggtgtccccaggaccaaagcccggacagggtgggcacggagatggagcaggtttccaaaaatgagggttgccaggcaggtgctgagttggaggaattgtcaaagaaagcagggccggaggaggaagaggaggaggaggaggaggacgaagaaggggagaagaagaagagcaactttaagtgcagcatttgcgagaaggcgtttctgtatgagaagagcttcctgaagcacagcaagcaccgccacggcgtggccaccgaggtggtgtaccgctgcgacacctgcggccagaccttcgccaaccgctgcaacctgaagagccaccagcgccacgtgcacagcagcgagcgccatttcccatgcgagctgtgcgggaagaagttcaagcgcaagaaggacgtgaagcggcacgtgctgcaggtgcatgagggcggcggcgagcggcaccgctgcggccagtgcggcaagggcctgagttccaagacagcgctgcggctgcacgagcgcacacacacgggagaccggccctacggctgcaccgagtgcggcgccaggttctcgcagccgtccgcgctcaagacgcacatgagaattcatacaggggaaaaaccttttgtctgtgatgaatgtggtgcaagattcactcagaaccacatgctgatttatcataaaaggtgtcacacaggtgaaagaccttttatgtgtgaaacatgtggcaagagttttgcttctaaggagtacttaaaacaccacaatagaatccatactggatccaaaccctttaaatgtgaagtatgtttcaggacttttgcccagcggaattcactgtaccagcatattaaagtccacacaggggagcgtccctactgctgtgaccagtgcggcaagcagttcacccagctcaacgccctccagcgccaccgccgcatccacacaggggagaggccattcatgtgcaatgcgtgcggacggacattcaccgacaagtccactcttcggcggcacacctcaatacacgataagaatactccatggaagtctttccttgtcattgtagatggctcgcccaagaacgatgacggacacaagactgaacagcctgacgaagagtatgtgtcatccaagctttcggataaattgctgtcttttgcagaaaatggccatttccacaacctggctgcagtccaagacactgtacctaccatgcaggagaacagttctgctgacacagcctgcaaggcagatgactccgtggtgtcccaggacaccctcctggccaccaccatcagtgagcttagcgagctgaccccacagacagactcgatgcccacacagcttcactctttgagcaacatggaataagagcttcaagcagttcccatcctgttagtctgcgtgtgtggtagctgaactcaagatgatgtggggctaagaaaaataattgtccatgtgcaaagatgtgggcaagaatggcctctgcagattttcctgaacttctgctaacttgcacggctttatcacagcatttttaaagctttccctcaaaaatcctgatctgcatgatctcagctactttattgacaaaaaggcagtgaacataacctcacttaattctggtgtagggtgtatgtgctaatcgttctaattcttgattacctagtttatagataactgctggtcttaattgcagagtacagagaactgaaccagctcctgatattgtagttagcagtcttcctggcttctcactctgccttatatttccatgtgggtttacttctctcataactactttcaaggtatttttcttccaagctgaaataaaactggggccacatattttcagtcatttcttccctgttgaattgaagcaaatcagattttctgtggggaccctcaaatgcaactgaagaaatagattgttgcattcattcctccccaccccccatttgtaggcagtaaacaaagtatgactgacagattgaacacctgcaaaactgctagcgtaatctcagcacatacgcagctaggaagtttgtcataaaatcaacttagaaatgagatgaggctgttcagtttgtcttaaaaaaatcagattaggtaaaagctgtcctaccaaagagtctagcaaaacaatatagtatttttttgcagaggcatgaaaaattaagacgctttagagtacttgaaagttgtgtagtcattttatttgcaaaatgaggtgactgtggcaaattatagaacacagagtattattacttttgccaggtttttctgacttgatttctgtaatttccagaaacccagacttctcatttccacacctagagatggaaacaggcaagtaactgacatgtctatttccttgggagcatgtgagaacatagcagtagggaccaaaagtctcagcacacttacctccgattatgccttaaagagttgattgtgaagaaccagtaactttgtcccaaatgcttctttggctgtttcatgcaggacttaattattgcttttaaaaattcacaatgaaaagacgattctgctgtatttgttaaacgttgacatttggttctagggccttgagtatgtgccacgtgcttgtgaaatgctatgattcacatgtaacatttaaacattaatttaaaaagggaaccttggagaattcttttgttcactagttccttttttctctacatttttaatttattaaacttgctgtgaaaacactttgattttctaagaggaaggtactttaagttccagaatgaacatgtagctgcactatgccagaaattaatgagggaagactttcttcctaagtgcttatgttttaacttatgttagtgaaaccactacaaggtgtttcaggcgctgataacatgcttcacacctgcccttggaggtcacagtactaatttacttcaaatttagttatgacagtgtcactgtatcctagttatgtttacagcacaaataaataatgactgtcatacatccagaggagaccgaacctgcccagctgatgtactgttttatggaataaagtcacttgatcagaaggaattgaaacaatagatcattttgttacctactggagggatttttgtcttgaatttgtttccttagaaattctacaaaaaaatgttgttaataaatgtctgctttgtaaaagcagttttgcaattttttaaagatctatttctgttataatttaggttctgcagaaatatgattcttaattgaaacatataatttgcttaattacgtgaataatgaaatgtaaaatccgggtccataagcctttatttcatacagtcctaggattaagctgtttaactgcttggatcccagttggtctctggcagtgggatcctggagaggagaaatcctggcctctgctcatgcgcaggccacaaccgggctggaagtgcggttgagctctctgccactttcttcaatgtaaaaagtaggcatcaaagatacgacttctactatatacatttctctgtccctgagaacagagaaacgtaaccctgtaggggactggttacagaggacctcctggagcatctgccccattcctccaagtccaagcacagccatgctgagtggaagcgaggccaccatctgagtggattggtcccaagtgtgtaatgaggaaagtggccaggtgccggcacagtgcctctcccagagcctcaagaagggccatttaggagcttgcttcaaccattttccaaccattttctgtgaaatgctgtcagcccaaactccaaagggatgtgcagcctttcgttttaccaaattctttgctgtcgtttggaaaaaatgggccatgtggtggagacctttatttaaggtgatttttacagaaatgtgattttgctgtaggtgattatccaaacaagtaaatttgagtgtataatttaatttttaacctgttaaataaaccttgtccctccaagg

SEQ ID NO: 9206 - DNA, 652 bp, Homo sapiens
  source 1..652: mol_type = unassigned DNA
gagcctcccacgtggtgtggatgaggaggcagatggcagggcctgtgcatttctgtgcttgagtgggccttgaaagtggttcagcaaccaggaagaagtgttcattcctcgacaacaacatccccgggctctggtgacttggctgacactggatggccctggaatgaaaaaggcaaagaggcaaaatgtgcaagggcccatctggaaccaaggccccataaaagcgactgtcactcggtcccagacaccagagcaagctcaagacccagcagtgggacagccagacagacggcacgatggcactgagctcccagatctgggccgcttgcctcctgctcctcctcctcctcgccagcctgaccagtggctctgttttcccacaacagacgggacaacttgcagagctgcaaccccaggacagagctggagccagggccagctggatgcccatgttccagaggcgaaggaggcgagacacccacttccccatctgcattttctgctgcggctgctgtcatcgatcaaagtgtgggatgtgctgcaagacgtagaacctacctgccctgcccccgtcccctcccttccttatttattcctgctgccccagaacataggtcttggaataaaatggctggttcttttgttttccaaa

SEQ ID NO: 9207 - DNA, 558 bp, Homo sapiens
  source 1..558: mol_type = unassigned DNA
aacacacctctgccggctgagggtgacacaaccctgttccctgtcgctctgttcccgcttatctctcccgccttttcggcgccaccaccttcttggaaatgagacagagcaaaggggagggggctcagaccaccgcctcccctggcaggccccataaaagcgactgtcactcggtcccagacaccagagcaagctcaagacccagcagtgggacagccagacagacggcacgatggcactgagctcccagatctgggccgcttgcctcctgctcctcctcctcctcgccagcctgaccagtggctctgttttcccacaacagacgggacaacttgcagagctgcaaccccaggacagagctggagccagggccagctggatgcccatgttccagaggcgaaggaggcgagacacccacttccccatctgcattttctgctgcggctgctgtcatcgatcaaagtgtgggatgtgctgcaagacgtagaacctacctgccctgcccccgtcccctcccttccttatttattcctgctgccccagaacataggtcttgga

SEQ ID NO: 9208 - DNA, 2624 bp, Homo sapiens
  source 1..2624: mol_type = unassigned DNA
cggtcccagacaccagagcaagctcaagacccagcagtgggacagccagacagacggcacgatggcactgagctcccagatctgggccgcttgcctcctgctcctcctcctcctcgccagcctgaccagtggctctgttttcccacaacaggtgagagcccagtggcctgggtccttagcagggcagcagggatgggagagccaggcctcagcctagggcactggagacacccgagcactgagcagagctcaggacgtctcaggagtactggcagctgaacaggaaccaggacaggcacggtggctcatgcctgtaatcccagcactttgggaggttgaggcaggcagcccacttgaggtcagtttgagaccagcctggccaacatggtaaaaccccgtctctactaaaaatacaaaagttagccaggcttggtggcaggtgcctgtaatcccagctactcgggagactgaggcaggagaattgcttgaacccgcaaggtggaggttgcacagtgagctgagattgcaccactgcactccagcctggcaacagagcaagactccatctccaaaaaagaacagaaatcaatgaagcaccgagtgacagggactggaaggtcctaattccatgggtatttacggaacccctacgccgtgtggagtcttattctagacagtggggacgaggccatgaacaaggtagatgagagaggagatttctccatcctggtcagggaatttgttaaagactgatgaaaacatgaataaataattgtgtctagtacattctattcgtgaatctcataacagacagtggtagagtgaccgtgacccattcgccacacagtagagtcacttttttggtttgttttttagagacagggtcttcctctgttgctgaggctggagtgcagtggtgcagtcatagttcactgcagcctcaacctcctgtgctcaagcaatcctcccacctcagcgtcccaagtagctgggacagcaggcacatgccacgggttgggggaccacaggcatggtcaaggggctggcagtcaagcaagtgtttcatgagaaagtgacagttgaccttcgtcttggagggtgagagatggaggcagcaaagacctaaggagaggacaagccagcatagcccagggtcaggctgaacaagaggagatggtgggacttggggataaggctgaggggtgggcagtccctaagtcttgtgggcaaccatgcagacactgatttttccttggaataaagaggaagcccccataagcttttttttttttttctgagatagggtctcgctctgtcgttcaggctggtgtgcagtggcatcatctgggctcactgcaacctccgcctcccgggttcaagcaattctcctgcctcagcttcccgagcagctgggattacaggcggctgccaccacgcccggctaatttttgtttttttagtagagacagggtttcaccatgttggccagactggtcttgaactcctgacctcaggtgattctcccacctcggcttcccaaagtgctgggattacaggcgtgagccactgcgcccagcctcctgtaggtttttaaaatggagaaaaccacaatctcactggccatgttttaaaaaacttaatctgccagtcaggcaccatggctcacacctgtaatcccagagttttgggaggccaaggtaggaagatcagttgagcccaggagttcaagaccagcttgggcaacacaaccagaccccacctctacaaaaaattaaaaaattagccgggtgtggtggcgtgcacctgctgtcccagctactcgggaagctgaggcgggagcatcgcttgagcacaggaggtcaaggctgcagggagctatgactgtgccactgcactctggcctgggcaacagaggaagactctgtctaaaaaacaaacaaaaaaagtgactctgctgtgtggcaaatggattgaggggcaagaatgcagggaggtgtgttaggaggctggcactggcatccaggcaggggaaggtgatatcccaaagaagagtagcagctgtggaaagaggaggaggcggatctgggaggtttttttttttaggaaaagccgcccatgggaaggtgagcagaagcaagaaagcaaggcccctcctaagagtccatttgagctctgggtttaaaccacttggagaggagcaggttgccgggagccagtctcagaggtccactgggccccctgccatcctctgcacccccttctgctttcacagacgggacaacttgcagagctgcaaccccaggacagagctggagccagggccagctggatggtgagcgcaacagtgatgcctttcctagccccctgctccctccccatgctaaggccggttccctgctcacattcccttccttcccacagcccatgttccagaggcgaaggaggcgagacacccacttccccatctgcattttctgctgcggctgctgtcatcgatcaaagtgtgggatgtgctgcaagacgtagaacctacctgccctgcccccgtcccctcccttccttatttattcctgctgccccagaacataggtcttggaataaaatggctggttcttttgttttcc

SEQ ID NO: 9209 - DNA, 1771 bp, Homo sapiens
  source 1..1771: mol_type = unassigned DNA
ttgccattacccacagaataaagaaaggggccctgttattcaacaataggggaaaagacagagacaatgggaaattgtgcttccgatggggtggggactgagaaggaaaggacagacagacagacagacagggggttgtacagaagaggtccggtttcttgaagcagctggaagtcctggatagttcccacctgaaagtctgtttgcaaaggcaatgcgcactcaggcaccagagggcagaggggctcaagttccagggttttaaggtgcttggaactcccaggagcctggcaaaccttcatccagaacctcttcctcaagcaagacaaaaagctgctaagcactgctccctccgtctctgtgaagagaccagcttctaacagacggtgccgggctgaccccccatcatgccaggctggctcaccctccccacactctgccgcttccttctttgggccttcaccatcttccacaaagcccaaggagacccagcatcccacccgggcccccactacctcctgccccccatccacgaggtcattcactctcatcgtggggccacggccacgctgccctgcgtcctgggcaccacgcctcccagctacaaggtgcgctggagcaaggtggagcctggggagctccgggaaacgctgatcctcatcaccaacggactgcacgcccgggggtatgggcccctgggagggcgcgccaggatgcggagggggcatcgactagacgcctccctggtcatcgcgggcgtgcgcctggaggacgagggccggtaccgctgcgagctcatcaacggcatcgaggacgagagcgtggcgctgaccttgagcttggagggtgtggtgtttccgtaccaacccagccggggccggtaccagttcaattactacgaggcgaagcaggcgtgcgaggagcaggacggacgcctggccacctactcccagctctaccaggcttggaccgagggtctggactggtgtaacgcgggctggctgctcgagggctccgtgcgctaccctgtgctcaccgcacgcgccccgtgcggcggccgaggccggcccgggatccgcagctacggaccccgcgaccggatgcgcgaccgctacgacgccttctgcttcacctccgcgctggcgggccaagtgttcttcgtgcccgggcggctgacgctgtctgaagcccacgcggcgtgccggcgacgcggcgccgtggtggccaaggttgggcacctctacgccgcctggaagttttcggggctagaccagtgcgacggcggctggctggctgacggcagtgtgcgcttcccaatcaccacgccgaggccgcgctgcggggggctcccggatcccggagtgcgcagtttcggcttccccaggccccaacaggcagcctatgggacctactgctacgccgagaattaggcgcccaccgtgtcccctccagcgcgcgcgaagaagcttgggagtcgtggcgggggtctctcgccacccctttccggagagcctcccctccctccagacccggagcggcctctccagacctgccttcccagccgggggctgcgggcctcggaccccggctggcccggcggcggggaggggaggcgggggcgcctccggcggcgagatgcagaggtgaccctcggacccgctgccgttcgcgaaccctagcagaggactcagccaccgccggggggagggtgaggcggccgggggcattaactgacctctgagtacagcaataaaataacctggggatcttt

SEQ ID NO: 9210 - DNA, 719 bp, Homo sapiens
  source 1..719: mol_type = unassigned DNA; mol_type = unassigned DNA
attcaacaataggggaaaagacagagacaatgggaaattgtgcttccgatggggtggggactgagaaggaaaggacagacagacagacagacagggggttgtacagaagaggtccggtttcttgaagcagctggaagtcctggatagttcccacctgaaagtctgtttgcaaaggcaatgcgcactcaggcaccagagggcagaggacagaagcttttcctcaaaggtgcaaaaggagcaactgtgttgaacaggggctcaagttccagggttttaaggtgcttggaactcccaggagcctggcaaaccttcatccagaacctcttcctcaagcaagacaaaaagctgctaagcactgctccctccgtctctgtgaagagaccagcttctaacagacggtgccgggctgaccccccatcatgccaggctggctcaccctccccacactctgccgcttccttctttgggccttcaccatcttccacaaagcccaaggagacccaggtaagaccccagcccaggccagaatctgggggaggcttggggagactgcaagggtggggaaaggggaaagggcagttgttgcaggtacccagggactgaaagtcattgctgagaaggcaatggaggagagggttggggggctctggagaaagcatttggggagcagggtctgatgggcacttggggcagtgaggattgggggttcctgccactgt

SEQ ID NO: 9211 - DNA, 882 bp, Homo sapiens
  source 1..882: mol_type = unassigned DNA; mol_type = unassigned DNA
gggggttgtacagaagaggtccggtttcttgaagcagctggaagtcctggatagttcccacctgaaagtctgtttgcaaaggcaatgcgcactcaggcaccagagggcagaggacagaagcttttcctcaaaggtgcaaaaggagcaactgtgttgaacaggggctcaagttccagggttttaaggtgcttggaactcccaggagcctggcaaaccttcatccagaacctcttcctcaagcaagacaaaaagctgctaagcactgctccctccgtctctgtgaagagaccagcttctaacagacggtgccgggctgaccccccatcatgccaggctggctcaccctccccacactctgccgcttccttctttgggccttcaccatcttccacaaagcccaaggagacccagcatcccacccgggcccccactacctcctgccccccatccacgaggtcattcactctcatcgtggggccacggccacgctgccctgcgtcctgggcaccacgcctcccagctacaaggtgcgctggagcaaggtggagcctggggagctccgggaaacgctgatcctcatcaccaacggactgcacgcccgggggtatgggcccctgggagggcgcgccaggatgcggagggggcatcgactagacgcctccctggtcatcgcgggcgtgcgcctggaggacgagggccggtaccgctgcgagctcatcaacggcatcgaggacgagagcgtggcgctgaccttgagcttggagggtgtggtgtttccgtaccaacccagccggggccggtaccagttcaattactacgaggcgaagcaggcgtgcgaggagcaggacggacgcctggccacctactcccagctctaccagg

SEQ ID NO: 9212 - DNA, 679 bp, Homo sapiens
  source 1..679: mol_type = unassigned DNA; mol_type = unassigned DNA
ggtttcttgaagcagctggaagtcctggatagttcccacctgaaagtctgtttgcaaaggcaatgcgcactcaggcaccagagggcagaggggctcaagttccagggttttaaggtgcttggaactcccaggagcctggcaaaccttcatccagaacctcttcctcaagcaagacaaaaagctgctaagcactgctccctccgtctctgtgaagagaccagcttctaacagacggtgccgggctgaccccccatcatgccaggctggctcaccctccccacactctgccgcttccttctttgggccttcaccatcttccacaaagcccaaggagacccaggtaagaccccagcccaggccagaatctgggggaggcttggggagactgcaagggtggggaaaggggaaagggcagttgttgcaggtacccagggactgaaagtcattgctgagaaggcaatggaggagagggttggggggctctggagaaagcatttggggagcagggtctgatgggcacttggggcagtgaggattgggggttcctgccactgtggccccctctgcccagcatcccacccgggcccccactacctcctgccccccatccacgaggtcattcactctcatcgtggggccacggccacgctgccctgcgtcctgggcaccacgcctccca

SEQ ID NO: 9213 - DNA, 1022 bp, Homo sapiens
  source 1..1022: mol_type = unassigned DNA; mol_type = unassigned DNA
atcgcgggcgtgcgcctggaggacgagggccggtaccgctgcgagctcatcaacggcatcgaggacgagagcgtggcgctgaccttgagcttggagggtgaggcccttccgctcccgccccattcctgtgtagcagcgggtccgcctcgcctgggtctcccagggctccttcccagtatctcctccgcacccctggggaccccagctccctctcccaggccgcgccgcccttcctccccctccgctcccatccgctggccctccccaggatccccgccaccccctaggtgtggtgtttccgtaccaacccagccggggccggtaccagttcaattactacgaggcgaagcaggcgtgcgaggagcaggacggacgcctggccacctactcccagctctaccaggcttggaccgagggtctggactggtgtaacgcgggctggctgctcgagggctccgtgcgctaccctgtgctcaccgcacgcgccccgtgcggcggccgaggccggcccgggatccgcagctacggaccccgcgaccggatgcgcgaccgctacgacgccttctgcttcacctccgcgctggcgggccaagtgttcttcgtgcccgggcggctgacgctgtctgaagcccacgcggcgtgccggcgacgcggcgccgtggtggccaaggttgggcacctctacgccgcctggaagttttcggggctagaccagtgcgacggcggctggctggctgacggcagtgtgcgcttcccaatcaccacgccgaggccgcgctgcggggggctcccggatcccggagtgcgcagtttcggcttccccaggccccaacaggcagcctatgggacctactgctacgccgagaattaggcgcccaccgtgtcccctccagcgcgcgcgaagaagcttgggagtcgtggcgggggtctctcgccacccctttccggagagcctcccctccctccagacccggagcggcctctccagacctgccttcccagccgggggctgcgggcctcgg

SEQ ID NO: 9214 - DNA, 4190 bp, Homo sapiens
  source 1..4190: mol_type = unassigned DNA; mol_type = unassigned DNA
gaagtcaagacgtctggaaagaattacccagtcctggcttcgagcagcccattgaaccagagacttgaaacagccccagccaaagacttttctcccaattctgcgcttcctgggttctgctgagtcttccacaggctttttttttttttttttttttttttaagacgaaaaagagattttctgttatcgggggcagaaagactgaagcccaaaaaaaaaaaaaaaaaaaaaagaaaagaaaagaaaaaagaaaagttaatttatttttaaagcataatttttttaagaattagactgaagtgcaacggaaacataaagagaatattagtgaaattattttttaaagtggggaagaatcaaacatttaagactcccctatcctttttaaatgttgtttttaaatttcttattttttttggccggtcgtctcaaattcatctgatctcttattacctcaattttggaaactgcccgccaccgaccctccgggaccacacagacaggctgaggacgactttatgaccaagagctgaacaagatgcattgtgagaggtttctatgtatcctgagaataattggaaccacactctttggagtctctctcctccttggaatcacagctgcttatattgttggctaccagtttatccaaacggataattactatttctcttttggactgtatggtgcctttttggcatcacacctcatcatccaaagcctgtttgcctttttggagcaccgaaaaatgaaaaaatccctagaaacccccataaagttgaacaaaacagttgccctttgcatcgctgcctatcaagaagatccagactacttaaggaaatgtttgcaatctgtgaaaaggctaacctaccctgggattaaagttgtcatggtcatagatgggaactcagaagatgacctttacatgatggacatcttcagtgaagtcatgggcagagacaaatcagccacttatatctggaagaacaacttccacgaaaagggtcccggtgagacagatgagtcacataaagaaagctcgcaacacgtaacgcaattggtcttgtccaacaaaagtatctgcatcatgcaaaaatggggtggaaaaagagaagtcatgtacacagccttcagagcactgggacgaagtgtggattatgtacaggtttgtgattcagacactatgcttgacccagcctcatctgtggagatggtaaaagttttagaagaagatcccatggttggaggtgttgggggagatgtccagattttaaacaagtacgattcctggatctcattcctcagcagtgtaagatattggatggcttttaatatagaaagggcctgtcagtcttattttgggtgtgttcagtgcattagtggacctctgggaatgtacagaaactccttgttgcatgagtttgtggaagattggtacaatcaagaatttatgggcaaccaatgtagctttggtgatgacaggcatctcacgaaccgggtgctgagcctgggctatgcaacaaaatacacagctcgatctaagtgccttactgaaacacctatagaatatctcagatggctaaaccagcagacccgttggagcaagtcctacttccgagaatggctgtacaatgcaatgtggtttcacaaacatcacttgtggatgacctacgaagcgattatcactggattctttcctttctttctcattgccacagtaatccagctcttctaccggggtaaaatttggaacattctcctcttcttgttaactgtccagctagtaggtctcataaaatcatcttttgccagctgccttagaggaaatatcgtcatggtcttcatgtctctctactcagtgttatacatgtcgagtttacttcccgccaagatgtttgcaattgcaacaataaacaaagctgggtggggcacatcaggaaggaaaaccattgttgttaatttcataggactcattccagtatcagtttggtttacaatcctcctgggtggtgtgattttcaccatttataaggagtctaaaaggccattttcagaatccaaacagacagttctaattgttggaacgttgctctatgcatgctattgggtcatgcttttgacgctgtatgtagttctcatcaataagtgtggcaggcggaagaagggacaacaatatgacatggtgcttgatgtatgatcttccatgttttgacgtttgcagtcacacacaacaccttagttcctctaggggctgtacagtattgtggcatcagataatgccaccaaaggagacatatcactgctgctgggacttgaacaaagacatttatatgggtttattttcattctgccaaagtaaaacaatacatcaacaagaagaaactcagatttaacctgttatttctatgaaaatgggatgaattctttgtttatgcactttttccttactgtgcatccgcctgaaagtgttttgccctatatacctcactagccatgctttatgtgggttatcatggaagaaaaggattttggaaactcaaggaaaagttctttcaacctatacaacctaacttatggactgttttgatagatgataattttttttttttaggaaggattttctttttaactttaccaaatgaaatgccaaaggaagttttaaaggccgttggctgtgctgtattttgatataattgtactgtgtttttaaattttgtatgccaatcttaaagacaaattttgcatattctctattttacttttctgccaaaataaacctgttcttccttttttaaaataaaataagttcttaaaaaatttatacttaaaaaatcctgcccaaaatgtgaagcttggttgactgatgttcatgatagaaagaataaaatgtttctctctctctaccttttaaaattgaatagtttatttctgtgaaagaagtatttaaactttcaatattttaactttttgtttttatttcttttagaaaaggccaatatacctatcacactttggaagtaaaaatacacactttcgtgtgtacctaaaaaaaaaatcgttgaaaatcaaggccaaaggtagtgcaattttttcattaagatttaaaaaaaagggaatgatagtctttgaaagaaaacagtaggcatccagcactggacaaaacatgggtatcaaagatgaataatctttggagattctggcagtgttttcccagaacaagtcaagtggaaagtggagaaattatctgtataattttggacacatacaatgcagtttatcaaaggttttgttctgtggcctgaatttactgggtcctacctacacattgaacatgttttgcctgtcttttttttttttttcaacttgccagttcactttacatgttagtataatgtttacacgggtgagttggataaattataaaacatataaattcaaaattggcagatagaatcaccaagtatctatcctcttttactttcaaatgaggaattttgtttttctgaattacacagatcatcacttcctatttcctgttctggacctgtataaaaatgtctacacagtagaagtgacatcaaggtttaataagtatatcaatgattggcacatataaaaattgttgaaccacatactctgaacttggctaatttagttactgcaaggcctccattatccagttttattttttacacgattgaccttgccttgtagctggtgctgtgtagacctgtgttgaaaacacaatcggaatatatgaataattgaataaacagcattatggtgaggcagagacacatggagaagtgttaaaaaaaaaatgggcttcctgcctttctgcctcttttttatgcagtcatctatgttacatctatcctgcctaagaaaaagctgcacatcctaccttcagagtacaaaaaggtacatctgagactcaagactctcactgattggagagcttgtggaaaacaaaacacaccatgccaataaatgagatgaaaacttgagtttgcctttttaactatttatgttctaagttaagctttgataacattcaaatgtcaaattctctcattcttataaaaagttgaattaattgcctgtatttattttagcaattattcaatgtatttccagtataggatgtatagtataattaattttttgtaaataaaatatttttgataaga

SEQ ID NO: 9215 - DNA, 9885 bp, Homo sapiens
  source 1..9885: mol_type = unassigned DNA; mol_type = unassigned DNA
ccagccgcaccggagcccggaccgcagccactaagggcagcggcggcggcgggagccaggcgcgcagctagcagcggcgcggtcgggaagcagcagccgccgccgccgccgccgccgccgcgacgggcagctgggctcgccggcagccggctcgggcccctaccctctcggctacgtgtctccggcgccgggcggccggcgagtctggagcccgcgccgtcgccggccgcgtcctccgggcatggaaggaggcggcaagcccaactcttcgtctaacagccgggacgatggcaacagcgtcttccccgccaaggcgtccgcgacgggcgcggggccggccgcggccgagaagcgcctgggcaccccgccggggggcggcggggccggcgcgaaggagcacggcaactccgtgtgcttcaaggtggacggcggtggcggcggtggcggcggcggcggcggcggcgaggagccggcggggggcttcgaagacgccgaggggccccggcggcagtacggcttcatgcagaggcagttcacctccatgctgcagcccggggtcaacaaattctccctccgcatgtttgggagccagaaggcggtggaaaaggagcaggaaagggttaaaactgcaggcttctggattatccacccttacagtgatttcaggttttactgggatttaataatgcttataatgatggttggaaatctagtcatcataccagttggaatcacattctttacagagcaaacaacaacaccatggattattttcaatgtggcatcagatacagttttcctattggacctgatcatgaattttaggactgggactgtcaatgaagacagttctgaaatcatcctggaccccaaagtgatcaagatgaattatttaaaaagctggtttgtggttgacttcatctcatccatcccagtggattatatctttcttattgtagaaaaaggaatggattctgaagtttacaagacagccagggcacttcgcattgtgaggtttacaaaaattctcagtctcttgcgtttattacgactttcaaggttaattagatacatacatcaatgggaagagatattccacatgacatatgatctcgccagtgcagtggtgagaatttttaatctcatcggcatgatgctgctcctgtgccactgggatggttgtcttcagttcttagtaccactactgcaggacttcccaccagattgctgggtgtctttaaatgaaatggttaatgattcttggggaaagcagtattcatacgcactcttcaaagctatgagtcacatgctgtgcattgggtatggagcccaagccccagtcagcatgtctgacctctggattaccatgctgagcatgatcgtcggggccacctgctatgccatgtttgtcggccatgccaccgctttaatccagtctctggattcttcgaggcggcagtatcaagagaagtataagcaagtggaacaatacatgtcattccataagttaccagctgatatgcgtcagaagatacatgattactatgaacacagataccaaggcaaaatctttgatgaggaaaatattctcaatgaactcaatgatcctctgagagaggagatagtcaacttcaactgtcggaaactggtggctacaatgcctttatttgctaatgcggatcctaattttgtgactgccatgctgagcaagttgagatttgaggtgtttcaacctggagattatatcatacgagaaggagccgtgggtaaaaaaatgtatttcattcaacacggtgttgctggtgtcattacaaaatccagtaaagaaatgaagctgacagatggctcttactttggagagatttgcctgctgaccaaaggacgtcgtactgccagtgttcgagctgatacatattgtcgtctttactcactttccgtggacaatttcaacgaggtcctggaggaatatccaatgatgaggagagcctttgagacagttgccattgaccgactagatcgaataggaaagaaaaattcaattcttctgcaaaagttccagaaggatctgaacactggtgttttcaacaatcaggagaacgaaatcctcaagcagattgtgaaacatgacagggagatggtgcaggcaatcgctcccatcaattatcctcaaatgacaaccctgaattccacatcgtctactacgaccccgacctcccgcatgaggacacaatctccaccggtgtacacagcgaccagcctgtctcacagcaacctgcactcccccagtcccagcacacagaccccccagccatcagccatcctgtcaccctgctcctacaccaccgcggtctgcagccctcctgtacagagccctctggccgctcgaactttccactatgcctcccccaccgcctcccagctgtcactcatgcaacagcagccgcagcagcaggtacagcagtcccagccgccgcagactcagccacagcagccgtccccgcagccacagacacctggcagctccacgccgaaaaatgaagtgcacaagagcacgcaggcgcttcacaacaccaacctgacccgggaagtcaggccactctccgcctcgcagccctcgctgccccatgaggtgtccactctgatttccagacctcatcccactgtgggcgagtccctggcctccatccctcaacccgtgacggcggtccccggaacgggccttcaggcagggggcaggagcactgtcccgcagcgcgtcaccctcttccgacagatgtcgtcgggagccatccccccgaaccgaggagtccctccagcaccccctccaccagcagctgctcttccaagagaatcttcctcagtcttaaacacagacccagacgcagaaaagccacgatttgcttcaaatttatgatccctgctgattgtcaaagcagaaagaaatactctcataaactgagactatactcagatcttattttattctatctcctgatagatccctctagcctactatgaagagatattttagacagctgtggcctacacgtgaaatgtaaaaatatatatacatatactataaaatatatatctaaattcccaagagagggtcaaaagacctgtttagcattcagtgttatatgtcttcctttctttaaatcattaaaggatttaaaatgtcgttgtaagattatttatttctaacctacttttacttaagtcctttgatatgtatatttctctattttatgaagagttcttggattcaatggaaacaaaactgattttaaaaaggcaactcaaatgaactagtaaatagcaccaatcaaaactttctttcattagctgtgtctctgcatctaaattgttaatcattaatggtggagaattaaataacaaatcccattttatagatctaaattgtatttcggtgctttcaatttcaaattaggttaaagaatgcactacttgcttggccaccgtaggagactagcattgccactgtttgttaagaatatcactaacctcaaacatgttcattgatctttcagaaagctgagggaaaattaatatttgtcttcatgtgttatcggacttttaccaagactcgatcaatgttagttgtaaataactttttcaacccaaataaaaatagctattctgtgttgtatgaaggtaaaagtcattgtttaagaatttagttttattgcttcacttcaaaacttagagttttaaattttacaaaacctgattgtgagaattattcaattgtaatgcaatggcttgaaacctacaatattattttaacctgcaatgttttatgcaaaattgtatgctcgaatctacaaattgcttgtattacaccaaaaatcgttacttttctttcttcttgccataatcaagcatctgaaaatagtccctgcatgcttctggggaaaaaaaaataggttcaaatcagtcattgtagagaaaggcttacagtatttctcgtttctagaaaagcataacaattcattaattgcctatcttataattcctataaggctgacttggatctctgacttaagtctagaagtgaggttttcacttttatttaatattattgctattattatttaaataattatttgtaaaccacagcttgatttggagttaagtgttgtctgtgtcttcactgtagctggtaatttactatggtattaatttaaagaaataaattcaatacagcatcacgtctgtttgggaacacacattttgctctatgtatattgtaactaaatggttagtaaactttaaggcatgtggtgactaacgtagcccttagataggaggtttgtcatttttaatgtgttgaaaatagtacagacatggtgacagaaagcaggggtaaagttgaacgtctatgagcattgtctgtctgttttcttaactctttacatgatctgtgagcacctgcttcttctcaaagaactcccttagtaatcatttgtgcctaatgcatcccacacatgtggagtatgactggaacacaattgaaagattcctaacaactggctgcggtaaataacccaagttaagagcatgacttaaagtggaggtcttcagtatctctggcactggcaatacatttaagaacatacagagatcacacattatgtgggacagggcctgcagatagacttgaggacagaaaacaaaaacaaaagcagaaactctaaagtggatccttgctgcctgttatgccttttgtggatataatacctataataccaaaatgagttgttatgtttaatttcaaacaaatcccaactggtgtggaagtaattaactgctagtcgatgtaatgtaatcatcaatatgctggtgacatatgatggcatgtcaggaatactgttgtaagaaagggattgttcagtctacctagaacctatgggaaagctgcaagaccatttacatatcagtacaaaactcctttattttattaaaatatgagaattaacttcaatttattaagattacgtattggtcctttaaattattaaaggtttacatttgataggattaatggatttggtagtgaaatatttttatatatataaatttttggttttttattttgagcactattgggaaacataagcaaaattgaaatgcatggtctttcagtgcaaccatacaatttttattcactttgtaatagaatggacaaaaaaactaaggtttatatattaaactaataaaaaggtacagggtaaattatatacatatatgtatgaatgtatatatacttagattaagaaaaaaaaatgactcacattcctgtaatataaaggtccattgctagttgaaaagtgacctcttttctctgtacatagtgaagcccgtatgtatggagttttaatctgtacagaaagaaatgtattattcattggtctttctgctgctggaaagataatagaatagctgattcttacaacaactgtatgatcagggatgagttagagtatttcttttgtctttgctcaaagccatacatatataaatatatataaagattattaataaattcaacaaaaaataaactacaatcatgaatattttattttatcaatatatgctaatcaaatgttttattttattaatgagtacagctttgcctctatttttacatcataaaatttccaagagcttatacttgataatcacataaaatcaattatattctataattctggaatgagaggactttaaatagaacatggatttttcaaccacttctttgtttacctttttcgtatagtaaaatatgagcttattttcttttttgctctgtgcctttttagaatgtggttgttctccaacttcaaaacacaaccattttgtgtaattattggatatacagatgagaaataattttcctgtaataatggtaaataattgtcctgtaatatatttatacaaacctattttgttataatagttctatgacatacctattttgttataatagttttataacatacctattttgttataatagggccttgggctctattataacaaaacaggtttatataaatacattcatatttatagccttaaacaaaataggtttgtatagtaggcccaaggccctattataacaaaataggtttgtataaatatattcatatttatagccttgggccctgcaaagttatttggagagtgatagaacctccccacacaagtgggttttaaatgatacctaaaagcctgagatagagtttatcataatgagaataagtagtgaagcattcctgaaaacaaggaggataaatagtagcaatggcaatatattctattcaccaaaaaagtagcttgtctccaggtctggatgacctcttcataagtgaacaattccctgatgaatgctgttccactttaaagagatggttattttgcaatttataaacttaactgagcatactattttcaggacactacaaagtacatagtcaagttattaccgtcattcctataggacagagaatgatttaaacaatatgacatgtttaaaattttagatgatttatttcaaatcctgaattatgtctacttcaaattatgagcaatctctattatctttcaggactatttaaaaaatctccatacctcctctttcagcttaggtttttatatttgttaattttactatgttactttgcttctatggccctcacttgcactgtttataatgttaacctgtttgaatgagatatctctccattatatctttatctttttagaacatgtgccataaaacccatgtggttattttgttcatatgcactacaactagcaaacttttattttatgttcacctactttaaaaagtactcatactgtaccatgggaaagaaacatgggccttatagaatggaatgctgagctattttgagtcctgaaaacaatggccaaaaatttaaggaactgtggttgctgcatgcaccaaattgtagcacatacaaataaataaaatacagttctataactgtattcaatatggttattttcaaggaaaaataggatagaaattttctttgaaagatttgctattgtacttagggaagtacacctgctattacccctcaaaagcaatgactttcttaagcaatttcaatttttttcctttttaacaaccctgcacttgcacaaccctgcatctcttgtctcaccctaatgctgaccctgcttccaattcaggctttgacagggacaaatggagattttaaggttttttaatgagagaagccttgctgacactccccgcatcccaccttgaaaattatttaaagatgatcttaaaagaacctacagataatgctctgaatttgtttacaaggtccttgatgtggagagaatgagtaatacattaaatgctggggaaataattatcatttagtgaaaaattaagcatgcttttctaaaatgtggatgtttaacagagcacagctgattgggaacactggcagttcaatgcagctggagtgtctcacagggtgaagaggaacccagatcaagtgggaaatagggatttcaaaaaccttctgaaaggcttttaacatcagggcaaaggttttacagtgttgtactttatattcttaatttaagcttatcaacggggaggattcacattgaaatgtctgttttgctaatgtaacaaggaataaaataatttatgacacagcaaaaactgggggctatttacaaccccaccctgccttgtgaggatgctgggtcctaaggaaggtcctaggtttgctaaatagagtaatgggaataggaaactgaaagtttacttgctttgcgtaagataatatattgcggcagggaaggggtacaagaagataagagctagaacctgtgagaagggaaagaagtgataaaataattttggctaaaataaagcaagttctcaggccaggcgtggtggctcatgcctgtaatcctagcactttgggaggccaaagtgggaggaatgcttgaggccaggaattggagaccaaccagggcagcatgtcaagacctggtctctacaaggaaaaaaaatttttttaattgaccagtatatacttacatacctgcagtgtttagaaaacccgactataggtggtgtattcctgtagtcctagttactcagaaagttaaggcaggaggatcgcttgaacttaggaggtcaaggctgcagtgagccctgttcgttccactgcactccagcttgggggacagagcaaaaccctttctcaagaaaaacccaaacaaacaaaaaagtgaagccagttctttaatttctattggagatatcacacacgctccaaagagtggcaaaggtgaacattctttggagctattatatttctaatgtaacatcaatggccatttactcccaaagggaaacatctttttttttttttttttttaagatggagtctggctctgtcacccaggtgggagtgcaatggcaggatcttggcccactgcaacatcagcctcccaggtttaagcaattctcctgcatcagcctccagagtagctgggattacaggtgcccgccaccatggctagctaaatttttgtaatttttagtagagacagggttttaccatgttggccaggccggtctcgaacccctaacctcaagtgatccgcccgcctcaccctccagaagtgctaggattacaggcctgagccaccgcacccggccctgctatttttttctatgtagttgtttcagtaataccatatgagcagagaatactattgattcattcaattgaagaaatctgaataaattagtaaatataataattcttcaaaagaggaccactttatgtttccaatagattatataattgaattcaggtaacgtagagttattcagacttttttttttaaataacggaattttgcaaaaaaacaggttgcatcgttttctacagagaatattcagatgtgtagaggcaaagagactttcttgaaaggtttttatttcctgttaaatttgtgaggaaaactcctgagaaaggaaagatttacttttgaaggaagaaagaacataacccaaagaaatttgaaagattcaaaaagagttttccaaatgtattctcatttctttctcatatttgttcaaggtcttagtttccaagcattcaaaattaaatcttgtttgcctaactcttctaacatctattaccaacctaacatattacaattctgtttaaaatgtgcagttctaaatgttcttgcgtgcctcactgtggaaagtgtggtgcatggaactgcagcgtcagtatcacccagaagtataattacaagaagtgcagagtccttggccttaccctgtacctacagaagtccgcttttgggcaagatccccagatgattcatatgtgtattaatattgaaaaaattggaactagtaagtcctagaggaggtaaattttaagggctttttaagggaacttccaagtgtgaagacatttctggagatgacaagtcaacatagcatgggatcttggctagacaaggaaagcgagagaacattaaataaacacaagcaacgacaaaccacctatgttataattttatcctggaccatccaaagtttactcttggtcacgctgtctaacccagcctgcctcctggcacttgctagttagaaccagggaagagaaaactaatatgtgttaggtattataatttccttatgtcacataaattttggtgccatagctagcaatgtttcttaatatcacatcagtacaatgtgtccattgccttctgtaacatttttaatgctatcaataatacattgacattataaaaataaatgaatgtggtcaa

SEQ ID NO: 9216 - DNA, 4300 bp, Homo sapiens
  source 1..4300: mol_type = unassigned DNA; mol_type = unassigned DNA
aaccatgggtagatattccacatgacatatgatctcgccagtgcagtggtgagaatttttaatctcatcggcatgatgctgctcctgtgccactgggatggttgtcttcagttcttagtaccactactgcaggacttcccaccagattgctgggtgtctttaaatgaaatggttaatgattcttggggaaagcagtattcatacgcactcttcaaagctatgagtcacatgctgtgcattgggtatggagcccaagccccagtcagcatgtctgacctctggattaccatgctgagcatgatcgtcggggccacctgctatgccatgtttgtcggccatgccaccgctttaatccagtctctggattcttcgaggcggcagtatcaagagaagtataagcaagtggaacaatacatgtcattccataagttaccagctgatatgcgtcagaagatacatgattactatgaacacagataccaaggcaaaatctttgatgaggaaaatattctcaatgaactcaatgatcctctgagagaggagatagtcaacttcaactgtcggaaactggtggctacaatgcctttatttgctaatgcggatcctaattttgtgactgccatgctgagcaagttgagatttgaggtgtttcaacctggagattatatcatacgagaaggagccgtgggtaaaaaaatgtatttcattcaacacggtgttgctggtgtcattacaaaatccagtaaagaaatgaagctgacagatggctcttactttggagagatttgcctgctgaccaaaggacgtcgtactgccagtgttcgagctgatacatattgtcgtctttactcactttccgtggacaatttcaacgaggtcctggaggaatatccaatgatgaggagagcctttgagacagttgccattgaccgactagatcgaataggaaagaaaaattcaattcttctgcaaaagttccagaaggatctgaacactggtgttttcaacaatcaggagaacgaaatcctcaagcagattgtgaaacatgacagggagatggtgcaggcaatcgctcccatcaattatcctcaaatgacaaccctgaattccacatcgtctactacgaccccgacctcccgcatgaggacacaatctccaccggtgtacacagcgaccagcctgtctcacagcaacctgcactcccccagtcccagcacacagaccccccagccatcagccatcctgtcaccctgctcctacaccaccgcggtctgcagccctcctgtacagagccctctggccgctcgaactttccactatgcctcccccaccgcctcccagctgtcactcatgcaacagcagccgcagcagcaggtacagcagtcccagccgccgcagactcagccacagcagccgtccccgcagccacagacacctggcagctccacgccgaaaaatgaagtgcacaagagcacgcaggcgcttcacaacaccaacctgacccgggaagtcaggccactctccgcctcgcagccctcgctgccccatgaggtgtccactctgatttccagacctcatcccactgtgggcgagtccctggcctccatccctcaacccgtgacggcggtccccggaacgggccttcaggcagggggcaggagcactgtcccgcagcgcgtcaccctcttccgacagatgtcgtcgggagccatccccccgaaccgaggagtccctccagcaccccctccaccagcagctgctcttccaagagaatcttcctcagtcttaaacacagacccagacgcagaaaagccacgatttgcttcaaatttatgatccctgctgattgtcaaagcagaaagaaatactctcataaactgagactatactcagatcttattttattctatctcctgatagatccctctagcctactatgaagagatattttagacagctgtggcctacacgtgaaatgtaaaaatatatatacatatactataaaatatatatctaaattcccaagagagggtcaaaagacctgtttagcattcagtgttatatgtcttcctttctttaaatcattaaaggatttaaaatgtcgttgtaagattatttatttctaacctacttttacttaagtcctttgatatgtatatttctctattttatgaagagttcttggattcaatggaaacaaaactgattttaaaaaggcaactcaaatgaactagtaaatagcaccaatcaaaactttctttcattagctgtgtctctgcatctaaattgttaatcattaatggtggagaattaaataacaaatcccattttatagatctaaattgtatttcggtgctttcaatttcaaattaggttaaagaatgcactacttgcttggccaccgtaggagactagcattgccactgtttgttaagaatatcactaacctcaaacatgttcattgatctttcagaaagctgagggaaaattaatatttgtcttcatgtgttatcggacttttaccaagactcgatcaatgttagttgtaaataactttttcaacccaaataaaaatagctattctgtgttgtatgaaggtaaaagtcattgtttaagaatttagttttattgcttcacttcaaaacttagagttttaaattttacaaaacctgattgtgagaattattcaattgtaatgcaatggcttgaaacctacaatattattttaacctgcaatgttttatgcaaaattgtatgctcgaatctacaaattgcttgtattacaccaaaaatcgttacttttctttcttcttgccataatcaagcatctgaaaatagtccctgcatgcttctggggaaaaaaaaataggttcaaatcagtcattgtagagaaaggcttacagtatttctcgtttctagaaaagcataacaattcattaattgcctatcttataattcctataaggctgacttggatctctgacttaagtctagaagtgaggttttcacttttatttaatattattgctattattatttaaataattatttgtaaaccacagcttgatttggagttaagtgttgtctgtgtcttcactgtagctggtaatttactatggtattaatttaaagaaataaattcaatacagcatcacgtctgtttgggaacacacattttgctctatgtatattgtaactaaatggttagtaaactttaaggcatgtggtgactaacgtagcccttagataggaggtttgtcatttttaatgtgttgaaaatagtacagacatggtgacagaaagcaggggtaaagttgaacgtctatgagcattgtctgtctgttttcttaactctttacatgatctgtgagcacctgcttcttctcaaagaactcccttagtaatcatttgtgcctaatgcatcccacacatgtggagtatgactggaacacaattgaaagattcctaacaactggctgcggtaaataacccaagttaagagcatgacttaaagtggaggtcttcagtatctctggcactggcaatacatttaagaacatacagagatcacacattatgtgggacagggcctgcagatagacttgaggacagaaaacaaaaacaaaagcagaaactctaaagtggatccttgctgcctgttatgccttttgtggatataatacctataataccaaaatgagttgttatgtttaatttcaaacaaatcccaactggtgtggaagtaattaactgctagtcgatgtaatgtaatcatcaatatgctggtgacatatgatggcatgtcaggaatactgttgtaagaaagggattgttcagtctacctagaacctatgggaaagctgcaagaccatttacatatcagtacaaaactcctttattttattaaaatatgagaattaacttcaatttattaagattacgtattggtcctttaaattattaaaggtttacatttgataggattaatggatttggtagtgaaatatttttatatatataaatttttggttttttattttgagcactattgggaaacataagcaaaattgaaatgcatggtctttcagtgcaaccatacaatttttattcactttgtaatagaatggacaaaaaaactaaggtttatatattaaactaataaaaaggtacagggtaaattatatacatatatgtatgaatgtatatatacttagattaagaaaaaaaaatgactcacattcctgtaatataaaggtccattgctagttgaaaagtgacctcttttctctgtacatagtga

SEQ ID NO: 9217 - DNA, 169 bp, Homo sapiens
  source 1..169: mol_type = unassigned DNA; mol_type = unassigned DNA
ggtttacaaaaattctcagtctcttgcgtttattacgactttcaaggttaattagatacatacatcaatgggaagagacagtggaaccacagatggaaggaacttgagtcctggaatttctacttggagaagagacagttgtccatgaggtacatccgttggactttaa

SEQ ID NO: 9218 - DNA, 4738 bp, Homo sapiens
  source 1..4738: mol_type = unassigned DNA; mol_type = unassigned DNA
aatgtcacgctgggcagaagtagagcaagagtaacgagcatgtgtggagagcggacggggagagaccctttctggccaacagagggcagccgaggggaggcgctggggcgcgagggctgagccgagctgagcctcgcctagctccggcagcctcagcttcagcaccagccgcaccggagcccggaccgcagccactaagggcagcggcggcggcgggagccaggcgcgcagctagcagcggcgcggtcgggaagcagcagccgccgccgccgccgccgccgccgcgacgggcagctgggctcgccggcagccggctcgggcccctaccctctcggctacgtgtctccggcgccgggcggccggcgagtctggagcccgcgccgtcgccggccgcgtcctccgggcatggaaggaggcggcaagcccaactcttcgtctaacagccgggacgatggcaacagcgtcttccccgccaaggcgtccgcgacgggcgcggggccggccgcggccgagaagcgcctgggcaccccgccggggggcggcggggccggcgcgaaggagcacggcaactccgtgtgcttcaaggtggacggcggtggcggcggtggcggcggcggcggcggcggcgaggagccggcggggggcttcgaagacgccgaggggccccggcggcagtacggcttcatgcagaggcagttcacctccatgctgcagcccggggtcaacaaattctccctccgcatgtttgggagccagaaggcggtggaaaaggagcaggaaagggttaaaactgcaggcttctggattatccacccttacagtgatttcaggttttactgggatttaataatgcttataatgatggttggaaatctagtcatcataccagttggaatcacattctttacagagcaaacaacaacaccatggattattttcaatgtggcatcagatacagttttcctattggacctgatcatgaattttaggactgggactgtcaatgaagacagttctgaaatcatcctggaccccaaagtgatcaagatgaattatttaaaaagctggtttgtggttgacttcatctcatccatcccagtggattatatctttcttattgtagaaaaaggaatggattctgaagtttacaagacagccagggcacttcgcattgtgaggtttacaaaaattctcagtctcttgcgtttattacgactttcaaggttaattagatacatacatcaatgggaagaggtaagatgcatctttttcttttttaaatctatatcatgaaattgttaattatggctgttttacaatgaacaactgtgcaatgtgtaatgagttttatgaaattcaagtagaaaaatgtattcgacgactcttttccatgcataagtgatatatttgtatccctaaaatatatgatcaaataatggatttgaatgaactgaaaaaaatagtgatcgttttatgccaatttattttatttttaaataaatgcactttaatcagcaattattatcttgatcaatacaacccctttcccaccttggttttttttaatctaatataaatacatcaagtaccattattttgataaagatgtgtagggtctgattgctaatctggcacatcattagctctgtgagatagtgtggtttttgtatcctctaatattgaagtttcattgaattcatgattgggtaaaacagattgtttctttatttccaaattgtatatataaaggctttgattttagcatattaattttgcttattgttatgccttgcctatagtaacttattttagtttctccctattagttcatttcataatactaaaaaggaacatattcatgagggacattagtacatagaaaacacaaagagtatagtgaataaatggagtgaatctgaccaatcaggcccatattttgctgaatagagcatctgttgttaggcagtgggtgggacctgagagggctcagccaactggagtttccaaagatctgagttaaaccatcatcaagcaaaggagttcatatccctatcttcaaagtctgaatattaaccattttgacttccttttcttcctaagtctttttgtattaattataacctgaattttatagtctgcataagcgtaagagtccaaaagacttgtagaatgcctaaatcgacactaatgaaagtcatataaagtcatatactggctatagaatattgctttcctccctacagaaatactttttagcattttcaagataaattatgtttttaaatatgtcataaaatggaagttctgtttgatttctgtgaggcggtagcagtgtttttgtatgtgcttgtcagtgacattttggttcacaggatttcaggaaatgacatgcaataataaaacactgcataatacactgataaaaaggcataaaaatggatcattcttaaaatatagatatgggatatatttaaaatcaaatgaagcacatttgagaaatcagattcatcttgtaatttttctctatatagcacattccatctaaaatggaataaatgttcagttctcaaagcctttttatgctaatttgagattaataccaaaccaagatgattcttgctaataattgctaatatttattgaaggcttattacacgtcagctagtatgtttgattctttacatatattagctcactgaatcttcctaacaacacaaagatgtaaatataattattgtcattattttacagatgagaacaattaaatacaataaggtaactcgtccagattcatagaactagtaagaagtggagctgggattccaaacttggcaatcagactcaggagccagtgctcttaactgcaaaactatataggttcttactatgatatataatgttttagttataaatatcttaatattctaccattttatagattgtctaacgaattatagggaacttttcttaagtaagactgtgggccatgcaatacaacagagttgaatagtacctcttaaaacaaggccatggaaaaatattttaacaaatatcctgtgagaggaaagtcactgatataaacatccagtcaattaaaaatacagtagcaatgtgactatttttaatatcttgtggttttagcccagttaccctagagaatggcagcaggatgaacagatggcatcctatcagataaaatggcaggccatgtggtcatataagagtatactccttaccaccaatgtcctttggcttctggcagtaattacaggcacctagatctgtgtaacatgatgtgttttaaagatgccatgataaaatttaggaacatcagctcactgctatcattattgtaaaatgcaatttaatatgcacttacagacatttggtaaccaagcacattcaggctagagttgtgggttggcaacatgtttcttataaataaatgaccttggtaataaatgaaccataagcccatttaggtgaagaatgttttcttgattatatgatacccccatataatatcatatatcatgggtatttaatgcccattagtaatgctgttcaacagggaagaaacagagtcataatccagaatttaatacaaattaatctttccatcacctacatgtttctaaccataatctccaagaaacttgaatggttccaaaactggaaatctctctacctgatttttctaaatgtcaccaggatgtgtttacaagtaaaaatacaacaaataaatcagaaaaagtagctctgtgagcttttgcaataaaaattcagaggaagatgtgagttcacccacatgtctttggttctgggtgttttagtatcaagctggctaatgctaaattcagcaaatttggggaagtaatgtgtgaagtctggaagctgccactgttctaaatgaatcattcctgaggaaagctgctgccttctataggaagctgcttccatcttcaacaatacatttttttttttctggactgaattagttcaactgaaaaacaacaagaagccctgatgccagataaattagaaaaatattatgaatgagatacagaagctttaaatttttgtgcttatgttattatcattactaaagctgaattagtggttaatacaggaggaaaaaactgatttgagcaactaatttatgaaacacatggtgttaagaagtgaggagggaagttgttttcatgaaccaattataagatcaatagatttgggatgtaaaaatagctttctgtgacattacactgaaactttatatatattgccaggtgaggtaaaaaccagagacaatttagataaatcaagccagaaatttcttttcttgtaatagctagaaagctgaggtgaatctttccaatttttatgtttggttttaaaaaactattatttgaattcagcattgtcgttgttgttattgtgtttaaagacagtgatccaagccagactgctatttcataacctatcacaagggtaacaaattccttgtgatcttcctaaaagagacatacggtgaggaaatccctggaaattaaatggaatatgtgacaatcacaagccactgaagagataaagagtagattaagggcttagtgaataggagattattcagtttgtaaaggtgaagagttcctttacagctgctgatctcagtcattttatcaacaggagatgaccttcgaaattttttagaggtttaggaaatattaattgcaaatacaaa

SEQ ID NO: 9219 - DNA, 124 bp, Homo sapiens
  source 1..124: mol_type = unassigned DNA; mol_type = unassigned DNA
gcaggaaagggttaaaactgcaggcttctggattatccacccttacagtgatttcaggcgctggttatcctcgctgtgtttactcagaaacagcggccggcaggcaaaagaagggcaatttgca

SEQ ID NO: 9220 - DNA, 3408 bp, Homo sapiens
  source 1..3408: mol_type = unassigned DNA; mol_type = unassigned DNA
ggccggcggcggcggcggcggctccgctccgcactgcccggcgccgcctcgccatggacgcgcgcgggggcggcgggcggcccggggagagcccgggcgcgacccccgcgccggggccgccgccgccgccgccgcccgcgcccccccaacagcagccgccgccgccgccgccgcccgcgccccccccgggccccgggcccgcgcccccccagcacccgccccgggccgaggcgttgcccccggaggcggcggatgagggcggcccgcggggccggctccgcagccgcgacagctcgtgcggccgccccggcaccccgggcgcggcgagcacggccaagggcagcccgaacggcgagtgcgggcgcggcgagccgcagtgcagccccgcggggcccgagggcccggcgcgggggcccaaggtgtcgttctcgtgccgcggggcggcctcggggcccgcgccggggccggggccggcggaggaggcgggcagcgaggaggcgggcccggcgggggagccgcgcggcagccaggccagcttcatgcagcgccagttcggcgcgctcctgcagccgggcgtcaacaagttctcgctgcggatgttcggcagccagaaggccgtggagcgcgagcaggagcgcgtcaagtcggcgggggcctggatcatccacccgtacagcgacttcaggttctactgggacttcaccatgctgctgttcatggtgggaaacctcatcatcatcccagtgggcatcaccttcttcaaggatgagaccactgccccgtggatcgtgttcaacgtggtctcggacaccttcttcctcatggacctggtgttgaacttccgcaccggcattgtgatcgaggacaacacggagatcatcctggaccccgagaagatcaagaagaagtatctgcgcacgtggttcgtggtggacttcgtgtcctccatccccgtggactacatcttccttatcgtggagaagggcattgactccgaggtctacaagacggcacgcgccctgcgcatcgtgcgcttcaccaagatcctcagcctcctgcggctgctgcgcctctcacgcctgatccgctacatccatcagtgggaggagatcttccacatgacctatgacctggccagcgcggtgatgaggatctgcaatctcatcagcatgatgctgctgctctgccactgggacggctgcctgcagttcctggtgcctatgctgcaggacttcccgcgcaactgctgggtgtccatcaatggcatggtgaaccactcgtggagtgaactgtactccttcgcactcttcaaggccatgagccacatgctgtgcatcgggtacggccggcaggcgcccgagagcatgacggacatctggctgaccatgctcagcatgattgtgggtgccacctgctacgccatgttcatcggccacgccactgccctcatccagtcgctggactcctcgcggcgccagtaccaggagaagtacaagcaggtggagcagtacatgtccttccacaagctgccagctgacttccgccagaagatccacgactactatgagcaccgttaccagggcaagatgtttgacgaggacagcatcctgggcgagctcaacgggcccctgcgggaggagatcgtcaacttcaactgccggaagctggtggcctccatgccgctgttcgccaacgccgaccccaacttcgtcacggccatgctgaccaagctcaagttcgaggtcttccagccgggtgactacatcatccgcgaaggcaccatcgggaagaagatgtacttcatccagcacggcgtggtcagcgtgctcactaagggcaacaaggagatgaagctgtccgatggctcctacttcggggagatctgcctgctcacccggggccgccgcacggcgagcgtgcgggctgacacctactgccgcctctattcgctgagcgtggacaacttcaacgaggtgctggaggagtaccccatgatgcggcgcgccttcgagacggtggccatcgaccgcctggaccgcatcggcaagaagaattccatcctcctgcacaaggtgcagcatgacctcaactcgggcgtattcaacaaccaggagaacgccatcatccaggagatcgtcaagtacgaccgcgagatggtgcagcaggccgagctgggtcagcgcgtgggcctcttcccgccgccgccgccgccgccgcaggtcacctcggccatcgccacgctgcagcaggcggcggccatgagcttctgcccgcaggtggcgcggccgctcgtggggccgctggcgctcggctcgccgcgcctcgtgcgccgcccgcccccggggcccgcacctgccgccgcctcacccgggcccccgccccccgccagccccccgggcgcgcccgccagcccccgggcaccgcggacctcgccctacggcggcctgcccgccgccccccttgctgggcccgccctgcccgcgcgccgcctgagccgcgcgtcgcgcccactgtccgcctcgcagccctcgctgcctcacggcgcccccggccccgcggcctccacacgcccggccagcagctccacaccgcgcttggggcccacgcccgctgcccgggccgccgcgcccagcccggaccgcagggactcggcctcacccggcgccgccggcggcctggacccccaggactccgcgcgctcgcgcctctcgtccaacttgtgaccctcgccgaccgccccgcgggcccaggcgggccgggggcggggccgtcatccagaccaaagccatgccattgcgctgccccggccgccagtccgcccagaagccatagacgagacgtaggtagccgtagttggacggacgggcagggccggcggggcagccccctccgcgcccccggccgtcccccctcatcgccccgcgcccacccccatcgcccctgcccccggcggcggcctcgcgtgcgagggggctcccttcacctcggtgcctcagttcccccagctgtaagacagggacggggcggcccagtggctgagaggagccggctgtggagccccgcccgccccccaccctctaggtggcccccgtccgaggaggatcgttttctaagtgcaatacttggcccgccggcttcccgctgcccccatcgcgctcacgcaataaccggcccggcccccgtccgcgcgcgtcccccggtgacctcggggagcagcaccccgcctccctccagcactggcaccgagaggcaggcctggctgcgcagggcgcgggggggaggctggggtcccgccgccgtgatgaatgtactgacgagccgaggcagcagtgcccccaccgtggccccccacgccccattaacccccacacccccattccgcgcaataaacgacagcattggcgccaa

SEQ ID NO: 9221 - DNA, 7228 bp, Homo sapiens
  source 1..7228: mol_type = unassigned DNA; mol_type = unassigned DNA
caaaaatgccagggaaaggcgagcccagagcttggtgatggagaaattgggaagccaccccccacccttcaatcttaggatggggaattcgcaactgaagccggagcttcagacttggggcgcactcccagcttagcccaggaaagagatttaagggcgcagcagtgtggatacctctcaccccggccccgaaggtctagcgagggtctaacctgggccccttgccaggcccgccccccgcccctttccagcccccggcccgtgcgccgctgcccctttaagaagcccaggtaggcaggcccggctgctggagccgctcctatggcaacccgcgagctgcggcggcttcatgaatattccggggcgcgggagcccgagcgctgccggagggcgcttcgggggaggcggccgctgatgtaagcccggcgggtcgctgggctccgctcggttgcggcgggagccccgggacgggccggacgggccggggcagaggaggcgaggcgagctcgcgggtggccagccacaaagcccgggcggcgagacagacggacagccagccctcccgcgggacgcacgcccgggacccgcgcgggccgtgcgctctgcactccggagcggttccctgagcgccgcggccgcagagcctctccggccggcgcccattgttccccgcgggggcggggcgcctggagccgggcggcgcgccgcgcccctgaacgccagagggagggagggaggcaagaagggagcgcggggtccccgcgcccagccgggcccgggaggaggtgtagcgcggcgagcccggggactcggagcgggactaggatcctccccgcggcgcgcagcctgcccaagcatgggcgcctgaggctgcccccacgccggcggcaaaggacgcgtccccacgggcggactgaccggcgggcggacctggagcccgtccgcggcgccgcgctcctgcccccggcccggtccgaccccggcccctggcgccatggacaagctgccgccgtccatgcgcaagcggctctacagcctcccgcagcaggtgggggccaaggcgtggatcatggacgaggaagaggacgccgaggaggagggggccgggggccgccaagaccccagccgcaggagcatccggctgcggccactgccctcgccctccccctcggcggccgcgggtggcacggagtcccggagctcggccctcggggcagcggacagcgaagggccggcccgcggcgcgggcaagtccagcacgaacggcgactgcaggcgcttccgcgggagcctggcctcgctgggcagccggggcggcggcagcggcggcacggggagcggcagcagtcacggacacctgcatgactccgcggaggagcggcggctcatcgccgagggcgacgcgtcccccggcgaggacaggacgcccccaggcctggcggccgagcccgagcgccccggcgcctcggcgcagcccgcagcctcgccgccgccgccccagcagccaccgcagccggcctccgcctcctgcgagcagccctcggtggacaccgctatcaaagtggagggaggcgcggctgccggcgaccagatcctcccggaggccgaggtgcgcctgggccaggccggcttcatgcagcgccagttcggggccatgctccaacccggggtcaacaaattctccctaaggatgttcggcagccagaaagccgtggagcgcgaacaggagagggtcaagtcggccggattttggattatccacccctacagtgacttcagattttactgggacctgaccatgctgctgctgatggtgggaaacctgattatcattcctgtgggcatcaccttcttcaaggatgagaacaccacaccctggattgtcttcaatgtggtgtcagacacattcttcctcatcgacttggtcctcaacttccgcacagggatcgtggtggaggacaacacagagatcatcctggacccgcagcggattaaaatgaagtacctgaaaagctggttcatggtagatttcatttcctccatccccgtggactacatcttcctcattgtggagacacgcatcgactcggaggtctacaagactgcccgggccctgcgcattgtccgcttcacgaagatcctcagcctcttacgcctgttacgcctctcccgcctcattcgatatattcaccagtgggaagagatcttccacatgacctacgacctggccagcgccgtggtgcgcatcgtgaacctcatcggcatgatgctcctgctctgccactgggacggctgcctgcagttcctggtacccatgctacaggacttccctgacgactgctgggtgtccatcaacaacatggtgaacaactcctgggggaagcagtactcctacgcgctcttcaaggccatgagccacatgctgtgcatcggctacgggcggcaggcgcccgtgggcatgtccgacgtctggctcaccatgctcagcatgatcgtgggtgccacctgctacgccatgttcattggccacgccactgccctcatccagtccctggactcctcccggcgccagtaccaggaaaagtacaagcaggtggagcagtacatgtcctttcacaagctcccgcccgacacccggcagcgcatccacgactactacgagcaccgctaccagggcaagatgttcgacgaggagagcatcctgggcgagctaagcgagcccctgcgggaggagatcatcaactttaactgtcggaagctggtggcctccatgccactgtttgccaatgcggaccccaacttcgtgacgtccatgctgaccaagctgcgtttcgaggtcttccagcctggggactacatcatccgggaaggcaccattggcaagaagatgtacttcatccagcatggcgtggtcagcgtgctcaccaagggcaacaaggagaccaagctggccgacggctcctactttggagagatctgcctgctgacccggggccggcgcacagccagcgtgagggccgacacctactgccgcctctactcgctgagcgtggacaacttcaatgaggtgctggaggagtaccccatgatgcgaagggccttcgagaccgtggcgctggaccgcctggaccgcattggcaagaagaactccatcctcctccacaaagtccagcacgacctcaactccggcgtcttcaactaccaggagaatgagatcatccagcagattgtgcagcatgaccgggagatggcccactgcgcgcaccgcgtccaggctgctgcctctgccaccccaacccccacgcccgtcatctggaccccgctgatccaggcaccactgcaggctgccgctgccaccacttctgtggccatagccctcacccaccaccctcgcctgcctgctgccatcttccgccctcccccaggatctgggctgggcaacctcggtgccgggcagacgccaaggcacctgaaacggctgcagtccctgatcccttctgcgctgggctccgcctcgcccgccagcagcccgtcccaggtggacacaccgtcttcatcctccttccacatccaacagctggctggattctctgcccccgctggactgagcccactcctgccctcatccagctcctccccaccccccggggcctgtggctccccctcggctcccacaccatcagctggcgtagccgccaccaccatagccgggtttggccacttccacaaggcgctgggtggctccctgtcctcctccgactctcccctgctcaccccgctgcagccaggcgcccgctccccgcaggctgcccagccatctcccgcgccacccggggcccggggaggcctgggactcccggagcacttcctgccacccccaccctcatccagatccccgtcatctagccccgggcagctgggccagcctcccggggagttgtccctaggtctggccactggcccactgagcacgccagagacacccccacggcagcctgagccgccgtcccttgtggcaggggcctctgggggggcttcccctgtaggctttactccccgaggaggtctcagcccccctggccacagcccaggccccccaagaaccttcccgagtgccccgccccgggcctctggctcccacggatccttgctcctgccacctgcatccagccccccaccaccccaggtcccccagcgccggggcacacccccgctcacccccggccgcctcacccaggacctcaagctcatctccgcgtctcagccagccctgcctcaggacggggcgcagactctccgcagagcctccccgcactcctcaggggagtccatggctgccttcccgctcttccccagggctgggggtggcagcgggggcagtgggagcagcgggggcctcggtccccctgggaggccctatggtgccatccccggccagcacgtcactctgcctcggaagacatcctcaggttctttgccaccccctctgtctttgtttggggcaagagccacctcttctggggggccccctctgactgctggaccccagagggaacctggggccaggcctgagccagtgcgctccaaactgccatccaatctatgagctgggcccttccttccctcttctttcttcttttctctcccttccttcttccttcaggtttaactgtgattaggagatataccaataacagtaataattatttaaaaaaccacacacaccagaaaaacaaaagacagcagaaaataaccaggtattcttagagctatagatttttggtcacttgcttttatagactattttaatactcagcactagagggagggagggggagggaggagggagcaggcaggtcccaaatgcaaaagccagagaaaggcagatggggtctccggggctgggcaggggtgggagtggccagtgttggcggttcttagagcagatgtgtcattgtgttcatttagagaaacagctgccatcagcccgttagctgtaacttggagctccactctgcccccagaaaggggctgccctggggtgtgccctggggagcctcagaagcctgcgaccttgggagaaaagggccagggccctgagggcctagcattttttctactgtaaacgtagcaagatctgtatatgaatatgtatatgtatatgtatgtaagatgtgtatatgtatagctatgtagcgctctgtagagccatgtagatagccactcacatgtgcgcacacgtgtgcggtctagtttaatcccatgttgacaggatgcccaggtcaccttacacccagcaacccgccttggcccacaggctgtgcactgcatggtctagggacgttctctctccagtcctcagggaagaggaccccaggacttcgcagcaggccccctctctccccatctctggtctcaaagccagtcccagcctgacctctcaccacacggaagtggaagactcccctttcctagggcctcaagcacacaccgccacctctggggccgtcagtttgcccatctgtacagtgggaggtgagcggaacttctgtttattgagtctgctctgtgccaagcactggtttcgcactttacacacattaactccttcagtttcacaaagaccatggggtgggtactttgattctccccatttagcagaggaagaaacagttttgggtaatttttccagaatcatgtaactaggagtggcagagtggggactgatttgaggttcgagtccacgcctccttgaggcccaagtctgtgttccttccatcagaaaactgtgttgaggggggctgaggtagatggtccccaagcatggtacagaaggaagacaccagattttggcagcagtcaggcctgggtttgaatcccagccctgccacttcttagctgtatgatcttgggcaagttatctgacctttctgtcacctcatttgtaaaatgggaataattatggtactgcctcacaaggacctatgaggaccagatgagaaaaatctatatgtgaaatgcccagcccagcgcctggcacataccatggtaggtgctcaataaaaaatcacatttcttctgcccctcatatgcccagcctattgctccagcaaactatgtgagagcccagggagctttggctgagggctccaagacttaaaatctcaggactcaggaggtggctgggcctccctaagggcccaaggaaggtgtgtggccagaggtgggtgggagccaggccttgagaagtgggaagacttcaacagggagagagggagggaatggtgggtgggatggagtgtatggtggggagattcctgaggtggatgtggagtggtggatcagggctttgggaggggatccccaggctgaggggtcagagggacggccttgggtgatagggtaagggattgtctgggcttagtcctggcaactaggagccataagcaggttccagattgcgggaacgagaaagcagctcagatgcctttggaggcaccatcctccctcctcccagatgggatcttgccagagccaaggtcaggggtctgcccctgcctatagggccagagcaggtatggctgcaatccccaagtaatgagaagggctggtcccacattatccatccagaaccttccatgctccaagccagaatgttggcaagatcgggttttgccttgagctatcctgggatgtgagacaaaccgatttctccatagatgggctgcagggagtgggaggcagtactccaggagagaagtgggtgaaggttcctgggatcttaggtaaagactagacgccgcctagtactggtctctactgtgctggctcaggagttctgagaactggaaggacttagcctcaacctgagttctgcacacaccccttccccttaaggaaggcagctctgagaggcagcaggacttgatccaaacccacagtcttgtcctggaggcagcaggggtgaaggtggagggtccagggccatgaggagcccccttgccatcagagcctggcctaaccaccctcttctctacttacacacacatgcattttataatagctctgacccaacctggccactctgcagagactgggacagacaggtgcaggcaatgggccctcccacacccagtcacctacaaggaattttcaaatccacttttaaaacagaaaccggtaaatgcgccgtattgtatattttatttaaataaaaaaaattccagca

SEQ ID NO: 9222 - DNA, 434 bp, Homo sapiens
  source 1..434: mol_type = unassigned DNA; mol_type = unassigned DNA
gcaggaactggaaccctggccgagtccgaaaaaagccagatctggaaggtggctgcggaacggttttaagcggaagatggaggagccggaggaaccggcggacagtgggcagtcgctggtcccggtttatatctatagtcccgagtatgtcagtatgtgtgactccctggccaagatccccaaacgggccagtatggtgcattctttgattgaagcatatgcactgcataagcagatgagaagctggatgagagcagtcaccagtttgtagggcaggaggcagctgacaggcagggtttgggcctcaggaccatccaggtggagccctgggagagagggtactgatcagcagactgggaggtggggagaagtccgctggtgttgttttagtgttatatatctttggtttttttaataaaatctttgaaaaccta

SEQ ID NO: 9223 - DNA, 2014 bp, Homo sapiens
  source 1..2014: mol_type = unassigned DNA; mol_type = unassigned DNA
aaatggccccgtagggcaacaaggatggttagttttgaccctacttatttgtgccataaaaacaatcgatcctaattgacagctatttggacttttacatctgccaaacccttttccttgaactgtggtcactaaatgaggggagtctggtctgggaagtcccatccattccttcaataggatggggagcggtgatagtgtctccggcgatctcaagaataggagggaatgttgaccagggagcaccgctgcggccgatcagaggagcaggaactggaaccctggccgagtccgaaaaaagccagatctggaaggtggctgcggaacggttttaagcggaagatggaggagccggaggaaccggcggacagtgggcagtcgctggtcccggtttatatctatagtcccgagtatgtcagtatgtgtgactccctggccaagatccccaaacgggccagtatggtgcattctttgattgaagcatatgcactgcataagcagatgaggatagttaagcctaaagtggcctccatggaggagatggccaccttccacactgatgcttatctgcagcatctccagaaggtcagccaagagggcgatgatgatcatccggactccatagaatatgggctaggttatgactgcccagccactgaagggatatttgactatgcagcagctataggaggggctacgatcacagctgcccaatgcctgattgacggaatgtgcaaagtagcaattaactggtctggagggtggcatcatgcaaagaaagatgaagcatctggtttttgttatctcaatgatgctgtcctgggaatattacgattgcgacggaaatttgagcgtattctctacgtggatttggatctgcaccatggagatggtgtagaagacgcattcagtttcacctccaaagtcatgaccgtgtccctgcacaaattctccccaggatttttcccaggaacaggtgacgtgtctgatgttggcctagggaagggacggtactacagtgtaaatgtgcccattcaggatggcatacaagatgaaaaatattaccagatctgtgaaagtgtactaaaggaagtataccaagcctttaatcccaaagcagtggtcttacagctgggagctgacacaatagctggggatcccatgtgctcctttaacatgactccagtgggaattggcaagtgtcttaagtacatccttcaatggcagttggcaacactcattttgggaggaggaggctataaccttgccaacacggctcgatgctggacatacttgaccggggtcatcctagggaaaacactatcctctgagatcccagatcatgagtttttcacagcatatggtcctgattatgtgctggaaatcacgccaagctgccggccagaccgcaatgagccccaccgaatccaacaaatcctcaactacatcaaagggaatctgaagcatgtggtctagttgacagaaagagatcaggtttccagagctgaggagtggtgcctataatgaagacagcgtgtttatgcaagcagtttgtggaatttgtgactgcagggaaaatttgaaagaaattacttcctgaaaatttccaaggggcatcaagtggcagctggcttcctggggtgaagaggcaggcaccccagagtcctcaactggacctaggggaagaaggagatatcccacatttaaagttcttatttaaaaaaacacacacacacaaatgaaatttttaatctttgaaaattatttttaagcgaattggggaggggagtattttaatcatcttaaatgaaacagatcagaagctggatgagagcagtcaccagtttgtagggcaggaggcagctgacaggcagggtttgggcctcaggaccatccaggtggagccctgggagagagggtactgatcagcagactgggaggtggggagaagtccgctggtgttgttttagtgttatatatctttggtttttttaataaaatctttgaaaaccta

SEQ ID NO: 9224 - DNA, 329 bp, Homo sapiens
  source 1..329: mol_type = unassigned DNA; mol_type = unassigned DNA
agatcacctcaagagatctggattccagagatctgagtcttgctgatggctcttgatggaactgaggagtttggattcctcaggaggctataaccttgccaacacggctcgatgctggacatacttgaccggggtcatcctagggaaaacactatcctctgagatcccagatcatgagtttttcacagcatatggtcctgattatgtgctggaaatcacgccaagctgccggccagaccgcaatgagccccaccgaatccaacaaatcctcaactacatcaaagccatttactgagcacctactatgagtgaggcactgtgcaagactt

SEQ ID NO: 9225 - DNA, 1037 bp, Homo sapiens
  source 1..1037: mol_type = unassigned DNA; mol_type = unassigned DNA
gtgccataaaaacaatcgatcctaattgacagctatttggacttttacatctgccaaacccttttccttgaactgtggtcactaaatgaggggagtctggtctgggaagtcccatccattccttcaataggatggggagcggtgatagtgtctccggcgatctcaagaataggagggaatgttgaccagggagcaccgctgcggccgatcagaggagcaggaactggaaccctggccgagtccgaaaaaagccagatctggaaggtggctgcggaacggttttaagcggaagatggaggagccggaggaaccggcggacagtgggcagtcgctggtcccggtttatatctatagtcccgagtatgtcagtatgtgtgactccctggccaagatccccaaacgggccagtatggtgcattctttgattgaagcatatgcactgcataagcagatgagagatgaagcatctggtttttgttatctcaatgatgctgtcctgggaatattacgattgcgacggaaatttgagcgtattctctacgtggatttggatctgcaccatggagatggtgtagaagacgcattcagtttcacctccaaagtcatgaccgtgtccctgcacaaattctccccaggatttttcccaggaacaggtgacgtgtctgatgttggcctagggaagggacggtactacagtgtaaatgtgcccattcaggatggcatacaagatgaaaaatattaccagatctgtgaaagtgtactaaaggaagtataccaagcctttaatcccaaagcagtggtcttacagctgggagctgacacaatagctggggatcccatgtgctcctttaacatgactccagtgggaattggcaagtgtcttaagtacatccttcaatggcagttggcaacactcattttgggaggaggaggctataaccttgccaacacggctcgatgctggacatacttgaccggggtcatcctagggaaaacactatcctctgagatcccagatcatgagtttttcacagcat

SEQ ID NO: 9226 - DNA, 908 bp, Homo sapiens
  source 1..908: mol_type = unassigned DNA; mol_type = unassigned DNA
ccgctgcggccgatcagaggagcaggaactggaaccctggccgagtccgaaaaaagccagatctggaaggtggctgcggaacggttttaagcggaagatggaggagccggaggaaccggcggacagtgggcagtcgctggtcccggtttatatctatagtcccgagtatgtcagtatgtgtgactccctggccaagatccccaaacgggccagtatggtgcattctttgattgaagcatatgcactgcataagcagatgaggatagttaagcctaaagtggcctccatggaggagatggccaccttccacactgatgcttatctgcagcatctccagaaggtcagccaagagggcgatgatgatcatccggactccatagaatatgggctaggttatgactgcccagccactgaagggatatttgactatgcagcagctataggaggggctacgatcacagctgcccaatgcctgattgacggaatgtgcaaagtagcaattaactggtctggagggtggcatcatgcaaagaaagatgaagcatctggtttttgttatctcaatgatgctgtcctgggaatattacgattgcgacggaaatttgagcgtattctctacgtggatttggatctgcaccatggagatgtgtactaaaggaagtataccaagcctttaatcccaaagcagtggtcttacagctgggagctgacacaatagctggggatcccatgtgctcctttaacatgactccagtgggaattggcaagtgtcttaagtacatccttcaatggcagttggcaacactcattttgggaggaggaggctataaccttgccaacacggctcgatgctggacatacttgaccggggtcatcctagggaaaacactatcctctgagatcccaga

SEQ ID NO: 9227 - DNA, 913 bp, Homo sapiens
  source 1..913: mol_type = unassigned DNA; mol_type = unassigned DNA
ggttttaagcggaagatggaggagccggaggaaccggcggacagtgggcagtcgctggtcccggtttatatctatagtcccgagtatgtcagtatgtgtgactccctggccaagatccccaaacgggccagtatggtgcattctttgattgaagcatatgcactgcataagcagatgaggatagttaagcctaaagtggcctccatggaggagatggccaccttccacactgatgcttatctgcagcatctccagaaggtcagccaagagggcgatgatgatcatccggactccatagaatatgggctaggttatgactgcccagccactgaagggatatttgactatgcagcagctataggaggggctacgatcacagctgcccaatgcctgattgacggaatgtgcaaagtagcaattaactggtctggagggtggcatcatgcaaagaaagatgaagcatctggtttttgttatctcaatgatgctgtcctgggaatattacgattgcgacggaaatttgagcgtattctctacgtggatttggatctgcaccatggagatggaacaggtgacgtgtctgatgttggcctagggaagggacggtactacagtgtaaatgtgcccattcaggatggcatacaagatgaaaaatattaccagatctgtgaaagtgtactaaaggaagtataccaagcctttaatcccaaagcagtggtcttacagctgggagctgacacaatagctggggatcccatgtgctcctttaacatgactccagtgggaattggcaagtgtcttaagtacatccttcaatggcagttggcaacactcattttgggaggaggaggctataaccttgccaacacggctcgatgctggacatacttgaccggggtcatcctagggaaaa

SEQ ID NO: 9228 - DNA, 679 bp, Homo sapiens
  source 1..679: mol_type = unassigned DNA; mol_type = unassigned DNA
aagcggaagatggaggagccggaggaaccggcggacagtgggcagtcgctggtcccggtttatatctatagtcccgagtatgtcagtatgtgtgactccctggccaagatccccaaacgggccagtatggtgcattctttgattgaagcatatgcactgcataagcagatgaggttatgactgcccagccactgaagggatatttgactatgcagcagctataggaggggctacgatcacagctgcccaatgcctgattgacggaatgtgcaaagtagcaattaactggtctggagggtggcatcatgcaaagaaagatgaagcatctggtttttgttatctcaatgatgctgtcctgggaatattacgattgcgacggaaatttgagcgtattctctacgtggatttggatctgcaccatggagatggtgtagaagacgcattcagtttcacctccaaagtcatgaccgtgtccctgcacaaattctccccaggatttttcccaggaacaggtgacgtgtctgatgttggcctagggaagggacggtactacagtgtaaatgtgcccattcaggatggcatacaagatgaaaaatattaccagatctgtgaaagtgtactaaaggaagtataccaagcctttaatcccaaagcagtggtcttacagctgggagctgac

SEQ ID NO: 9229 - DNA, 2133 bp, Homo sapiens
  source 1..2133: mol_type = unassigned DNA; mol_type = unassigned DNA
agaggagcaggaactggaaccctggccgagtccgaaaaaagccagatctggaaggtggctgcggaacggttttaagcggaagatggaggagccggaggaaccggcggacagtgggcagtcgctggtcccggtttatatctatagtcccgagtatgtcagtatgtgtgactccctggccaagatccccaaacgggccagtatggtgcattctttgattgaagcatatgcactgcataagcagatgaggatagttaagcctaaagtggcctccatggaggagatggccaccttccacactgatgcttatctgcagcatctccagaaggtcagccaagagggcgatgatgatcatccggactccatagaatatgggctaggttatgactgcccagccactgaagggatatttgactatgcagcagctataggaggggctacgatcacagctgcccaatgcctgattgacggaatgtgcaaagtagcaattaactggtctggagggtggcatcatgcaaagaaagatgaagcatctggtttttgttatctcaatgatgctgtcctgggaatattacgattgcgacggaaatttgagcgtattctctacgtggatttggatctgcaccatggagatggtgtagaagacgcattcagtttcacctccaaagtcatgaccgtgtccctgcacaaattctccccaggatttttcccaggaacaggtgacgtgtctgatgttggcctagggaagggacggtactacagtgtaaatgtgcccattcaggatggcatacaagatgaaaaatattaccagatctgtgaaagagccctctttatcagaactccttgaggactcattttccctacctggctataatcaaaacaactactccagaaacacctgcctgcctttatcctttcctctctcctaaataccaaacactcataaatgttatatgtatatgcttttcttgtgtgtcactctgtattacccgatcaattctaccatataaatttctcccaaatctatctcttcctccttatccttgctgtcactggcctggatggttgcaaaagccctcatcaaccttcagggtatcctacaatagagcttgagtatctttaaaatggaaatctaattatgccttcaaagcacacacacacagatgcacacatgcacccacacaatgtttgagacattttgtaccctttaagcaaaagtccaaactcattagcctgccgggcatatatagcccacgtttacctctctagcctcatcccaccactcccgctgtcaagccttcatgtttctgcatgcatacttccttctccggacttagtcccctaccagtaaccccacaatcatctctgcctccaacttccctatcgtcaccctacatacctataaatttctatacttttaaaaaaacttttattgcacaataatcacagattcacagaaggttgcaaaaaaatgtacagggaagtcccatgtacccttcttccagcctcccccaatgttgacatcttatacaattatattacggcatcaaaatgaagaagttgatattggacattggtacaagccatagagcttatttagatttcaccagctatatatgcacgtgtgtgtgtgtgtgtgtgtgtgtgtgtgtgtgtagctctatgcaattttatcacacatgtagccttgcataactacaaccacaatcaagatacagatcagtaccatcaccacaaggttccctcatgctacgcctttatagctacatccatccctaacccctggcaaccaactaatctattctccacctctgtaattattattttgcaaatgtaatatgaatgggctcatgcagcagataatcttttgagattggccttcttgacccagcacaattcccttgagagccacccagattttttgcatgtatcaatagtttgctcctttttattaatgagcaatattccagtggcatggttgtaccagtttgtttaaccatttatctgttgaaatacatctgggttgtttccaatgtttggctattacaaattgagctgctacgaacattcatgtacaagttcctacacaaaaataagtcttaaattatctgaaatacattgcccaagagtacaatt

SEQ ID NO: 9230 - DNA, 2338 bp, Homo sapiens
  source 1..2338: mol_type = unassigned DNA; mol_type = unassigned DNA
ataaaaacaatcgatcctaattgacagctatttggacttttacatctgccaaacccttttccttgaactgtggtcactaaatgaggggagtctggtctgggaagtcccatccattccttcaataggatggggagcggtgatagtgtctccggcgatctcaagaataggagggaatgttgaccagggagcaccgctgcggccgatcagaggagcaggaactggaaccctggccgagtccgaaaaaagccagatctggaaggtggctgcggaacggttttaagcggaagatggaggagccggaggaaccggcggacagtgggcagtcgctggtcccggtttatatctatagtcccgagtatgtcagtatgtgtgactccctggccaagatccccaaacgggccagtatggtgcattctttgattgaagcatatgcactgcataagcagatgaggatagttaagcctaaagtggcctccatggaggagatggccaccttccacactgatgcttatctgcagcatctccagaaggtcagccaagagggcgatgatgatcatccggactccatagaatatgggctaggttatgactgcccagccactgaagggatatttgactatgcagcagctataggaggggctacgatcacagctgcccaatgcctgattgacggaatgtgcaaagtagcaattaactggtctggagggtggcatcatgcaaagaaagatgaagcatctggtttttgttatctcaatgatgctgtcctgggaatattacgattgcgacggaaatttgagcgtattctctacgtggatttggatctgcaccatggagatggtgtagaagacgcattcagtttcacctccaaagtcatgaccgtgtccctgcacaaattctccccaggatttttcccaggaacaggtgacgtgtctgatgttggcctagggaagggacggtactacagtgtaaatgtgcccattcaggatggcatacaagatgaaaaatattaccagatctgtgaaaggtacgaacctcctgccccaaatccaggcctgtagaagcagctgccgcagcttgtcttccccatttgcatagccttgtctgaaaactagactgctgaatactgaaggatcaggtttctcatcaagaaaactgcattttaaatgaatatcttgtatgtttatagggaagttactaatgtagtataaagagatgcctgtcctccccctcctttctggataagagattttatactttcacaaaacgaaaaattaatgatttgcagtgtagcaaacagtactgttacagtggttagggaaactttcccaaaagcaatctggagtgacatttcattcatgtattcatttaatgactatttattgaatgcctactatgtataaagtattgattctaccctcgaggaagttagtggaaatttttaaatgttagataaataaatagagattgattttcatattcacacacatttaaataaataaaacatagaaaattgtaagaaccataagagatagaatgctgtgggtattcaaagagagaaaatacttcagaaaaaggcgtaattgaggaggtaacatttgatctggtttctaaagggtagctaattactctatctttacaaagtgtgtgaatgtatatgagtgtttataaaatctgggtcaagtttgaatatacagagattgtagggaaggatgttctacacacagggtacagcaagatcaaagttgggagagactgagctatgtacaaagaatagcagtggttttagtttggctggactgtaaagtgcatggaggagaagttgcaaagaagattggaaacctgggtgggaaccacatcacggaagagctggaattcttagctatgaaaatttgtaccatattctgtaaacattttgggagccactgaaggttttagaatgagggaatcataagatcaaagcttgcttgggaagattaacactcttcccagtaaagttttggcaacagcatctgctgttatattgacataatgtgggtaaagtggctgacatagtatctgatgcataggagctcagtaagtcatggaagcagatatactgtagtggtttagagcaaaaactctggtgcctggatgcctgggttcaaaaaccagctctgccacttaatagctgtgtgattttgtacagatttcttaacctctctgtatggcagtttccccatctgtaaaataggattaaaaataatacctgttatgaattattatgagggtcaaatgagttaagacatgtaaaatacatagaacagtgctctattctgaataaagttctcaataaatgtta

SEQ ID NO: 9231 - DNA, 819 bp, Homo sapiens
  source 1..819: mol_type = unassigned DNA; mol_type = unassigned DNA
ccctggccgagtccgaaaaaagccagatctggaaggtggctgcggaacggttttaagcggaagatggaggagccggaggaaccggcggacagtgggcagtcgctggtcccggtttatatctatagtcccgagtatgtcagtatgtgtgactccctggccaagatccccaaacgggccagtatggtgcattctttgattgaagcatatgcactgcataagcagatgaggatagttaagcctaaagtggcctccatggaggagatggccaccttccacactgatgcttatctgcagcatctccagaaggtcagccaagagggcgatgatgatcatccggactccatagaatatgggctaggttatgactgcccagccactgaagggatatttgactatgcagcagctataggaggggctacgatcacagctgcccaatgcctgattgacggaatgtgcaaagtagcaattaactggtctggagggtggcatcatgcaaagaagtacgaacctcctgccccaaatccaggcctgtagaagcagctgccgcagcttgtcttccccatttgcatagccttgtctgaaaactagactgctgaatactgaaggatcaggtttctcatcaagaaaactgcattttaaatgaatatcttgtatgtttatagggaagttactaatgtagtataaagagatgcctgtcctccccctcctttctggataagagattttatactttcacaaaacgaaaaattaatgatttgcagtgtagcaaacagtactgttacagtggttagggaaactttcccaaaagcaatctggagt

SEQ ID NO: 9232 - DNA, 632 bp, Homo sapiens
  source 1..632: mol_type = unassigned DNA; mol_type = unassigned DNA
ccgaaaaaagccagatctggaaggtggctgcggaacggttttaagcggaagatggaggagccggaggaaccggcggacagtgggcagtcgctggtcccggtttatatctatagtcccgagtatgtcagtatgtgtgactccctggccaagatccccaaacgggccagtatggtgcattctttgattgaagcatatgcactgcataagcagatgagagatgaagcatctggtttttgttatctcaatgatgctgtcctgggaatattacgattgcgacggaaatttgagcgtattctctacgtggatttggatctgcaccatggagatggaacaggtgacgtgtctgatgttggcctagggaagggacggtactacagtgtaaatgtgcccattcaggatggcatacaagatgaaaaatattaccagatctgtgaaaggtacgaacctcctgccccaaatccaggcctgtagaagcagctgccgcagcttgtcttccccatttgcatagccttgtctgaaaactagactgctgaatactgaaggatcaggtttctcatcaagaaaactgcattttaaatgaatatcttgtatgtttatagggaagttactaatgtagtataaagagatgcctg

SEQ ID NO: 9233 - DNA, 563 bp, Homo sapiens
  source 1..563: mol_type = unassigned DNA; mol_type = unassigned DNA
agaggagcaggaactggaaccctggccgagtccgaaaaaagccagatctggaaggtggctgcggaacggttttaagcggaagatggaggagccggaggaaccggcggacagtgggcagtcgctggtcccggtttatatctatagtcccgagtatgtcagtatgtgtgactccctggccaagatccccaaacgggccagtatggtgcattctttgattgaagcatatgcactgcataagcagatgaggatagttaagcctaaagtggcctccatggaggagatggccaccttccacactgatgcttatctgcagcatctccagaaggtcagccaagagggcgatgatgatcatccggactccatagaatatgggctagagatgaagcatctggtttttgttatctcaatgatgctgtcctgggaatattacgattgcgacggaaatttgagcgtattctctacgtggatttggatctgcaccatggagatggtgtagaagacgcattcagtttcacctccaaagtcatgaccgtgtccctgcacaaattctccccaggattttt

SEQ ID NO: 9234 - DNA, 592 bp, Homo sapiens
  source 1..592: mol_type = unassigned DNA; mol_type = unassigned DNA
ccatgggctttgggggtgggggtgggggcggtggacgaaagagcgttaggaagcggagaggacactgggctgggggaaatcttcagaaatttcgagtagctgtatcagatacctaaagctgtatcagaaggaagtgttctcatatcgtttctgagagcgcagcatgtctcttcgggacgtccaatggacaggccagtatggtgcattctttgattgaagcatatgcactgcataagcagatgaggatagttaagcctaaagtggcctccatggaggagatggccaccttccacactgatgcttatctgcagcatctccagaaggtcagccaagagggcgatgatgatcatccggactccatagaatatgggctaggttatgactgcccagccactgaagggatatttgactatgcagcagctataggaggggctacgatcacagctgcccaatgcctgattgacggaatgtgcaaagtagcaattaactggtctggagggtggcatcatgcaaagaaagatgaagcatctggtttttgttatctcaatgatgctgtcctgggaatattacgattgcgacggaaatttgagcg

SEQ ID NO: 9235 - DNA, 704 bp, Homo sapiens
  source 1..704: mol_type = unassigned DNA; mol_type = unassigned DNA
tccgaaaaaagccagatctggaaggtggctgcggaacggttttaagcggaagatggaggagccggaggaaccggcggacagtgggcagtcgctggtcccggtttatatctatagtcccgagtatgtcagtatgtgtgactccctggccaagatccccaaacgggccagtatggtgcattctttgattgaagcatatgcactgcataagcagatgaggatagttaagcctaaagtggcctccatggaggagatggccaccttccacactgatgcttatctgcagcatctccagaaggtcagccaagagggcgatgatgatcatccggactccatagaatatgggctaggttatgactgcccagccactgaagggatatttgactatgcagcagctataggaggggctacgatcacagctgcccaatgcctgattgacggaatgtgcaaagtagcaattaactggtctggagggtggcatcatgcaaagaaagagacgtgtgtgtatgtggcactttacaaggcattctgaagaaatccaagtgaaatagaaaaaagattacctaatatagtggaaagcacactgctcaaagtcaggacacctgggctctacacctagtttttctaacttggctaactgacttggactgattaccctccctaggcctcagtttcttcatcaataaaatgaacaaaggatacaacta

SEQ ID NO: 9236 - DNA, 833 bp, Homo sapiens
  source 1..833: mol_type = unassigned DNA; mol_type = unassigned DNA
gcggccgatcagaggagcaggaactggaaccctggccgagtccgaaaaaagccagatctggaaggtggctgcggaacggttttaagcggaagatggaggagccggaggaaccggcggacagtgggcagtcgctggtcccggtttatatctatagtcccgagtatgtcagtatgtgtgactccctggccaagatccccaaacgggccagtatggtgcattctttgattgaagcatatgcactgcataagcagatgaggatagttaagcctaaagtggcctccatggaggagatggccaccttccacactgatgcttatctgcagcatctccagaaggtcagccaagagggcgatgatgatcatccggactccatagaatatgggctaggttatgactgcccagccactgaagggatatttgactatgcagcagctataggaggggctacgatcacagctgcccaatgcctgattgacggaatgtgcaaagtagcaattaactggtctggagggtggcatcatgcaaagaagtaagaaaatgacctttctgttttctgactctttccttgagtcagtttctcagttatgtaaactcttatgcttattgtattgacatttacagagagacgtgtgtgtatgtggcactttacaaggcattctgaagaaatccaagtgaaatagaaaaaagattacctaatatagtggaaagcacactgctcaaagtcaggacacctgggctctacacctagtttttctaacttggctaactgacttggactgattaccctccctaggcctcagtttcttcatcaataaaatgaacaaaggatacaa

SEQ ID NO: 9237 - DNA, 607 bp, Homo sapiens
  source 1..607: mol_type = unassigned DNA; mol_type = unassigned DNA
atggttagttttgaccctacttatttgtgccataaaaacaatcgatcctaattgacagctatttggacttttacatctgccaaacccttttccttgaactgtggtcactaaatgaggggagtctggtctgggaagtcccatccattccttcaataggatggggagcggtgatagtgtctccggcgatctcaagaataggagggaatgttgaccagggagcaccgctgcggccgatcagaggagcaggaactggaaccctggccgagtccgaaaaaagccagatctggaaggtggctgcggaacggttttaagcggaagatggaggagccggaggaaccggcggacagtgggcagtcgctggtcccggtttatatctatagtcccgagtatgtcagtatgtgtgactccctggccaagatccccaaacgggccagtatggtgcattctttgattgaagcatatgcactgcataagcagatgagttaagcctaaagtggcctccatggaggagatggccaccttccacactgatgcttatctgcagcatctccagaaggtcagccaagagggcgatgatgatcatccggactccatagaatatgggcta

SEQ ID NO: 9238 - DNA, 330 bp, Homo sapiens
  source 1..330: mol_type = unassigned DNA; mol_type = unassigned DNA
gagtccgaaaaaagccagatctggaaggtggctgcggaacggttttaagcggaagatggaggagccggaggaaccggcggacagtgggcagtcgctggtcccggtttatatctatagtcccgagtatgtcagtatgtgtgactccctggccaagatccccaaacgggccagtatggtgcattctttgattgaagcatatgcactgcataagcagatgaggtaagttgtctttcttgaacatagccctgaagctaggtgttcgtagccttaatatcctgcttcacagtggggcaaggaaaagaatggtcttttgaaaaaattattttagct

SEQ ID NO: 9239 - DNA, 1740 bp, Homo sapiens
  source 1..1740: mol_type = unassigned DNA; mol_type = unassigned DNA
aaatggccccgtagggcaacaaggatggttagttttgaccctacttatttgtgccataaaaacaatcgatcctaattgacagctatttggacttttacatctgccaaacccttttccttgaactgtggtcactaaatgaggggagtctggtctgggaagtcccatccattccttcaataggatggggagcggtgatagtgtctccggcgatctcaagaataggagggaatgttgaccagggagcaccgctgcggccgatcagaggagcaggaactggaaccctggccgagtccgaaaaaagccagatctggaaggtggctgcggaacggttttaagcggaagatggaggagccggaggaaccggcggacagtgggcagtcgctggtcccggtttatatctatagtcccgagtatgtcagtatgtgtgactccctggccaagatccccaaacgggccagtatggtgcattctttgattgaagcatatgcactgcataagcagatgagagatgaagcatctggtttttgttatctcaatgatgctgtcctgggaatattacgattgcgacggaaatttgagcgtattctctacgtggatttggatctgcaccatggagatggtgtagaagacgcattcagtttcacctccaaagtcatgaccgtgtccctgcacaaattctccccaggatttttcccaggaacaggtgacgtgtctgatgttggcctagggaagggacggtactacagtgtaaatgtgcccattcaggatggcatacaagatgaaaaatattaccagatctgtgaaagtgtactaaaggaagtataccaagcctttaatcccaaagcagtggtcttacagctgggagctgacacaatagctggggatcccatgtgctcctttaacatgactccagtgggaattggcaagtgtcttaagtacatccttcaatggcagttggcaacactcattttgggaggaggaggctataaccttgccaacacggctcgatgctggacatacttgaccggggtcatcctagggaaaacactatcctctgagatcccagatcatgagtttttcacagcatatggtcctgattatgtgctggaaatcacgccaagctgccggccagaccgcaatgagccccaccgaatccaacaaatcctcaactacatcaaagggaatctgaagcatgtggtctagttgacagaaagagatcaggtttccagagctgaggagtggtgcctataatgaagacagcgtgtttatgcaagcagtttgtggaatttgtgactgcagggaaaatttgaaagaaattacttcctgaaaatttccaaggggcatcaagtggcagctggcttcctggggtgaagaggcaggcaccccagagtcctcaactggacctaggggaagaaggagatatcccacatttaaagttcttatttaaaaaaacacacacacacaaatgaaatttttaatctttgaaaattatttttaagcgaattggggaggggagtattttaatcatcttaaatgaaacagatcagaagctggatgagagcagtcaccagtttgtagggcaggaggcagctgacaggcagggtttgggcctcaggaccatccaggtggagccctgggagagagggtactgatcagcagactgggaggtggggagaagtccgctggtgttgttttagtgttatatatctttggtttttttaataaaatctttgaaaacct

SEQ ID NO: 9240 - DNA, 2212 bp, Homo sapiens
  source 1..2212: mol_type = unassigned DNA; mol_type = unassigned DNA
ttccggcgcggccagggcccaacttccggcgtccgtcgggcagcagcggggctgtctatcccggctgaggacccgcggccagtgcgggtggctggctttgccattagcgggggcctttcctgaggacggcgtacggagtgtggggaatgaaggatggcagcatgccgtgcattaaaagctgttttggtagatctcagtggcacacttcacattgaagatgcagctgtgccaggcgcacaggaagctcttaaaaggttacgtggtgcttctgtaatcattaggtttgtgaccaatacaaccaaagagagcaagcaagacctgttagaaaggttgagaaaattggaatttgatatctctgaagatgaaatattcacatctctgactgcagccagaagtttactagagcggaaacaagtcagacccatgctgctagttgatgatcgggcactacctgatttcaaaggaatacaaacaagtgatcctaatgctgtggtcatgggattggcaccagaacattttcattatcaaattctgaatcaagcattccggttactcctggatggagcacctctgatagcaatccacaaagccaggtattacaagaggaaagatggcttagccctggggcctggaccatttgtgactgctttagagtatgccacagataccaaagccacagtcgtggggaaaccagagaagacgttctttttggaagcattgcggggcactggctgtgaacctgaggaggctgtcatgataggagatgattgcagggatgatgttggtggggctcaagatgtcggcatgctgggcatcttagtaaagactgggaaatatcgagcatcagatgaagaaaaaattaatccacctccttacttaacttgtgagagtttccctcatgctgtggaccacattctgcagcacctattgtgaagcagtgtgtgcatctgaagcaacttgaaatgcagcttcttattgtctggaatgaatcccttaccaactcagtgccagcatcggtagacaccagtcagtgctgatcgctttttaaccctcttttgttgtgcattaattagaaagaaaggtattgaattgcggctagccagtaagccttgctaatctcttttattttgtaactgaagatgagacccaaagaaagggaaagctgagattttgtgccattccttttaaaatattcatcaggttaggtggggctgtgggggaaaagctactacagggaagagtgttctctgctgtctcttcactggaaaacagggaggggggatttcagactgtgaagaaagttgaatggtggtttttaaattataaagtaatgtattaaaaggtgcattaggctgtagttctaatattgagttcaactgtgaaatccatcagatgtgccaaatggagaagacagaaagcaacaaagtgaattgttctttagcccaagtggtacagtgaatttgctttaacagatgttgaaaactaaattttctactgtattcccagcacgggtgacttctttttctcttcattagccagagatgactaatttaaatttagaaccagattttaatttaaattaatatttccattaataacctattcattgcagatacctattatactgtgtaacagttgttttggaaattttatgtaaaattaaaactatcagtattttacagatgttttaattagacattgttattaacaggaacagtgcagaaactagaatcaagccttataatatcttatagaccatgcatttttgaagttagtgtccactagggtcctattaactgtacatttgcaagatttcattatttttgcctctgacactatgggaaaaattttttagaagctattgggacagattcaagcttttatgcacttggttactacagctgtaaaatgaaatctcgtcttgtagcatggattattcttctcatgttaaacccaccaaaataaaggggactaaataggtaatgattttcctagtgcatttgcatactgtgataatcctgggccttgcaatagttctacagggctcttgggcattgaattattaggatgtaattgtacatcattgtagtgttcaccttattgaagctcactctgatgttaatgagcttcgggttttgatgcttgtttagagatcagcagtcttggatgggagggaacaaagctaaataaatgttagtttggtgagcactgt

SEQ ID NO: 9241 - DNA, 2224 bp, Homo sapiens
  source 1..2224: mol_type = unassigned DNA; mol_type = unassigned DNA
aacttccggcgtccgtcgggcagcagcggggctgtctatcccggctgaggacccgcggccagtgcgggtggctggctttgccattagcgggggcctttcctgaggacggcgtacggagtgtggggaatgaaggatggcagcatgccgtgcattaaaagctgttttggtagatctcagtggcacacttcacattgaagatgcagctgtgccaggcgcacaggaagctcttaaaaggcaagctatcctccaggttcagctgacaaatatgtttgttacgtggtgcttctgtaatcattaggtttgtgaccaatacaaccaaagagagcaagcaagacctgttagaaaggttgagaaaattggaatttgatatctctgaagatgaaatattcacatctctgactgcagccagaagtttactagagcggaaacaagtcagacccatgctgctagttgatgatcgggcactacctgatttcaaaggaatacaaacaagtgatcctaatgctgtggtcatgggattggcaccagaacattttcattatcaaattctgaatcaagcattccggttactcctggatggagcacctctgatagcaatccacaaagccaggtattacaagaggaaagatggcttagccctggggcctggaccatttgtgactgctttagagtatgccacagataccaaagccacagtcgtggggaaaccagagaagacgttctttttggaagcattgcggggcactggctgtgaacctgaggaggctgtcatgataggagatgattgcagggatgatgttggtggggctcaagatgtcggcatgctgggcatcttagtaaagactgggaaatatcgagcatcagatgaagaaaaaattaatccacctccttacttaacttgtgagagtttccctcatgctgtggaccacattctgcagcacctattgtgaagcagtgtgtgcatctgaagcaacttgaaatgcagcttcttattgtctggaatgaatcccttaccaactcagtgccagcatcggtagacaccagtcagtgctgatcgctttttaaccctcttttgttgtgcattaattagaaagaaaggtattgaattgcggctagccagtaagccttgctaatctcttttattttgtaactgaagatgagacccaaagaaagggaaagctgagattttgtgccattccttttaaaatattcatcaggttaggtggggctgtgggggaaaagctactacagggaagagtgttctctgctgtctcttcactggaaaacagggaggggggatttcagactgtgaagaaagttgaatggtggtttttaaattataaagtaatgtattaaaaggtgcattaggctgtagttctaatattgagttcaactgtgaaatccatcagatgtgccaaatggagaagacagaaagcaacaaagtgaattgttctttagcccaagtggtacagtgaatttgctttaacagatgttgaaaactaaattttctactgtattcccagcacgggtgacttctttttctcttcattagccagagatgactaatttaaatttagaaccagattttaatttaaattaatatttccattaataacctattcattgcagatacctattatactgtgtaacagttgttttggaaattttatgtaaaattaaaactatcagtattttacagatgttttaattagacattgttattaacaggaacagtgcagaaactagaatcaagccttataatatcttatagaccatgcatttttgaagttagtgtccactagggtcctattaactgtacatttgcaagatttcattatttttgcctctgacactatgggaaaaattttttagaagctattgggacagattcaagcttttatgcacttggttactacagctgtaaaatgaaatctcgtcttgtagcatggattattcttctcatgttaaacccaccaaaataaaggggactaaataggtaatgattttcctagtgcatttgcatactgtgataatcctgggccttgcaatagttctacagggctcttgggcattgaattattaggatgtaattgtacatcattgtagtgttcaccttattgaagctcactctgatgttaatgagcttcgggttttgatgcttgtttagagatcagcagtcttggatgggagggaacaaagctaaataaatgttagtttggtgagc

SEQ ID NO: 9242 - DNA, 3229 bp, Homo sapiens
  source 1..3229: mol_type = unassigned DNA; mol_type = unassigned DNA
gtcctaaccagaatttgtttagcatgtgaaacagtcatctagaaaaaaaataggatctttctttgccttcatatatcatcaacatagcatcctgttttctccctccattcatcatttatccatccatgaaagcacaggctgctgcagtgagtgaatcagccatgagcaatgcaggcagctccattcactcaacgaacgttattgagcccctgctgtgtgctaggtgctagaactaaaacatatacctaagccacttttgtcaatttctattttgtagaaaccccacttgcagagccagactaagcaaaagcctttaactccatggctaggaagcttatttatttgtctcttagaccactggatccagaaagtaggtcatatagtaatatttagtcattaacttacctgtaagatcaaatagaaaccttgtgaaggagtttatactaacgatatttaagcttgggaagaaaactggcagtagagcttgctgcggggaccatgctatggacaggtgccttcagggtgctaacgagagtgaggtatatattaattacctttgtacatttgatgctggctcccttcctgtaagaagttataatcagtaagataagacaggaagcgtcttctccaccatgatgcaaagatgtggaaaagagggtttttcaggctttgtgtttgtctggcaaagcctcttaaagtagttgtagaaaacagtaggtctcttgttgaaagagctgagtttaggcagagaaaactgggaaaagcagaagaatcaacaatagagaccacaaagggatgagagagcaaggagaaaggtgaagggcagaggcagccctggtggctacagggcaggagctgcgttctgcatttcctccctcccctctcttcttccctccattcattctttaaaaagatatttataggatagttactatgtgctagtcactatgttaggtacttggaatacattgggacatgtaacagatatagcccctgtctcaaataacttagtcttcttaaatgtgagacagatgttaaacaaataaatgcataattacaaattgttgtaaatgttgtggaggcaaagaacaaggtgaataacagggagggggtttaatttggatgggaaggtggggtctgacctgaagcatgaaggaggtagtcaggtgagaataatggaatgacaagggaatggcacgtgtgtaggccctcagaaaagcaggtccagtctgggactgcagcctggtgagccagtagcacatgcttaggtgagagggtcactggggctgcatgacaaagggcttggtaagcagcagtagagattttggattctttctgaagggcactgggacccattaaagggtctttaaatagggactgtgcaccttctgacttgtaaaagctctttgtgaccactgtggaatggttcctctgctgtgttgaggtgttaaattgtgtgccaggtgctagaacagcaggccatcttgaattccacggttgggagagtcaggcagtgagcctgctgcttgatgccaagtggcctgtcctgcctggcccctggcctgcgagcatccatcactcttttcctccccaacccagggcgttctcatctgctgggctcccgggctgcctggatccctgcgtggcagcagcacatcctgttcccagttgcctttgggagcggatgagtcctctgccctctggggtctgggcttccattttaaagcattaatttaatcaccaatctatctttagagctgagggtaggggaaagaaaatgatttcatcagctgtgaacatgtgaagggaatcttagctgtcagacgatccagtacctgtggctgtccattgtgaatgaccagagggcctggggaaaggctgaatgtgacatttctttgaattgcctcatttacatcctgaagcctcaataaaaggtgatttgggagatgtgcagcccctgattctgtcttaactgtaagggtggtgctgtgatgacccaggtgctcatggggtatgattaatttagcattctggtggcagcctgtgtttactggctttactttcatttcagggaaatatcgagcatcagatgaagaaaaaattaatccacctccttacttaacttgtgagagtttccctcatgctgtggaccacattctgcagcacctattgtgaagcagtgtgtgcatctgaagcaacttgaaatgcagcttcttattgtctggaatgaatcccttaccaactcagtgccagcatcggtagacaccagtcagtgctgatcgctttttaaccctcttttgttgtgcattaattagaaagaaaggtattgaattgcggctagccagtaagccttgctaatctcttttattttgtaactgaagatgagacccaaagaaagggaaagctgagattttgtgccattccttttaaaatattcatcaggttaggtggggctgtgggggaaaagctactacagggaagagtgttctctgctgtctcttcactggaaaacagggaggggggatttcagactgtgaagaaagttgaatggtggtttttaaattataaagtaatgtattaaaaggtgcattaggctgtagttctaatattgagttcaactgtgaaatccatcagatgtgccaaatggagaagacagaaagcaacaaagtgaattgttctttagcccaagtggtacagtgaatttgctttaacagatgttgaaaactaaattttctactgtattcccagcacgggtgacttctttttctcttcattagccagagatgactaatttaaatttagaaccagattttaatttaaattaatatttccattaataacctattcattgcagatacctattatactgtgtaacagttgttttggaaattttatgtaaaattaaaactatcagtattttacagatgttttaattagacattgttattaacaggaacagtgcagaaactagaatcaagccttataatatcttatagaccatgcatttttgaagttagtgtccactagggtcctattaactgtacatttgcaagatttcattatttttgcctctgacactatgggaaaaattttttagaagctattgggacagattcaagcttttatgcacttggttactacagctgtaaaatgaaatctcgtcttgtagcatggattattcttctcatgttaaacccaccaaaataaaggggactaaataggtaatgat

SEQ ID NO: 9243 - DNA, 788 bp, Homo sapiens
  source 1..788: mol_type = unassigned DNA; mol_type = unassigned DNA
agcggggctgtctatcccggctgaggacccgcggccagtgcgggtggctggctttgccattagcgggggcctttcctgaggacggcgtacggagtgtgggttactcctggatggagcacctctgatagcaatccacaaagccaggtattacaagaggaaagatggcttagccctggggcctggaccatttgtgactgctttagagtatgccacagataccaaagccacagtcgtggggaaaccagagaagacgttctttttggaagcattgcggggcactggctgtgaacctgaggaggctgtcatgataggagatgattgcagggatgatgttggtggggctcaagatgtcggcatgctgggcatcttagtaaagactgggaaatatcgagcatcagatgaagaaaaaattaatccacctccttacttaacttgtgagagtttccctcatgctgtggaccacattctgcagcacctattgtgaagcagtgtgtgcatctgaagcaacttgaaatgcagcttcttattgtctggaatgaatcccttaccaactcagtgccagcatcggtagacaccagtcagtgctgatcgctttttaaccctcttttgttgtgcattaattagaaagaaaggtattgaattgcggctagccagtaagccttgctaatctcttttattttgtaactgaagatgagacccaaagaaagggaaagctgagattttgtgccattccttttaaaatattcatcaggttaggtggggctgtgggggaaaagctactacaggga

SEQ ID NO: 9244 - DNA, 809 bp, Homo sapiens
  source 1..809: mol_type = unassigned DNA; mol_type = unassigned DNA
cggctgaggacccgcggccagtgcgggtggctggctttgccattagcgggggcctttcctgaggacggcgtacggagtgtggaacagaattctggagtaaagaagcaggttcccttttcgctagacacctcgtctgctactggaacacatccattgtatcttcagcctccatttccaaatgtgcagggaatgaaggatggcagcatgccgtgcattaaaagctgttttggtagatctcagtggcacacttcacattgaagatgcagctgtgccaggcgcacaggaagctcttaaaaggttacgtggtgcttctgtaatcattaggtttgtgaccaatacaaccaaagagagcaagcaagacctgttagaaaggttgagaaaattggaatttgatatctctgaagatgaaatattcacatctctgactgcagccagaagtttactagagcggaaacaagtcagacccatgctgctagttgatgatcgggcactacctgatttcaaaggaatacaaacaagtgatcctaatgctgtggtcatgggattggcaccagaacattttcattatcaaattctgaatcaagcattccggttactcctggatggagcacctctgatagcaatccacaaagccaggtattacaagaggaaagatggcttagccctggggcctggaccatttgtgactgctttagagtatgccacagataccaaagccacagtcgtggggaaaccagagaagacgttctttttggaagcattgcggggcactggctgtgaacctgaggaggctgtcatgataggagatg

SEQ ID NO: 9245 - DNA, 569 bp, Homo sapiens
  source 1..569: mol_type = unassigned DNA; mol_type = unassigned DNA
cttccggcgtccgtcgggcagcagcggggctgtctatcccggctgaggacccgcggccagtgcgggtggctggctttgccattagcgggggcctttcctgaggacggcgtacggagtgtggggaatgaaggatggcagcatgccgtgcattaaaagctgttttggtagatctcagtggcacacttcacattgaagatgcagctgtgccaggcgcacaggaagctcttaaaaggtttgtgaccaatacaaccaaagagagcaagcaagacctgttagaaaggttgagaaaattggaatttgatatctctgaagatgaaatattcacatctctgactgcagccagaagtttactagagcggaaacaagtcagacccatgctgctagttgatgatcgggcactacctgatttcaaaggaatacaaacaagtgatcctaatgctgtggtcatgggattggcaccagaacattttcattatcaaattctgaatcaagcattccggttactcctggatggagcacctctgatagcaatccacaaagccaggtattacaagaggaaagatggctta

SEQ ID NO: 9246 - DNA, 568 bp, Homo sapiens
  source 1..568: mol_type = unassigned DNA; mol_type = unassigned DNA
ggcgtccgtcgggcagcagcggggctgtctatcccggctgaggacccgcggccagtgcgggtggctggctttgccattagcgggggcctttcctgaggacggcgtacggagtgtggacacctcgtctgctactggaacacatccattgtatcttcagcctccatttccaaatgtgcagggaatgaaggatggcagcatgccgtgcattaaaagctgttttggtagatctcagtggcacacttcacattgaagatgcagctgtgccaggcgcacaggaagctcttaaaaggcaagctatcctccaggttcagctgacaaatatgtttgttacgtggtgcttctgtaatcattaggtttgtgaccaatacaaccaaagagagcaagcaagacctgttagaaaggttgagaaaattggaatttgatatctctgaagatgaaatattcacatctctgactgcagccagaagtttactagagcggaaacaagtcagacccatgctgctagttgatgatcgggcactacctgatttcaaaggttactcctggatggagcacctctgatagcaat

SEQ ID NO: 9247 - DNA, 569 bp, Homo sapiens
  source 1..569: mol_type = unassigned DNA; mol_type = unassigned DNA
agcagcggggctgtctatcccggctgaggacccgcggccagtgcgggtggctggctttgccattagcgggggcctttcctgaggacggcgtacggagtgtggccctccacatacataacccaacctttctctgagcgggacacaattcacaattctttatagggaatgaaggatggcagcatgccgtgcattaaaagctgttttggtagatctcagtggcacacttcacattgaagatgcagctgtgccaggcgcacaggaagctcttaaaaggttacgtggtgcttctgtaatcattaggtttgtgaccaatacaaccaaagagagcaagcaagacctgttagaaaggttgagaaaattggaatttgatatctctgaagatgaaatattcacatctctgactgcagccagaagtttactagagcggaaacaagtcagacccatgctgctagttgatgatcgggcactacctgatttcaaaggaatacaaacaagtgatcctaatgctgtggtcatgggattggcaccagaacattttcattatcaaattctgaatcaagcattccggt

SEQ ID NO: 9248 - DNA, 546 bp, Homo sapiens
  source 1..546: mol_type = unassigned DNA; mol_type = unassigned DNA
ctttgcagtggccccgcgcgtgcgcatagctgggcgcgaggcgcgctgtgggtctctgcggggcggatcgtgaagctagtgtgtcagtcattcctcgaagcgtgctcttgggctgtattttggagctagcgtccctcctgggaatgaaggatggcagcatgccgtgcattaaaagctgttttggtagatctcagtggcacacttcacattgaagatgcagctgtgccaggcgcacaggaagctcttaaaaggttacgtggtgcttctgtaatcattaggtttgtgaccaatacaaccaaagagagcaagcaagacctgttagaaaggttgagaaaattggaatttgatatctctgaagatgaaatattcacatctctgactgcagccagaagtttactagagcggaaacaagtcagacccatgctgctagttgatgatcgggcactacctgatttcaaaggaatacaaacaagtgatcctaatgctgtggtcatgggattggcaccagaacattttcattatcaaattctgaatcaagcattccgg

SEQ ID NO: 9249 - DNA, 576 bp, Homo sapiens
  source 1..576: mol_type = unassigned DNA; mol_type = unassigned DNA
agtggccccgcgcgtgcgcatagctgggcgcgaggcgcgctgtgggtctctgcggggcggatcgtgaagctagtgtgtcagtcattcctcgaagcgtgctcttgggctgtattttggagctagcgtccctcctgggaatgaaggatggcagcatgccgtgcattaaaagctgttttggtagatctcagtggcacacttcacattgaagatgcagctgtgccaggcgcacaggaagctcttaaaaggcaagctatcctccaggttcagctgacaaatatgtttgttacgtggtgcttctgtaatcattaggtttgtgaccaatacaaccaaagagagcaagcaagacctgttagaaaggttgagaaaattggaatttgatatctctgaagatgaaatattcacatctctgactgcagccagaagtttactagagcggaaacaagtcagacccatgctgctagttgatgatcgggcactacctgatttcaaaggaatacaaacaagtgatcctaatgctgtggtcatgggattggcaccagaacattttcattatcaaattctgaatcaagcattccg

SEQ ID NO: 9250 - DNA, 566 bp, Homo sapiens
  source 1..566: mol_type = unassigned DNA; mol_type = unassigned DNA
agcggggctgtctatcccggctgaggacccgcggccagtgcgggtggctggctttgccattagcgggggcctttcctgaggacggcgtacggagtgtggacacctcgtctgctactggaacacatccattgtatcttcagcctccatttccaaatgtgcagggaatgaaggatggcagcatgccgtgcattaaaagctgttttggtagatctcagtggcacacttcacattgaagatgcagctgtgccaggcgcacaggaagctcttaaaaggttacgtggtgcttctgtaatcattaggtttgtgaccaatacaaccaaagagagcaagcaagacctgttagaaaggttgagaaaattggaatttgatatctctgaagatgaaatattcacatctctgactgcagccagaagtttactagagcggaaacaagtcagacccatgctgctagttgatgatcgggcactacctgatttcaaaggaatacaaacaagtgatcctaatgctgtggtcatgggattggcaccagaacattttcattatcaaattctgaatcaagcattccg

SEQ ID NO: 9251 - DNA, 559 bp, Homo sapiens
  source 1..559: mol_type = unassigned DNA; mol_type = unassigned DNA
cttccggcgtccgtcgggcagcagcggggctgtctatcccggctgaggacccgcggccagtgcgggtggctggctttgccattagcgggggcctttcctgaggacggcgtacggagtgtggacacctcgtctgctactggaacacatccattgtatcttcagcctccatttccaaatgtgcagggaatgaaggatggcagcatgccgtgcattaaaagctgttttggtagatctcagtggcacacttcacattgaagatgcagctgtgccaggcgcacaggaagctcttaaaaggtttgtgaccaatacaaccaaagagagcaagcaagacctgttagaaaggttgagaaaattggaatttgatatctctgaagatgaaatattcacatctctgactgcagccagaagtttactagagcggaaacaagtcagacccatgctgctagttgatgatcgggcactacctgatttcaaaggaatacaaacaagtgatcctaatgctgtggtcatgggattggcaccagaacattttcattatcaaattctgaatcaagcattc

SEQ ID NO: 9252 - DNA, 557 bp, Homo sapiens
  source 1..557: mol_type = unassigned DNA; mol_type = unassigned DNA
aacttccggcgtccgtcgggcagcagcggggctgtctatcccggctgaggacccgcggccagtgcgggtggctggctttgccattagcgggggcctttcctgaggacggcgtacggagtgtggggaatgaaggatggcagcatgccgtgcattaaaagctgttttggtagatctcagtggcacacttcacattgaagatgcagctgtgccaggcgcacaggaagctcttaaaaggcaagctatcctccaggttcagctgacaaatatgtttgttacgtggtgcttctgtaatcattaggtttgtgaccaatacaaccaaagagagcaagcaagacctgttagaaaggttgagaaaattggaatttgatatctctgaagatgaaatattcacatctctgactgcagccagaagtttactagagcggaaacaagtcagacccatgctgctagttgatgatcgggcactacctgatttcaaaggtaggggaaatttggaaaatttaaagattggatatttatatgtacttacaaatcatttttaaaactggatgtttaga

SEQ ID NO: 9253 - DNA, 1173 bp, Homo sapiens
  source 1..1173: mol_type = unassigned DNA; mol_type = unassigned DNA
ctcgccgcctcgccgtcccgccgccttgccgccctgccaccctgccgccctgccgccctgccgccctgccgccctgccgccggtggtcgctgcccgtggtgctccgtcgcccccgccacctcacgtcctcccgtgcgtcgggagcgtctcggctacaacatgttgggcatgatcaagaactcgctgttcggaagcgtagagacgtggccttggcaggtcctaagcaaaggggacaaggaagaagttgcctatgaagaaagggcctgtgaaggcggcaaatttgccacagtagaagtgacagataagcctgtggatgaggctctacgggaagcaatgcccaaggtcgcaaagtatgcggggggcaccaatgacaagggaattgggatggggatgacagtccctatttcctttgctgtgttccccaatgaagatggctctctgcagaagaaattaaaagtctggttccggattccaaaccaatttcaaagcgacccaccagctcccagtgacaaaagcgttaagattgaggaacgggaaggcatcactgtctattccatgcagtttggtggttatgccaaggaagcagactacgtagcacaagccacccgtctgcgtgctgccctggagggcacagccacctaccggggggacatctacttctgcacgggttatgaccctcccatgaagccctacggacggcgcaatgagatctggctgttgaagacatgagtgacccactgaaccaagaacttactggaagtgtgcctctgtgtctccttcctcgggggtaaggaggggacagtgcttcccaagttccagctgcaagtccaacttaaccaactttccttcaaagtcagttactgccaattttctgaaaaaagcatgttccatatactaagtctcttttctcacagtaggaaataatacagccaagatatgcagcatccttctcattgatgtagaaaattctgcgatagaccagaaaaatcctggcagcttttctccaggcatctgggtcactaaaaactgattttctaaaattattggatttgtattttgttattaagggggaaaatgtgatttgtgcctgatctttcatctgtgattcttataagagctttgtcttcagaaaaactaaaaataaaaggcattgacttaaacagctgagacaaa

SEQ ID NO: 9254 - DNA, 652 bp, Homo sapiens
  source 1..652: mol_type = unassigned DNA; mol_type = unassigned DNA
aatactgagctctgacattgggtgagataaaacactgccctggaggagagcttctttcaagatgaggcgtttatagataaagacgtattcacaggcttacaaagataatgtatagacttcacgtttctttcttttaggggctcaaagcactttatgagcatttcttaactcaccttcaagtgcgcgcaggaattcggagagcagtgggcccactgttattgtgctccatgtccagattggaagctgaggcacgaaccaatgaggcaaagtgtctgtgaacacaagcagagtcagccagagctaggctcccttcatacaccaggggattccgggatctcactatgttgtccaggctggaatgcagtggctattcacagatgtgatcatagcacagtgcagcctcaactcctggccttgatcagtcctcctgcctcagcctcccaagtagctgggaccacaggcatgcaccacaacactcagctacatggcagtttggtggttatgccaaggaagcagactacgtagcacaagccacccgtctgcgtgctgccctggagggcacagccacctaccggggggacatctacttctgcacgggttatgaccctcccatgaagccctacggacggcgcaatgagatctggctgttgaa

SEQ ID NO: 9255 - DNA, 460 bp, Homo sapiens
  source 1..460: mol_type = unassigned DNA; mol_type = unassigned DNA
aagggaattgggatggggatgacagtccctatttcctttgctgtgttccccaatgaagatggctctctgcagaagaaattaaaagtctggttccggattccaaaccaatttcaaagcgacccaccagctcccagtgacaaaagcgttaagattgaggaacgggaaggcatcactgtctattccatctgaaagtgccaaatgtggtgtctagcctggctccatggaatttttaacacggagttctcacacagcatatgatcattcctcaactcgccacttgatgtcactgcatagtcaaatgagcattcaaaattaccctgcagtggtttgtgttatttctgattctgttgaaagcaatgttaatgagatggtagaaggcaaatgtactacttcaaatgcaaaagtactctatcaaataatgcagtgagtgcattcaatgacaaaattaattctaaaatga

SEQ ID NO: 9256 - DNA, 2056 bp, Homo sapiens
  source 1..2056: mol_type = unassigned DNA; mol_type = unassigned DNA
ctcgccgtcccgccgccttgccgccctgccaccctgccgccctgccgccctgccgccctgccgccctgccgccggtggtcgctgcccgtggtgctccgtcgcccccgccacctcacgtcctcccgtgcgtcgggagcgtctcggctacaacatgttgggcatgatcaagaactcgctgttcggaagcgtagagacgtggccttggcaggtcctaagcaaaggggacaaggaagaagttgcctatgaagaaagggcctgtgaaggcggcaaatttgccacagtagaagtgacagataagcctgtggatgaggctctacgggaagcaatgcccaaggtcgcaaagtatgcggggggcaccaatgacaagggaattgggatggggatgacagtccctatttcctttgctgtgttccccaatgaagatggctctctgcagaagaaattaaaagtctggttccggattccaaaccaatttcaaagcgacccaccagctcccagtgacaaaagcgttaagattgaggaacgggaaggcatcactgtctattccatgtaaggagacaatccttcaggcatccatgggtggcgcttgattcccgtaccactccttgcatcacctctggcaagcattcgcgtcaaatttttatggttgctgaattaatttaagtaggaaatgctgaatcctaacagtttctcattttaatttcttcaggctgcagcacacacacatttgcattttatcagaataaatgccttggccagttgccaaattgatgggacgagcttaagctttgcttaagcttacagtgaatgtctacattagccatagcagggttctaggagactcagcaaatatcttaagtcaagccatggtctggattcgtggacacatgggaagcataaagggctgaggaatacctgatttctaccccacactccctttgaatgccagagagcagggagcatttgctagagctgggcttccatcctccttgttgttcctggatggtagtcctttgagcagagcacacatctattctcttgtcatcctggtcctgtttccaggacttcatgtggggtcattttcccttgactgtagagaatagcaggtgcaaatggttactagtttctatcccttgtgctccaaactgccctcagaaaccaagtcttctagatcattgatgactcctcacatttgttaaaacactcccatgtgacaggcaccaaaccaggctcagggaaagaccaggatcttcaccagaagtaatcataggtggtttggctccgctcaggagcaacctcatgaaaaattcacatacatataatattgcactggactgagtattggtccacttcagggacctccaaacttggctgccctgctgcaaccctgaacctgatggtgggaccattttccccggagctgtgtcaatgttctgagaatgtgagtttcaccgctgtgtgtagtcctaggccaggtgactgcagggccctccagaggacagtgaatgtaatgcagctgggagctagcaccggagcctcagctcctgtgcttgtcctgcagtcctcattcagacttcccagcttcccttcagagggtgtggagaaagcaaattaacttaacaatatcttttcctagggtggagatgcaccttgggtgcagcatttaaggaagcactcactctcacagctgtccaagtgcaggatggggactgagagtgagcgcctccttaaatcttgtgccctgggttagatgtctgcttgtcttttccattctatttcctgtgtttgggaagcagcaggtataataaaatgaacttgtattttatttgaattccagctctactgcttactagcagaatgatgcttgggaagttagccactttaagacttagcttttgcatttgttaagtgctgataatataacctcctatatatgatgtgtgtgtgtgtgcatgtaatgtaaccttataggattattgttaaatatctttcagtatttactaagatactatttatgtattacctaatgtttatgacctgaagcaggttttggcaa

SEQ ID NO: 9257 - DNA, 5614 bp, Homo sapiens
  source 1..5614: mol_type = unassigned DNA; mol_type = unassigned DNA
gccttttccctccggctcgggagcgtctcgcttgcgccccgggcccgcggcgcccgcgcggctgcgagcctcgggtggccgcgtgccggctccaggaagccggagagggcgcggcggccaggatggcgcggcacgggccgtgcggctagacgggagccgagggaaccgccggctcgcgccctccgttctttcccggagccggcttcacgcagggccgggaacggccgtgcctctgggatccgccttcgctgacgccgggcacctacctggacgcgagcgagcgagatgcccaaccccaaaaacagcaaaggcggccgcaaaaacaagcgcgccaacagcagcggcgacgagcaggaaaatggagccggggccctggcagcggcgggcgcggcgggagcggcggccgggggggccctggcggcggcggccggttgcggggcggcggcggcgggcgcgccgggcgccggaggcgcggcgggcgccggaggcgcggggactggcgccgcgaacgctgcggccgccgcgggggctgcggccgcgggcgatgccaaaaacgaagccccatgtgccactcccctgatctgcagcttcggtaggccggtggacctggagaaggacgactaccagaaggtggtgtgcaacaacgagcactgcccctgcagcacctggatgcacctgcagtgcttctacgagtgggagagcagcatcctcgtccagttcaactgcatcggccgcgcgcgcagctggaacgagaagcaatgccgccagaacatgtggacaaagaagggctacgacctggccttccgcttctgctcttgccgctgtggccagggccacttgaagaaggacacagactggtatcaggtgaagcggatgcaggacgagaaaaagaagaagtctggctccgagaagaacacagggaggcctcctggtgaggcggcggaggaggcaaaaaagtgcaggcccccaaataagccccagaaaggcccaagccacgacctcccccgccggcattccatggaccggcagaactcccaggagaaggcagtgggtgccgcagcctacggtgcccgttcccccggtggctccccgggccagtccccacccacgggctactccatcctctctcctgcccacttcagcggcccccgctcctccagatacctcggggagttcttaaagaacgccatccatctggagcctcacaagaaggccatggctgggggccatgtgttcagaaatgcccactttgattacagccctgcggggttggcagttcacagggggggacacttcgacacccccgtgcagttccttcggcggctggacctctccgaactcctcactcacatccccaggcataagctgaacactttccacgtgcgcatggaagacgatgcccaagtgggccagggggaagacttgcggaagttcattctggccgcgctcagtgccagccacagaaacgtggtaaactgtgccctgtgccaccgggcgctcccggtgttcgaacagttcccactggtggatggaactttgttcctaagcccgtcgagacatgatgagatcgaatatgatgttccttgtcaccttcaagggagactcatgcatctgtatgccgtgtgcgtggactgcctggaaggggttcacaagatcatctgcatcaagtgtaagtcacggtgggatggcagctggcaccagctgggcactatgtacacctacgacatcctggctgcctctccatgttgtcaggcccgcctgaactgtaagcactgtgggaagccggtgatcgacgtgaggatcgggatgcagtacttctccgaatatagcaacgtccagcagtgtccacactgtgggaacctggactaccacttcgtgaagccattttcctccttcaaagttctcgaagcttattgatgaaagctttgctttagtaatagctattttattgatattattactttattacatatcttttatagggaaacattctgtgacattaatttcctttctaatttaaaggagagttactttgttgtatgtgtgccactaaaataggggctgcccttgccctgtcttgattcccgagtgttaatctgtggttttgaccagagcccagatgggtaatcctgtgcatttgggttggggttcactcttaccaagaatctttgatgcagctttaagatggtggggaggatggggtgaatttaggaaaggaatttgtggttataaactaagagcttgataggagttggaaggaaactcttactaaaatgttaactttctaaaaaccttcttttagatcttccttgggcctttggaaaaatatgtgacaagtgaatgtaagtctgtgcctggagagctaatagtgcattagtctatctcagcctagtgttctgcagcacacatgggcaggcagtttactcacactgacaggtgacctgaaagtggcacaagtgctgtttctatcactattgtaatttgccagttcatttttcatgctgaaagtaatatccaaattgtaagacatatgaaagatattagtgttgcaaatatgtttaggtaaactgacctataacagaatatgtgaaatgaatttggaaataatgcaagaaggcagaactcaatcatttaaattgtgtctttgaagttggtaatatagcttttaaggagaacccatgaataacctgatttgggcagtgatgatttattacaggttgcactgttgaagtgtcatttggtgtcaggttcttctcacaggtaaatctttcagccacagaatctaactggtgagcttcagaaccaataattgccacatttattgtcctcaaaattgcttatggccatgtataaccaattaattctgagtttccaaaatcaaagatttgaccttaagagggaagggaaaaaagtgtgaaaggatgatgaagaaaataattttactatttcttttaaaagtatgttttggaaaatcaatgattttaatgcatagcagtatgtttgaaaaatagaccattctaaaaagcccatgataccttactgttgatgaaaaaggatgatcatatatatagaacttgattagtcagagcattgggcattccaaaatacagcctttggttcagtagattttaatgctttaaatagactgacgtcgcatacccttatagaattggaatatgatttctcaaaaattaatttgataatttcatgtatgatgtgcatatatgctaaaagaatgcagaaaatcattttatgaatagccaaatttggggttgatgtgaacattttatgttactcatttggtttatacttttttttttttttttttaactgtgtggtttttcttttcagaagtatttaggcaatattgcacgtgagtttcagttctttttttcttttttttgagatggagtctcactcttgtcacccaggctggagtgcagtagtgcgatctcagctcactgcaacctctgcctcctggattcaagcgattctcctgtcccagcctcccaggtagctgggactataggcacgtgccaccacacccggctaattttttgtatttttagtagagacagcgtttcaccatgttagctaggatggtctagatctcctgaccttgtgatctgcctgcctcggcctcccaaagtgctgggattacaggcgtgagtcactgtgcctggccaagtttcagttctatatgaagtatttgatgttttgtttgaaacaatacagcattaaagaaccaatgttattcactaatatcattcatctttcagtttggatgatttggtttgctgcatctaggttggtgtttgatcatctgaaaaaacatttcagtgggaagaaatgcataaaatgcctataagaagtagaaagtcattgaactgacagtgtttgatgcaactaaaagaggattgtaagacatagctttctgcaaacttgtctttaatgcacaaagctgtagtggtgaattaactatctccttattgattctctcctgtacccagatgcaaaaagtgctaagtttctcttgtcctcgtaataccatttggattttatttctgaatttaaatagtaaaatatttatgatgctgatctttaacccacctaaaattttatagtgaaacctgctttatattgttgttctgaagcttacaattgacctatacattgcattcagcaagctcctgaatttagaactgccgtcagtgtagtgtatgctgtgttccatgttgcctttttagatggctttctaccccctgaacaataaataggatgaggttttactgtaattgggtaaagtttactcttggacattatttcgatgctaaagtaaggattctgtggatgttacttaaagagaaaagcataagagcatgaagcatatctgggaatatcttttgcctttaagacgattcattcttgtctagagggaaaatctggctgatttgggaataaaatataatcgaatattcaacaccatgaagataaatcttattttggaaatctactgaccttaataccccaagcttgccctgaatactttgattggaattggaatatatcaaaaaaggttagtatttttgttgtagttaggatactaaaaggatattagttacccaagagatccaatttgtttttctgatgaatagtgttcagtaaaatgaagcagtcttaagagtgactaataatttcaaagtgatttttcgtctattcttaatattttttaattatttatttttaagagttttataccttgagcagatacaatgatctgctttagtgagaggacaatttctgattgattgttttctcttcaggccatctcacctcttcattctcttgttacatttgaagcagttgatataatgggtttatactttaaaagatagacatggtgccatgaagttggggagttgggtgaattatcccattctagttacagaggagctttccttaaatgccctttaacttctaggttttgttcaagaagttcattttctgagtaaaaggtattttcatatatgttgggggaaaattaactcatctaaaaagaatcttattaggtatttgaactctaaaactaacagataagacagatatgtaccttattagagcaccagaactaatttgctaagtcttttgtttagtcctgcaagactgatgcttaatacacagtctgttctcctgtgtctaggtcaggaactccagtttgcttttctgttttgtgtcctggtagcagctgttgagtaactttcattggaggttgggaaggaagtgaggagaaagtgttcttgtttagtgttttatttcctataataggatgctgcctaacccagttcatctctatgtcctgttcactgaatattccgggtaattgaaagaaaatataatggatgggctccattaaaaccagctcaaaaataaattcttgtcagtaaagatttcttgtcaagatgtcttggattgcacttttgttgaggaaagacagtgtaaatagttaaagaatgttgataaaattgaaacatttggttgtggaattgtgtgtggttttagagggtttctgtttgtgaaatgtatgtattaaaaataataaaattccagaaactaa

SEQ ID NO: 9258 - DNA, 9501 bp, Homo sapiens
  source 1..9501: mol_type = unassigned DNA; mol_type = unassigned DNA
ggggatgcaagcgggaggataaagcgatgaagtgtgctgcgttaccgcgcatcaggcgctgttgttggagccggaacaccgtgcgactctgaccgaaccggccccctcctcgcgcacacactcgccgagccgcgcgcgcccctccgccgtgacagtggccgtggcctccgctctctcggggcacccggcagccagagcgcagcgagagcgggcggtcgccagggtcccctccccagccagtcccaggcgcccggtgcactatgcggggcacgtgcgccccccagctctaatctgcgcgctgacaggagcatgatctgtgcccaggccagggctgccaagatatcaatgctatgttcagcagaaacggatacagcaagagcagcatagttcaaaaattgagggaggcatcttctctcttttcctgggatttaaacgcgatttaggagggcagatgccctacccgaaaaggccaaccgttaaagaccccggcagtgttgtggtccaaggcgtctcaaagcaggtggccagatctgcgtttctcatcagcagactcactccggctgtggctattacggaattgatgcgcgtacacgtggtgggtcattatgctgctgcacctgtgtagtgtgaagaatctgtaccagaacaggtttttaggcctggccgccatggcgtctccttctagaaactcccagagccgacgccggtgcaaggagccgctccgatacagctacaaccccgaccagttccacaacatggacctcaggggcggcccccacgatggcgtcaccattccccgctccaccagcgacactgacctggtcacctcggacagccgctccacgctcatggtcagcagctcctactattccatcgggcactctcaggacctggtcatccactgggacataaaggaggaagtggacgctggggactggattggcatgtacctcattgatgaggtcttgtccgaaaactttctggactataaaaaccgtggagtcaatggttctcatcggggccagatcatctggaagatcgatgccagctcgtactttgtggaacctgaaactaagatctgcttcaaatactaccatggagtgagtggggccctgcgagcaaccacccccagtgtcacggtcaaaaactcggcagctcctatttttaaaagcattggtgctgatgagaccgtccaaggacaaggaagtcggaggctgatcagcttctctctctcagatttccaagccatggggttgaagaaagggatgtttttcaacccagacccttatctgaagatttccattcagcctgggaaacacagcatcttccccgccctccctcaccatggacaggagaggagatccaagatcataggcaacaccgtgaaccccatctggcaggccgagcaattcagttttgtgtccttgcccactgacgtgctggaaattgaggtgaaggacaagtttgccaagagccgccccatcatcaagcgcttcttgggaaagctgtcgatgcccgttcaaagactcctggagagacacgccataggggatagggtggtcagctacacacttggccgcaggcttccaacagatcatgtgagtggacagctgcaattccgatttgagatcacttcctccatccacccagatgatgaggagatttccctgagtaccgagcctgagtcagcccaaattcaggacagccccatgaacaacctgatggaaagcggcagtggggaacctcggtctgaggcaccagagtcctctgagagctggaagccagagcagctgggtgagggcagtgtccccgatggtccagggaaccaaagcatagagctttccagaccagctgaggaagcagcagtcatcacggaggcaggagaccagggcatggtctctgtgggacctgaaggggctggggagctcctggcccaggtgcaaaaggacatccagcctgcccccagtgcagaagagctggccgagcagctggacctgggtgaggaggcatcagcactgctgctggaagacggtgaagccccagccagcaccaaggaggagcccttggaggaggaagcaacgacccagagccgggctggaagggaagaagaggagaaggagcaggaggaggagggagatgtgtctaccctggagcagggagagggcaggctgcagctgcgggcctcggtgaagagaaaaagcaggccctgctccttgcctgtgtccgagctggagacggtgatcgcgtcagcctgcggggaccccgagaccccgcggacacactacatccgcatccacaccctgctgcacagcatgccctccgcccagggcggcagcgcggcagaggaggaggacggcgcggaggaggagtccaccctcaaggactcctcggagaaggatgggctcagcgaggtggacacggtggccgctgacccgtctgccctggaagaggacagagaagagcccgagggggctactccaggcacggcgcaccctggccactccgggggccacttccccagcctggccaatggcgcggcccaggatggcgacacgcaccccagcaccgggagcgagagcgactccagccccaggcaaggcggggaccacagttgcgagggctgtgacgcgtcctgctgcagcccctcgtgctacagctcctcgtgctacagcacgtcctgctacagcagctcgtgctacagcgcctcgtgctacagcccctcctgctacaacggcaacaggttcgccagccacacgcgcttctcctccgtggacagcgccaagatctccgagagcacggtcttctcctcgcaagacgacgaggaggaggagaacagcgcgttcgagtcggtacccgactccatgcagagccctgagctggacccggagtccacgaacggcgctgggccgtggcaagacgagctggccgcccctagcgggcacgtggaaagaagcccggaaggtctggaatcccccgtggcaggtccaagcaatcggagagaaggtgaatgtcctatactccataattcccagccagtaagccagcttccttccctgaggcctgaacatcatcactacccaacaatcgatgagcctcttccaccaaactgggaagctcgaattgacagccacgggcgggtcttttatgtggaccacgtgaaccgcacaaccacctggcagcgtccgacggcagcagccaccccggatggcatgcggagatcggggtccatccagcagatggagcaactcaacaggcggtatcaaaacattcagcgaaccattgcaacagagaggtccgaagaagattctggcagccaaagctgcgagcaagccccagcaggaggaggcggaggtggagggagtgactcagaagccgaatcttcccagtccagcttagatctaaggagagaagggtcactttctccagtgaactcacaaaaaatcaccttgctgctgcagtccccagcggtcaagttcatcaccaaccccgagttcttcactgtgctacatgccaattatagtgcctaccgagtcttcaccagtagcacctgcttaaagcacatgattctgaaagtccgacgggatgctcgcaattttgaacgctaccagcacaaccgggacttggtgaatttcatcaacatgttcgcagacactcggctggaactgccccggggctgggagatcaaaacggaccagcagggaaagtcttttttcgtggaccacaacagtcgagctaccactttcattgacccccgaatccctcttcagaacggtcgtcttcccaatcatctaactcaccgacagcacctccagaggctccgaagttacagcgctggagaggcctcagaagtttctagaaacagaggagcctctttactggccaggccaggacacagcttagtagctgctattcgaagccaacatcaacatgagtcattgccactggcatataatgacaagattgtggcatttcttcgccagccaaacatttttgaaatgctgcaagagcgtcagccaagcttagcaagaaaccacacactcagggagaaaatccattacattcggactgagggtaatcacgggcttgagaagttgtcctgtgatgcggatctggtcattttgctgagtctctttgaagaagagattatgtcctacgtccccctgcaggctgccttccaccctgggtatagcttctctccccgatgttcaccctgttcttcacctcagaactccccaggtttacagagagccagtgcaagagccccttccccctaccgaagagactttgaggccaagctccgcaatttctacagaaaactggaagccaaaggatttggtcagggtccggggaaaattaagctcattattcgccgggatcatttgttggagggaaccttcaatcaggtgatggcctattcgcggaaagagctccagcgaaacaagctctacgtcacctttgttggagaggagggcctggactacagtggcccctcgcgggagttcttcttccttctgtctcaggagctcttcaacccttactatggactctttgagtactcggcaaatgatacttacacggtgcagatcagccccatgtccgcatttgtagaaaaccatcttgagtggttcaggtttagcggtcgcatcctgggtctggctctgatccatcagtaccttcttgacgctttcttcacgaggcccttctacaaggcactcctgagactgccctgtgatttgagtgacctggaatatttggatgaggaattccaccagagtttgcagtggatgaaggacaacaacatcacagacatcttagacctcactttcactgttaatgaagaggtttttggacaggtcacggaaagggagttgaagtctggaggagccaacacacaggtgacggagaaaaacaagaaggagtacatcgagcgcatggtgaagtggcgggtggagcgcggcgtggtacagcagaccgaggcgctggtgcgcggcttctacgaggttgtagactcgaggctggtgtccgtgtttgatgccagggagctggagctggtgatagctggcaccgcggaaatcgacctaaatgactggcggaataacactgagtaccggggaggttaccacgatgggcatcttgtgatccgctggttctgggctgcggtggagcgcttcaataatgagcagaggctgagattactgcagtttgtcacgggaacatccagcgtgccctacgaaggcttcgcagccctccgtgggagcaatgggcttcggcgcttctgcatagagaaatgggggaaaattacttctctccccagggcacacacatgcttcaaccgactggatcttccaccgtatccctcgtactccatgttgtatgaaaagctgttaacagcagtagaggaaaccagcacctttggacttgagtgaggacatggaacctcgcctgacattttcctggccagtgacatcacccttcctgggatgatccccttttccctttcccttaatcaactctcctttgattttggtattccatgatttttattttcaaaccaaatcaggattgacaaaagctgtgcatgaagaactgccttcttctaagatctaaccttcaggcttctctcctctgttttcaatgaactgctagcctgtatgcaatattaaaaaacagctgtctcaaggtctgtgtatatctccacatacctccattactaacaatgaaatatgaatgcaagttaagctacacttgaccaaatggtaataaatgtttacttccatttctatcattgaagggaaaatgtgagcattaagcactccaggctttcatatgcccatgtcttctgagcagagccaccattttttataatttctaataaccaactccagaactaggagctgatcaactctttgttttcctctccatctacttttccctgtgcataatatccatccaaaggacaacagtggcaaagctgaaatttttatacattcaactcatgattcacatgtggcatcagtcccatcagccggaactagcctagacatacggtgcaaatatgacacttctaacgattaacaacagcaagaaaacacctgctgctgatgcaatgcaatgcatcccaatggttgtggggattgtgggctcaactcaagagaagtttaggagggggagcatccctagtgaatactcacaccacaagaaggacaaacttgtgcacatgtccaagaaagaaagcttcttgattgaggtagcatgaaggatgaggcttcagcccccattgtcttatgtagaatgtggcaatgccaactggagaaagggaagaaggacatattaccttggtttgaatccctgagttctgtactgttctgttttgtttagtctagccacagttcttcacaaaggaaaaaaaaatgtgtagatgataccatgacttttgttaaagccatgacttttgtttgcttggcagacaaaccctttttttaaaactttgatatttttttttcacatttttttttccttttcctttcttaatcatggagttcaagttcctttgcattcgattgtccatcgggaccacactaggaagctgcagagagtgatggtgcttgttagggatcaagggcaacatagtacttctccttcacccatagtaatcctcctggggcagaaacataacaccccaaaggcacgttgatttgtatcaaaataaatatccagtttcttttagcattcagtgaaaacatatctcagaaaacttcatgttgtcagaaaaacagctgcaggctccaaagacagcctaacctctcaactacatttgaaataaacccaaccataatggtcatttgctatttttctaacgttgttatccatgttgcctgaaataggtcataaatgaaagtgtttttcttcactgggaaaaagaagagctcaagagaccccactatttaaatgtcatttaattgttttccatattaaaacaagggagaaatgtaagacgaagtgaatttcatatgaagccaatggctcattataccagtttgtgtctggacagtgtgttatttgtgttcctacactctaaagcattccggccaggagcggtggctcatgcctgtaatcccagcactttgggaggccgaggtggggagatcgcttgaggtcaggagttcaagacaagcctggccaacatggtgaaaccccatctctactaaaaatacaaaaattagccgggcgtgatggcacatgccggtagtcccagctacttgggaggctgaggaaggagaatcgctcaaacctgagaagcagaggttgcagtgagccaagactgtgccactgcactccagcctggatgatcaagggagacaccatctaaaaaaaaaataaataaaaataaaagcatttttttagtaggaattatctacaatgcccagcaccccttgcagcgatgtgtccgttgtcaatcaaggagtatacattatagaaatttagacttttattgtctaaaaagaatatttactgagacaggatggaatctgtaagttatatgatatagaatttgagggatatgtaaaattcagtacacgttcagcatctgaaaaataatggattccaatggagctattgttttatttatgaaatcagagcataaggactatgcaaatcattgaaccataaccttattctaactcttgcaacaacatctctaatataggggcatcttttatctttagaacttggtgttatatatatgtaaatactcattaattcaagcactctctttctagtactcacattatttgtcaggcattggaaaaggagaaagctgtttacaagatggaccagctcctggagagctttgcaatttatataaattactaattaatctattaattagattaattaatatctaatctacccatatacaaaaggaatgcagtatctcagaaattatatatagataggtaactttggcatacatgatttttcaactaccgtttccttatccaccagtactactgatgtcacagctatagatctatcccacaaagcataacaggaacattctttcacaaaagtgcaaaatttcatgaagaaatgctgatgtcacggtcacctgaaagaagatgaagcttgtaatattttattgcaaccttgcatagaatccttaaggaagaaaaacaaagagaagaggaacacagaaacaagttatggaaattcatgtttaccttatttataaggctgatttttaaattatatataatttttcattcaatatgtatatgaaatgaaatagctatagaactaaatttcacttaggtggaggtataaaccaccttaaattatatagttcggcagaaagacagatctatttgttaccacctgtaatttttttttaagcatgagttttctccatggaggcaaattgcaaaattaatcacttataaatttataagccacaatctccctaaaacaattgattttagtaagagtgtaacgcctttaatcaggggacaaacaagaacaataaataagagaagatttatgttacaactttgaaaaatgcttttaaaattctataaagtgttataataatttcatggatatcacaaatgttttattctacagtgtgaagatgataatcctaaaaatggaaattgattctgtgaggtcaggagaagtattctaaatctactgaactctttgtaatttcctatgtatataaatgagtggaggttgtgaagatgccgagagagtggtgaaaaaattaagaaaaagagacatatgatttgggggagcaggcgttaaacatgcaagatctaaattttcttttaatacatgaccatatgtccttgaacagtaagtatatttgtgtggcaagccaatggctgagttttccagggtagttttaatattacatccatcatattttcagtccatgtgtcaaaccatgtgtccaaaatttgggttcggaaatttctcagttgccacaaatattttcccagtcaagatgaaacactttcaaatgaaagtagttagaactttacataacaaatgtggtgctttattattattattattattatttttattattattattattacgtacttcagtgttcattattaaaactaccgcaatactatatcataaaaatctgggatggatgttccagccatcataaggtccaaaagaaaagagaaagtgttattttcctgttagtgacatgtagtccctttgttctagtaggaaaaaaggtgcctagaggtagtatatagagtaaatattgttcctttagcctacttcctgcagcttccaatttatccaaggaaatgtctacaacaattttgttcaaaagtctgttctagtcaatagcaggagaagtccacgttattgggctgattttgcttacatcagcaagagaaatgtcacgtgatactcaggccgcgctttctcttccatcacaccatcttcaaggaatgtcaataaactcactttggtatggca

SEQ ID NO: 9259 - DNA, 531 bp, Homo sapiens
  source 1..531: mol_type = unassigned DNA; mol_type = unassigned DNA
agtgtgctgcgttaccgcgcatcaggcgctgttgttggagccggaacaccgtgcgactctgaccgaaccggccccctcctcgcgcacacactcgccgagccgcgcgcgcccctccgccgtgacagtggccgtggcctccgctctctcggggcacccggcagccagagcgcagcgagagcgggcggtcgccagggtcccctccccagccagtcccaggcgcccggtgcactatgcggggcacgtgcgccccccagctctaatctgcgcgctgacaggagcatgatctgtgcccaggccagggctgccaagaatctgtaccagaacaggtttttaggcctggccgccatggcgtctccttctagaaactcccagagccgacgccggtgcaaggagccgctccgatacagctacaaccccgaccagttccacaacatggacctcaggggcggcccccacgatggcgtcaccattccccgctccaccagcgacactgacctggtcacctcggacagccgctccacgctcatggtc

SEQ ID NO: 9260 - DNA, 5169 bp, Homo sapiens
  source 1..5169: mol_type = unassigned DNA; mol_type = unassigned DNA
gcgcatcaggcgctgttgttggagccggaacaccgtgcgactctgaccgaaccggccccctcctcgcgcacacactcgccgagccgcgcgcgcccctccgccgtgacagtggccgtggcctccgctctctcggggcacccggcagccagagcgcagcgagagcgggcggtcgccagggtcccctccccagccagtcccaggcgcccggtgcactatgcggggcacgtgcgccccccagctctaatctgcgcgctgacaggagcatgatctgtgcccaggccagggctgccaaggaattgatgcgcgtacacgtggtgggtcattatgctgctgcacctgtgtagtgtgaagaatctgtaccagaacaggtttttaggcctggccgccatggcgtctccttctagaaactcccagagccgacgccggtgcaaggagccgctccgatacagctacaaccccgaccagttccacaacatggacctcaggggcggcccccacgatggcgtcaccattccccgctccaccagcgacactgacctggtcacctcggacagccgctccacgctcatggtcagcagctcctactattccatcgggcactctcaggacctggtcatccactgggacataaaggaggaagtggacgctggggactggattggcatgtacctcattgatgaggtcttgtccgaaaactttctggactataaaaaccgtggagtcaatggttctcatcggggccagatcatctggaagatcgatgccagctcgtactttgtggaacctgaaactaagatctgcttcaaatactaccatggagtgagtggggccctgcgagcaaccacccccagtgtcacggtcaaaaactcggcagctcctatttttaaaagcattggtgctgatgagaccgtccaaggacaaggaagtcggaggctgatcagcttctctctctcagatttccaagccatggggttgaagaaagggatgtttttcaacccagacccttatctgaagatttccattcagcctgggaaacacagcatcttccccgccctccctcaccatggacaggagaggagatccaagatcataggcaacaccgtgaaccccatctggcaggccgagcaattcagttttgtgtccttgcccactgacgtgctggaaattgaggtgaaggacaagtttgccaagagccgccccatcatcaagcgcttcttgggaaagctgtcgatgcccgttcaaagactcctggagagacacgccataggggatagggtggtcagctacacacttggccgcaggcttccaacagatcatgtgagtggacagctgcaattccgatttgagatcacttcctccatccacccagatgatgaggagatttccctgagtaccgagcctgagtcagcccaaattcaggacagccccatgaacaacctgatggaaagcggcagtggggaacctcggtctgaggcaccagagtcctctgagagctggaagccagagcagctgggtgagggcagtgtccccgatggtccagggaaccaaagcatagagctttccagaccagctgaggaagcagcagtcatcacggaggcaggagaccagggcatggtctctgtgggacctgaaggggctggggagctcctggcccaggtgcaaaaggacatccagcctgcccccagtgcagaagagctggccgagcagctggacctgggtgaggaggcatcagcactgctgctggaagacggtgaagccccagccagcaccaaggaggagcccttggaggaggaagcaacgacccagagccgggctggaagggaagaagaggagaaggagcaggaggaggagggagatgtgtctaccctggagcagggagagggcaggctgcagctgcgggcctcggtgaagagaaaaagcaggccctgctccttgcctgtgtccgagctggagacggtgatcgcgtcagcctgcggggaccccgagaccccgcggacacactacatccgcatccacaccctgctgcacagcatgccctccgcccagggcggcagcgcggcagaggaggaggacggcgcggaggaggagtccaccctcaaggactcctcggagaaggatgggctcagcgaggtggacacggtggccgctgacccgtctgccctggaagaggacagagaagagcccgagggggctactccaggcacggcgcaccctggccactccgggggccacttccccagcctggccaatggcgcggcccaggatggcgacacgcaccccagcaccgggagcgagagcgactccagccccaggcaaggcggggaccacagttgcgagggctgtgacgcgtcctgctgcagcccctcgtgctacagctcctcgtgctacagcacgtcctgctacagcagctcgtgctacagcgcctcgtgctacagcccctcctgctacaacggcaacaggttcgccagccacacgcgcttctcctccgtggacagcgccaagatctccgagagcacggtcttctcctcgcaagacgacgaggaggaggagaacagcgcgttcgagtcggtacccgactccatgcagagccctgagctggacccggagtccacgaacggcgctgggccgtggcaagacgagctggccgcccctagcgggcacgtggaaagaagcccggaaggtctggaatcccccgtggcaggtccaagcaatcggagagaagactgggaagctcgaattgacagccacgggcgggtcttttatgtggaccacgtgaaccgcacaaccacctggcagcgtccgacggcagcagccaccccggatggcatgcggagatcggggtccatccagcagatggagcaactcaacaggcggtatcaaaacattcagcgaaccattgcaacagagaggtccgaagaagattctggcagccaaagctgcgagcaagccccagcaggaggaggcggaggtggagggagtgactcagaagccgaatcttcccagtccagcttagatctaaggagagaagggtcactttctccagtgaactcacaaaaaatcaccttgctgctgcagtccccagcggtcaagttcatcaccaaccccgagttcttcactgtgctacatgccaattatagtgcctaccgagtcttcaccagtagcacctgcttaaagcacatgattctgaaagtccgacgggatgctcgcaattttgaacgctaccagcacaaccgggacttggtgaatttcatcaacatgttcgcagacactcggctggaactgccccggggctgggagatcaaaacggaccagcagggaaagtcttttttcgtggaccacaacagtcgagctaccactttcattgacccccgaatccctcttcagaacggtcgtcttcccaatcatctaactcaccgacagcacctccagaggctccgaagttacagcgctggagaggcctcagaagtttctagaaacagaggagcctctttactggccaggccaggacacagcttagtagctgctattcgaagccaacatcaacatgagtcattgccactggcatataatgacaagattgtggcatttcttcgccagccaaacatttttgaaatgctgcaagagcgtcagccaagcttagcaagaaaccacacactcagggagaaaatccattacattcggactgagggtaatcacgggcttgagaagttgtcctgtgatgcggatctggtcattttgctgagtctctttgaagaagagattatgtcctacgtccccctgcaggctgccttccaccctgggtatagcttctctccccgatgttcaccctgttcttcacctcagaactccccaggtttacagagagccagtgcaagagccccttccccctaccgaagagactttgaggccaagctccgcaatttctacagaaaactggaagccaaaggatttggtcagggtccggggaaaattaagctcattattcgccgggatcatttgttggagggaaccttcaatcaggtgatggcctattcgcggaaagagctccagcgaaacaagctctacgtcacctttgttggagaggagggcctggactacagtggcccctcgcgggagttcttcttccttctgtctcaggagctcttcaacccttactatggactctttgagtactcggcaaatgatacttacacggtgcagatcagccccatgtccgcatttgtagaaaaccatcttgagtggttcaggtttagcggtcgcatcctgggtctggctctgatccatcagtaccttcttgacgctttcttcacgaggcccttctacaaggcactcctgagactgccctgtgatttgagtgacctggaatatttggatgaggaattccaccagagtttgcagtggatgaaggacaacaacatcacagacatcttagacctcactttcactgttaatgaagaggtttttggacaggtcacggaaagggagttgaagtctggaggagccaacacacaggtgacggagaaaaacaagaaggagtacatcgagcgcatggtgaagtggcgggtggagcgcggcgtggtacagcagaccgaggcgctggtgcgcggcttctacgaggttgtagactcgaggctggtgtccgtgtttgatgccagggagctggagctggtgatagctggcaccgcggaaatcgacctaaatgactggcggaataacactgagtaccggggaggttaccacgatgggcatcttgtgatccgctggttctgggctgcggtggagcgcttcaataatgagcagaggctgagattactgcagtttgtcacgggaacatccagcgtgccctacgaaggcttcgcagccctccgtgggagcaatgggcttcggcgcttctgcatagagaaatgggggaaaattacttctctccccagggcacacacatgcttcaaccgactggatcttccaccgtatccctcgtactccatgttgtatgaaaagctgttaacagcagtagaggaaaccagcacctttggacttgagtgaggacatggaacctcgcctgacattttcctggccagtgacatcacccttcctgggatgatccccttttccctttcccttaatcaactctcctttgattttggtattccatgatttttattttcaaac

SEQ ID NO: 9261 - DNA, 2186 bp, Homo sapiens
  source 1..2186: mol_type = unassigned DNA; mol_type = unassigned DNA
ggtgacaatgcagcaaaatccgagggctcaaacaatgtggcccctccatccccggctccagggcattctgattgctctgccgctttgacgtcccggccacttggctgattttcagagccatgatgcgcggtgtctctgtcttgcacacagaggctgggcaccataacttcttccctgccgaatttcagcgcgtagggggagctggcagggacacaggctgcagagatgcccggcttcctgtggttccgggcacagcgcgcctcagtctgcattgggctgacaccagagagcatgtggggattttcctagttgccgaagaagatattatttgacgttgctgtagttttgtgcttacttctcttggaatctgcagtggtgcaattctccccttgttttccccccttctctttgaaaagatatcaatgctatgttcagcagaaacggatacagcaagagcagcatagttcaaaaattgagggaggcatcttctctcttttcctgggatttaaacgcgatttaggagggcagatgccctacccgaaaaggccaaccgttaaagaccccggcagtgttgtggtccaaggcgtctcaaagcaggtggccagatctgcgtttctcatcagcagactcactccggctgtggctattacgaatctgtaccagaacaggtttttaggcctggccgccatggcgtctccttctagaaactcccagagccgacgccggtgcaaggagccgctccgatacagctacaaccccgaccagttccacaacatggacctcaggggcggcccccacgatggcgtcaccattccccgctccaccagcgacactgacctggtcacctcggacagccgctccacgctcatggtcagcagctcctactattccatcgggcactctcaggacctggtcatccactgggacataaaggaggaagtggacgctggggactggattggcatgtacctcattgatgaggtcttgtccgaaaactttctggactataaaaaccgtggagtcaatggttctcatcggggccagatcatctggaagatcgatgccagctcgtactttgtggaacctgaaactaagatctgcttcaaatactaccatggagtgagtggggccctgcgagcaaccacccccagtgtcacggtcaaaaactcggcagctcctatttttaaaagcattggtgctgatgagaccgtccaaggacaaggaagtcggaggctgatcagcttctctctctcagatttccaagccatggggttgaagaaagggatgtttttcaacccagacccttatctgaagatttccattcagcctgggaaacacagcatcttccccgccctccctcaccatggacaggagaggagatccaagatcataggcaacaccgtgaaccccatctggcaggccgagcaattcagttttgtgtccttgcccactgacgtgctggaaattgaggtgaaggacaagtttgccaagagccgccccatcatcaagcgcttcttgggaaagctgtcgatgcccgttcaaagactcctggagagacacgccatagggtaaacctgtgactgagatcttactatcactaggttcccaccaacaggtcgtgcccaaaggtggcctgtaggctgcaatagtatagtctcacagagagtcaaaatggtatcattatatttcctttgtttttcctactaattatgttgcctgagccaacataagtgtttgttatattaaacaaacccatcccttttcacttgatgtgtaacactggttacttacccaagagagtaaaaaatcctattaaaaatattaaacagtattaaaagaagccctcaatggggcatttttctgtacaggtagaaactaaagtttgttttactatgaagaatattatttcattcatatgccagtctggtatgtaagatttaatcatatgtgacatttccataacaagatggaatactgggtaactactgtagagtttcttacttagaagacactagtatctgcagatgctagataacatggataagaatttgaaagcatgattctcatggaatgacagcaattaagatgctcacagaattcaattgtatatgagaatgggtttctgttttgtctcttttacattcatgtccactcatggttctcattaaagtggactatgaccagat

SEQ ID NO: 9262 - DNA, 497 bp, Homo sapiens
  source 1..497: mol_type = unassigned DNA; mol_type = unassigned DNA
acaccaacagaaaatcaggacatcattaattctctacacttattgatttggaacctccattgaagcagcaagctcagcacagaaataaaactgtcctggtgagtcgctcacagcctgtcccagtaactgttccggagcgtcagcctgacgcagcacccctgaaggaccacgccgtgcgggctgcgagcctcgcccttaaccatgcccagcaggaccagagctgccagcacaaatgaaggtcctggccattgaacaacttctgagcctgcactttaagaaggcgctcttgttttgaatacgtagtctgtcctgttctttcaaagtagatcctggtcaagaatgtctccaaaactggattaagccagtgtacttgaatgggaatatagacaaccaggacagacttggaatgttttttaatgtattggcccagcaaagctagaaatcctccactttacctaacagaagataattagaattaaaaatggcactaactgaaa

SEQ ID NO: 9263 - DNA, 750 bp, Homo sapiens
  source 1..750: mol_type = unassigned DNA; mol_type = unassigned DNA
tcgccagtcattgcctgaactcggctttcctggaccttaggggataaatagtgtggtccagcactgccctgggtgagctgagtcatgcccttggcagggtcgaggagctcccgtgaggagaccaatcgcctagcgtgagtcttcttccgggattgctcgccctctgccccctaggtgccgggcgccgcccgtccccacctccatcagaactcgggtcatctgcggagccttggctgcggcccggtacctgggtgtgactccgccactaacattttcccagcaggaagcagcaagctcagcacagaaataaaactgtcctggtgagtcgctcacagcctgtcccagtaactgttccggagcgtcagcctgacgcagcacccctgaaggaccacgccgtgcgggctgcgagcctcgcccttaaccatgcccagcaggaccagagctgccagcacaaatgaaggtcctggccattgaacaacttctgagcctgcactttaagaaggcgctcttgttttgaatacgtagtctgtcctgttctttcaaagtagatcctggtcaagaatgtctccaaaactggattaagccagtgtacttgaatgggaatatagacaaccaggacagacttggaatgttttttaatgtattggcccagcaaagctagaaatcctccactttacctaacagaagataattagaattaaaaatggcactaactgaaaacgtacttgttaaattgcctgtgcttataga

SEQ ID NO: 9264 - DNA, 574 bp, Homo sapiens
  source 1..574: mol_type = unassigned DNA; mol_type = unassigned DNA
catcagaactcgggtcatctgcggagccttggctgcggcccggtacctgggtgtgactccgccactaacattttcccagcaggaagcagcaagctcagcacagaaataaaactgtcctggtgagtcgctcacagcctgtcccagtaactgttccggagcgtcagcctgacgcagcacccctgaaggaccacgccgtgcgggctgcgagcctcgcccttaaccatgcccagcaggaccagagctgccagcacaaatgaaggtcctggccattgaacaacttctgagcctgcactttaagaaggcgctcttgttttgaatacgtagtctgtcctgttctttcaaaaatctgtaccagaacaggtttttaggcctggccgccatggcgtctccttctagaaactcccagagccgacgccggtgcaaggagccgctccgatacagctacaaccccgaccagttccacaacatggacctcaggggcggcccccacgatggcgtcaccattccccgctccaccagcgacactgacctggtcacctcggacagccgctccacgctcatggtcagcagctcc

SEQ ID NO: 9265 - DNA, 412 bp, Homo sapiens
  source 1..412: mol_type = unassigned DNA; mol_type = unassigned DNA
aattatcaagcagcccttggatcaaagggaagtctgatcctggggactttcttatgcctcccccagagctatggataatttccctgcctgcattcttcactgcaactctcttttatgagaaatggctgctctggcagaacacaaagatgactgcatttccaaggagatttttaaaagcattggtgctgatgagaccgtccaaggacaaggaagtcggaggctgatcagcttctctctctcagatttccaagccatggggttgaagaaagggatgtttttcaacccagacccttatctgaagatttccattcagcctgggaaacacagcatcttccccgccctccctcaccatggacaggagaggagatccaagatcataggcaacaccgtgaaccccatctggcaggccgag

SEQ ID NO: 9266 - DNA, 2888 bp, Homo sapiens
  source 1..2888: mol_type = unassigned DNA
aatcaatagttgcccagtgaaatcactgtcttcgttgcctgtagctgatttttaaaagcattggtgctgatgagaccgtccaaggacaaggaagtcggaggctgatcagcttctctctctcagatttccaagccatggggttgaagaaagggatgtttttcaacccagacccttatctgaagatttccattcagcctgggaaacacagcatcttccccgccctccctcaccatggacaggagaggagatccaagatcataggcaacaccgtgaaccccatctggcaggccgagcaattcagttttgtgtccttgcccactgacgtgctggaaattgaggtgaaggacaagtttgccaagagccgccccatcatcaagcgcttcttgggaaagctgtcgatgcccgttcaaagactcctggagagacacgccatagggtaaacctgtgactgagatcttactatcactaggttcccaccaacaggtcgtgcccaaaggtggcctgtaggctgcaatagtatagtctcacagagagtcaaaatggtatcattatatttcctttgtttttcctactaattatgttgcctgagccaacataagtgtttgttatattaaacaaacccatcccttttcacttgatgtgtaacactggttacttacccaagagagtaaaaaatcctattaaaaatattaaacagtattaaaagaagccctcaatggggcatttttctgtacaggtagaaactaaagtttgttttactatgaagaatattatttcattcatatgccagtctggtatgtaagatttaatcatatgtgacatttccataacaagatggaatactgggtaactactgtagagtttcttacttagaagacactagtatctgcagatgctagataacatggataagaatttgaaagcatgattctcatggaatgacagcaattaagatgctcacagaattcaattgtatatgagaatgggtttctgttttgtctcttttacattcatgtccactcatggttctcattaaagtggactatgaccagataacagccctatgtataatatgtatttctttaggtaacagggactacatttgaaaacactaaataaagctttctattgataaacatatacttatatacaatgtaacccttacaaagatagcaaaagaatgagaaaaaaatatgcagaatttccaagtgtcttaatttaaagttctttggattatcagaaggactttggaatcacggataattatcataaagacatttattattaattggaaccttatggtgtgtaggcagcagggtgcacagagacctgccactaactctccagccaaagggagctgagtttatggagctgcagtcacgtgtcacatgcagtgtttgcacttgccattcatggttgtgaggattaaacagacaaaaagtgtacataaagaacctagcacggccactggcacgtagtaggaacacaaaagaaaatggtattccttgtgatcttttttatttcatttagtcctcataatgcttctgtgacagcattatcaccattcctgcacgaggaaacaaggcttcaaaaggatcaataattatgtaaacccaaggcttgtgggtggcagagatccggccggaattcagactcacacctgtgtctctccaaagtccgagggccatccccacacaacaggcttctctcagggttcctaggactgattctgtagtttattgtgggccatgcttttcatttctctccttctctgccctactggctgctctcacagctgttagcacctctgccagggggtgggctggagaacaaaaacaggggctgtgtgggattctttctaccccagcacccagtgcactgccgcccagcatgcattagatagataccagttcgtacgtaaggaacagaacttctctctccagctcgctgcagccgcagagcccctctgccctcccatgctgagttctctcctaagtccaagctgccggctcctatcttcttagcactgtcccgccctccaagcctcccactgtggaaaggcacatccccagctgaaagcaagtacctgaggtggaaaagggtgtccccgaccaaaagaaggttagctatgattttcccagtgttcttgccacccagggaaatggagagcacagatcgagtgtgattgagcttacacctctccaagaggcaacaacagcaagccatggaggcgtttttcctcccaccctctttgatgggatgatagactgccccctggtggcggcgcagagcagctcctcctccaaagccttctgcttccacagcccctgggggccacttctgcagtgctgcctcctccggaggtgtcccaccgtggttaggagcagagtgttggggtgatggccatggaagcagtggccatgcagcctgagccatggcagaaccccagagtgcacccacaacaaaagtgaatccactttgcaccgcagcttccctctgccctcagcacatgctctccccataaagccccctgcatccgtggtttctgaaacgtttggctccacctgtactggctgcctccctgccctgagatatttgcacctttcccccctgggcacacatgcactctcatttccaatcctccttcgattccttggcctgtaaaatcccaggcttctgttggctgtctgcctgtaactctaaccatctcaccttcgcattgaagtgtcactggctgtcttgaaccattatttagtggtcctaccttatgcccccagctggacataagctatttaaaggcaggggcgatgtatgacatgctttgtatcaactgcagcacctttcacatggcaggggctcaaaaaatatttgttaagtgggtgaaaagc

SEQ ID NO: 9267 - DNA, 609 bp, Homo sapiens
  source 1..609: mol_type = unassigned DNA
agtcttttttcgtggaccacaacagtcgagctaccactttcattgacccccgaatccctcttcagaacggtcgtcttcccaatcatctaactcaccgacagcacctccagaggctccgaagttacagcgctggagagggaccccagcttcctctgcaaatgggtgaccactaacgtgtgttccagctgtgtgattctcagagtctgtggggcttgattccacgtcttcaggaccgcataactaagagacccattaactacatagagctaagaggagcaggaaaggcaggacggaaggatggcaggtttgtctttaggcaagttgataatgtgtgtgaaaatagcagggtatctgattagatatgacagttaaacagatggaaatatgagactcagcaatcatcgatgggttatttccataatccattatttttctgtgtcccgtatcacaggcaatagggaattaactatagatatttcttagactacaacttacaagtgtgggtattttctgttcacctacataagccattctcttgagtgttattcagcagttgatttttttataaattgcatgtaaggacagaattaaaatgggtttctatattaa

SEQ ID NO: 9268 - DNA, 415 bp, Homo sapiens
  source 1..415: mol_type = unassigned DNA
acccccgaatccctcttcagaacggtcgtcttcccaatcatctaactcaccgacagcacctccagaggctccgaagttacagcgctggagaggctagagtgcaatggtgcgatcttggctcactgcaacctcctcctcccaggttcaagcaattctcctgcctcagcctctcaagtagctgggattacaggttcaggtttagcggtcgcatcctgggtctggctctgatccatcagtaccttcttgacgctttcttcacgaggcccttctacaaggcactcctgagactgccctgtgatttgagtgacctggaatatttggatgaggaattccaccagagtttgcagtggatgaaggacaacaacatcacagacatcttagacctcactttcactgttaatgaagaggtttttgg

SEQ ID NO: 9269 - DNA, 9156 bp, Homo sapiens
  source 1..9156: mol_type = unassigned DNA
ccgctgcccgctgcccgctgccctcgccccgcgcgccgggcatgtgagcgcgggcgggcgccgtcaccatggcctcgccgcgcgcctcgcggtggccgccgccgctcctgctgctgttgctgccgctgctgctgctgccgccggcggcccccgggacgcgggacccgccgccttccccggctcgccgcgcgctgagcctggcgcccctcgcgggagcggggctggagctgcagctggagcgccgcccggagcgcgagccgccgcccacgccgccccgggagcgccgcgggcccgcgacccccggccccagctacagggcccctgagccaggcgccgcgacacagcggggaccctccggccgggcccccagaggcgggagcgcggatgctgcctggaaacattggccagaaagtaacactgaggcccatgtagaaaacatcaccttctatcagaatcaagaggacttttcaacagtgtcctccaaagagggcgtgatggttcagacctctgggaagagccatgctgcttcggatgctccagaaaacctcactctactcgctgaaacagcagatgctagaggaaggagcggctcttcaagtagaacaaacttcaccattttgcctgttgggtactcactggagatagcaacagctctgacttcccagagtggcaacttagcctcagaaagtcttcacctgccatccagcagttcagagttcgatgaaagaattgccgcttttcaaacaaagagtggaacagcctcggagatgggaacagagagggcgatggggctgtcagaagaatggactgtgcacagccaagaggccaccacttcggcttggagcccgtcctttcttcctgctttggagatgggagagctgaccacgccttctaggaagagaaattcctcaggaccagatctctcctggctgcatttctacaggacagcagcttcctctcctctcttagacctttcctcatcttctgaaagtacagagaagcttaacaactccactggcctccagagctcctcagtcagtcaaacaaagacaatgcatgttgccaccgtgttcactgatggtggcccgagaacgctgcgatctttgacggtcagtctgggacctgtgagcaagacagaaggcttccccaaggactccagaattgccacgacttcatcctcagtccttctttcaccctctgcagtggaatcgagaagaaacagtagagtaactgggaatccaggggatgaggaattcattgaaccatccacagaaaatgaatttggacttacgtctttgcgttggcaaaatgattccccaacctttggagaacatcagcttgccagcagctctgaggtgcaaaatggaagtcccatgtctcagactgagactgtgtctaggtcagtcgcacccatgagaggtggagagatcactgcacactggctcttgaccaacagcacaacatctgcagatgtgacaggaagctctgcttcatatcctgaaggtgtgaatgcttcagtgttgacccagttctcagactctactgtacagtctggaggaagtcacacagcattgggagataggagttattcagagtcttcatctacatcttcctcggaaagcttgaattcatcagcaccacgtggagaacgttcgatcgctgggattagctacggtcaagtgcgtggcacagctattgaacaaaggacttccagcgaccacacagaccacacctacctgtcatctactttcaccaaaggagaacgggcgttactgtccattacagataacagttcatcctcagacattgtggagagctcaacttcttatattaaaatctcaaactcttcacattcagagtattcctccttttttcatgctcagactgagagaagtaacatctcatcctatgacggggaatatgctcagccttctactgagtcgccagttctgcatacatccaaccttccgtcctacacacccaccattaatatgccgaacacttcggttgttctggacactgatgctgagtttgttagtgactcctcctcctcctcttcctcctcctcctcttcttcttcttcagggcctcctttgcctctgccctctgtgtcacaatcccaccatttattttcatcaattttaccatcaaccagggcctctgtgcatctactaaagtctacctctgatgcatccacaccatggtcttcctcaccatcacctttaccagtatccttaacgacatctacatctgccccactttctgtctcacaaacaaccttgccacagtcatcttctacccctgtcctgcccagggcaagggagactcctgtgacttcatttcagacatcaacaatgacatcattcatgacaatgctccatagtagtcaaactgcagaccttaagagccagagcaccccacaccaagagaaagtcattacagaatcaaagtcaccaagcctggtgtctctgcccacagagtccaccaaagctgtaacaacaaactctcctttgcctccatccttaacagagtcctccacagagcaaacccttccagccacaagcaccaacttagcacaaatgtctccaactttcacaactaccattctgaagacctctcagcctcttatgaccactcctggcaccctgtcaagcacagcatctctggtcactggccctatagccgtacagactacagctggaaaacagctctcgctgacccatcctgaaatactagttcctcaaatctcaacagaaggtggcatcagcacagaaaggaaccgagtgattgtggatgctaccactggattgatccctttgaccagtgtacccacatcagcaaaagaaatgaccacaaagcttggcgttacagcagagtacagcccagcttcacgttccctcggaacatctccttctccccaaaccacagttgtttccacggctgaagacttggctcccaaatctgccacctttgctgttcagagcagcacacagtcaccaacaacagtgtcctcttcagcctcagtcaacagctgtgctgtgaacccttgtcttcacaatggcgaatgcgtcgcagacaacaccagccgtggctaccactgcaggtgcccgccttcctggcaaggggatgattgcagtgtggatgtgaatgagtgcctgtcgaacccctgcccatccacagccatgtgcaacaatactcagggatcctttatctgcaaatgcccggttgggtaccagttggaaaaagggatatgcaatttggttagaaccttcgtgacagagtttaaattaaagagaacttttcttaatacaactgtggaaaaacattcagacctacaagaagttgaaaatgagatcaccaaaacgttaaatatgtgtttttcagcgttacctagttacatccgatctacagttcacgcctctagggagtccaacgcggtggtgatctcactgcaaacaaccttttccctggcctccaatgtgacgctatttgacctggctgataggatgcagaaatgtgtcaactcctgcaagtcctctgctgaggtctgccagctcttgggatctcagaggcggatctttagagcgggcagcttgtgcaagcggaagagtcccgaatgtgacaaagacacctccatctgcactgacctggacggcgttgccctgtgccagtgcaagtcgggatactttcagttcaacaagatggaccactcctgccgagcatgtgaagatggatataggcttgaaaatgaaacctgcatgagttgcccatttggccttggtggtctcaactgtggaaacccctatcagcttatcactgtggtgatcgcagccgcgggaggtgggctcctgctcatcctaggcatcgcactgattgttacctgttgcagaaagaataaaaatgacataagcaaactcatcttcaaaagtggagatttccaaatgtccccgtatgctgaataccccaaaaatcctcgctcacaagaatggggccgagaagctattgaaatgcatgagaatggaagtaccaaaaacctcctccagatgacggatgtgtactactcgcctacaagtgtaaggaatccagaacttgaacgaaacggactctacccggcctacactggactgccaggatcacggcattcttgcattttccccggacagtataacccgtctttcatcagtgatgaaagcagaagaagagactacttttaagtccaggagagagagggactcattgctctgagccagtcacctgggacctctgctcagaggaccgcaccaggaggctgcgcccaggatttgtcgggagccacgctgagtggcaagcaggaagagggacaggcatgcggggcgtgaccacagtggaggagacaggtggatgtggaaccacaggctgctcattcagcacctttgttgttactgtgaacgtgaatgtgggccagtatcaagagagtctctctgagtgactgcaccatggcactggcaccagggcgactattagccagggcagaccactagacttcagtgcagggacctggttttcccttcgtttgcactttagtaaattgggtgggaggtttccttttggatctgttttgagactgttccagaaagaaggcttcctttcccgagacacttccataggcagcaatttggtgattcatttgcagcaaaatactggcttgttaattattttcctgcccagcgcctgcgtgctaaacaacagatgaggatgagcgtaccactgaagtctgaagatgtcgccattgaacggacagtgttttcatatgtttctaggttgtcttatgctacagtttccaagccagcccccacagtgaggaaatgtgtgaggcaccgcacacaactgcaatgtgttttttaagtcaaggtgacacatgtatttaagattttttttttaaatctctttgcagttaaatctcactttttcaaacaagcctggatcagggcaaaacaacttatatttggttttagctggaggctcagcaggcagattgcaggcaggggggcacttttcatccatgagggcccagcctggggcctgggactcgatcaccattgtggaggccagaggcagctgcgtatggaggagaaatgtcaaactgaacgcaggtttcaccactctaggaaagcagcttgttgagcccctgcagctggatgtggttagagggatgggctgaataggcaggttagatttcctgcatcaacagtgctttgggaagctgtgtggattcctgaggaagaacagggagccgagatggagccacacatgagtttgctcaccggctactgcagcactttgtacccagaatctcatgtccacaaaccccatgtaaactttcaaccactcaaagctgtttattcggctgaagaaataacttttttttctcacccagtcatttgtacctcttcatatggctatgtcgcaccctccagaaacgtggttatacttccagtcagtgtgggagaactgaagacttccggttggtcgaggaactgagggttgaccttcgggaaggaagttccactcatcttatttattatgcctgtgatgtgggtcctgccagggagacatccagtactcggtgtctttaattgccacctggggaactgtgtttattggccttctttggggcatcctggttttggatgaagtgaggggaatacagaggtaaaagaattgtctccaccctgaagcggggagtcccgcttcacatttctggaaatggtgcagccactggggacagttctgccccgggcatggttgtttcttcaaggtcctctaaatataatccctattcttacataatccttggccctgatggttttaagcaagaactcctgtgtcccatggtctccaccactcaccatcaccctgctgtagcaagagtcctagtcaggggaggtgcattttagtagttacattgcacttatccatgagataaataaaaggagaactgtttttatcagtggaggctaacctaaaatttcaaagtgtcgcctttttgaaatcttgggcctctctctctgtagaaccaatggccctttgtggctcacggcctcgcacctaactggagagttctgagctcctgcagctcacctgagcccacagactaggcttcttggctccttccgcagcatgcctgctcacccccagaacccgcagctgtgggaagagccatgtagggaggctattcccaggcatacacttccactgccttcagctgacgtcacagctgacaaatcatctcctctatcggagccagaagacttcagctccacaaaatgaagtgttctgtcctgaaaacattcttgggaagaatcccaacatcgagaaaacggtgtcctgtgagttccaacaatgcttcttgttcatgggtttcttccgtatggagtggattaagagtgttttattttgttgttctaactgagaaaaaaaggaggcacccacaaggttgaggtcacacagtctccacagtttccaggaggcgtttgggggtggggaaggcacctccagagcatgaggctctaaggggacatgagtaaagcatgtctgtgacccagtgaggaagggagaggccagctgcactcctgcacggggttcctagctgcagaagggtcccgcctaggccgaggggaaacacctgatagcagaagaggcctggatgcacacctggcacgccgaggctctccgcccagacacagtgctccatgtcagcccctgcacctggggtgtgtgattcacgtgcacagatgccacaatcctgcaccaatatcccacagatgggggaaggtgagaggaaggggcaagtgatgtgtaactgctcaagagatgcttaaacctccatagagaggagccgggcgcaggggcatctgtgtgtcccgtcacacactgcagcagggaagggtggctggctggctccctggcatcagtggtttggtttaagctccagagggtcttattgccattgtcttttcctctgccccttgagccagcctaaggccctggagtctgtttctttaggcggatgaactgacatgctcctaccatgaccaggctctgggcaaggctcctcacagtatccttgagaggtgggcatggaagtgcccatttctcaggtacagaaaccttcagagaggataaatagcttgccctgtagaagcaggactgaaacccttgtctgcctgactcccccagctactctgcccactgtagccccctgccttactgtcctggcacacccctcaccatcctgtataccttaaatatcaaagagggcaagagagaaagggctttaaagataagttatttttttaaggaaccttaatattatttttaagaagtaaccaaattagtgacgtgaaatgcaaaaaaaaaaaaaaaaaaatgctgactacccttttgaaaatgtgctttcagattgttttttatatgtaattcttagacacttgtcattaagaaaatagtggctggcttgtgctcagcaagaagcacactggcacgtggctttggtataggaagtggaaggcaaggacctgggtttctgacaagtgcagtcagacatacacatccatctgagagctgcttgccttgttcccgtggtaaggccatggctcccacatactggaagcatatttttgtgaactgttttcagaattgggaacatattcagtggaatgtcttaaacgctgacacatcttcctcctttgaggggaagtatattttcagaagcagctaagacatttagagccaaaattgctgataggtggttcagtcaagttggctgatggcatctgaggtcaaaaactaagatgtgacgattgagttcttaaagaggtaactcttaaagtgggcccaagggagaaggcagcatctttggactcctaggctggatggctacccaagaatatgccattgaaggatgacacctattcagatgtgaaagttcccagagcaggcacctttgggtcacccaccacgtgtggctttttggtgcctgcatgaaactgtgttgccccctggtgagatgcccgggtgtcctgtaagccgatttaactctgcctgaggaagaggagctgtccactccagttgcccttggctaagtttagcctaacacacagggttttgacccatagttctaaaatacacaaattttgagactacagcacttctttggaaagaggaagaatgcaaagttcagtatttcaatactttgtattttacttgaaattacccttagtagcatcttttttttcctgtctgaaagcttttgtgtggatgagaagggacatttcatttcctcccttaacaaagtgtcattctgaggttctcatgtgtgtttttggaaatagagatactggttttgtagagtttgcctttgggtatgttttctttttttcttaaatctccaaggaagagaactgactaaaatagtaggaacatgaaagtattaaatgccaattaatttgttgtagtaaagtatcttcattagcgttatactccatcatatctggtgtaaactgctcacagaaaaccctatgaaaccaaagggggaccattcaggtctaaaaagcgacaggtccgagactgggtctgtcacctgggcattttcaaagaggacattttgaagaatttgcatattcagatttttaaaatgcacttaacatacttcattacagatttcttgggtagggaggatgggataggccagggatgggatggagtcagttctgcctgggaaactaatccgaatcatttacctttctgtattaaccttggcctgtcctaaaaagagaacgactgtttcatcatgagttgctctgagttttgttaatgtttgtgttggtggattgacggttaaatgaagcatttagctggaatatgaactttgggagttttcatgttgtcctggatttctctttgtaaacctttaaaccttagcccctggttgattgtgttaaacccattatgagaatgttatttaaagttgtattataattgcaacctccactaattattcagtactgtagcagcaaagtattatttgtaagaatttggttatttttatacttatatccactctaagtctggcgttctagtcagtaaaatgatgcaataaaattaatatcattttca

SEQ ID NO: 9270 - DNA, 3973 bp, Homo sapiens
  source 1..3973: mol_type = unassigned DNA
gcctatagggagtccaacgcggtggtgatctcactgcaaacaaccttttccctggcctccaatgtgacgctatttgacctggctgataggatgcagaaatgtgtcaactcctgcaagtcctctgctgaggtctgccagctcttgggatctcagaggcggatctttagagcgggcagcttgtgcaagcggaagagtcccgaatgtgacaaagacacctccatctgcactgacctggacggcgttgccctgtgccagtgcaagtcgggatactttcagttcaacaagatggaccactcctgccgagcatgtgaagatggatataggcttgaaaatgaaacctgcatgagttgcccatttggccttggtggtctcaactgtggaaacccctatcagcttatcactgtggtgatcgcagccgcgggaggtgggctcctgctcatcctaggcatcgcactgattgttacctgttgcagaaagaataaaaatgacataagcaaactcatcttcaaaagtggagatttccaaatgtccccgtatgctgaataccccaaaaatcctcgctcacaagaatggggccgagaagctattgaaatgcatgagaatggaagtaccaaaaacctcctccagatgacggatgtgtactactcgcctacaagtgtaaggaatccagaacttgaacgaaacggactctacccggcctacactggactgccaggatcacggcattcttgcattttccccggacagtataacccgtctttcatcagtgatgaaagcagaagaagagactacttttaagtccaggagagagagggactcattgctctgagccagtcacctgggacctctgctcagaggaccgcaccaggaggctgcgcccaggatttgtcgggagccacgctgagtggcaagcaggaagagggacaggcatgcggggcgtgaccacagtggaggagacaggtggatgtggaaccacaggctgctcattcagcacctttgttgttactgtgaacgtgaatgtgggccagtatcaagagagtctctctgagtgactgcaccatggcactggcaccagggcgactattagccagggcagaccactagacttcagtgcagggacctggttttcccttcgtttgcactttagtaaattgggtgggaggtttccttttggatctgttttgagactgttccagaaagaaggcttcctttcccgagacacttccataggcagcaatttggtgattcatttgcagcaaaatactggcttgttaattattttcctgcccagcgcctgcgtgctaaacaacagatgaggatgagcgtaccactgaagtctgaagatgtcgccattgaacggacagtgttttcatatgtttctaggttgtcttatgctacagtttccaagccagcccccacagtgaggaaatgtgtgaggcaccgcacacaactgcaatgtgttttttaagtcaaggtgacacatgtatttaagattttttttttaaatctctttgcagttaaatctcactttttcaaacaagcctggatcagggcaaaacaacttatatttggttttagctggaggctcagcaggcagattgcaggcaggggggcacttttcatccatgagggcccagcctggggcctgggactcgatcaccattgtggaggccagaggcagctgcgtatggaggagaaatgtcaaactgaacgcaggtttcaccactctaggaaagcagcttgttgagcccctgcagctggatgtggttagagggatgggctgaataggcaggttagatttcctgcatcaacagtgctttgggaagctgtgtggattcctgaggaagaacagggagccgagatggagccacacatgagtttgctcaccggctactgcagcactttgtacccagaatctcatgtccacaaaccccatgtaaactttcaaccactcaaagctgtttattcggctgaagaaataacttttttttctcacccagtcatttgtacctcttcatatggctatgtcgcaccctccagaaacgtggttatacttccagtcagtgtgggagaactgaagacttccggttggtcgaggaactgagggttgaccttcgggaaggaagttccactcatcttatttattatgcctgtgatgtgggtcctgccagggagacatccagtactcggtgtctttaattgccacctggggaactgtgtttattggccttctttggggcatcctggttttggatgaagtgaggggaatacagaggtaaaagaattgtctccaccctgaagcggggagtcccgcttcacatttctggaaatggtgcagccactggggacagttctgccccgggcatggttgtttcttcaaggtcctctaaatataatccctattcttacataatccttggccctgatggttttaagcaagaactcctgtgtcccatggtctccaccactcaccatcaccctgctgtagcaagagtcctagtcaggggaggtgcattttagtagttacattgcacttatccatgagataaataaaaggagaactgtttttatcagtggaggctaacctaaaatttcaaagtgtcgcctttttgaaatcttgggcctctctctctgtagaaccaatggccctttgtggctcacggcctcgcacctaactggagagttctgagctcctgcagctcacctgagcccacagactaggcttcttggctccttccgcagcatgcctgctcacccccagaacccgcagctgtgggaagagccatgtagggaggctattcccaggcatacacttccactgccttcagctgacgtcacagctgacaaatcatctcctctatcggagccagaagacttcagctccacaaaatgaagtgttctgtcctgaaaacattcttgggaagaatcccaacatcgagaaaacggtgtcctgtgagttccaacaatgcttcttgttcatgggtttcttccgtatggagtggattaagagtgttttattttgttgttctaactgagaaaaaaaggaggcacccacaaggttgaggtcacacagtctccacagtttccaggaggcgtttgggggtggggaaggcacctccagagcatgaggctctaaggggacatgagtaaagcatgtctgtgacccagtgaggaagggagaggccagctgcactcctgcacggggttcctagctgcagaagggtcccgcctaggccgaggggaaacacctgatagcagaagaggcctggatgcacacctggcacgccgaggctctccgcccagacacagtgctccatgtcagcccctgcacctggggtgtgtgattcacgtgcacagatgccacaatcctgcaccaatatcccacagatgggggaaggtgagaggaaggggcaagtgatgtgtaactgctcaagagatgcttaaacctccatagagaggagccgggcgcaggggcatctgtgtgtcccgtcacacactgcagcagggaagggtggctggctggctccctggcatcagtggtttggtttaagctccagagggtcttattgccattgtcttttcctctgccccttgagccagcctaaggccctggagtctgtttctttaggcggatgaactgacatgctcctaccatgaccaggctctgggcaaggctcctcacagtatccttgagaggtgggcatggaagtgcccatttctcaggtacagaaaccttcagagaggataaatagcttgccctgtagaagcaggactgaaacccttgtctgcctgactcccccagctactctgcccactgtagccccctgccttactgtcctggcacacccctcaccatcctgtataccttaaatatcaaagagggcaagagagaaagggctttaaagataagttatttttttaaggaaccttaatattatttttaagaagtaaccaaattagtgacgtgaaatgc

SEQ ID NO: 9271 - DNA, 544 bp, Homo sapiens
  source 1..544: mol_type = unassigned DNA
aaataaacgtagtcaagaatgtaaatgaaccccatttttattccaaaaatagcaggctggccaggcacagtggctcatgccgataatccctgtaatcactttgggaggccaagatcgggggattgcttgaccctaggagttcaagaccagcctgggcaacatgcctacaagtgtaaggaatccagaacttgaacgaaacggactctacccggcctacactggactgccaggatcacggcattcttgcattttccccggacagtataacccgtctttcatcagtgatgaaagcagaagaagagactacttttaagtccaggagagagagggactcattgctctgagccagtcacctgggacctctgctcagaggaccgcaccaggaggctgcgcccaggatttgtcgggagccacgctgagtggcaagcaggaagagggacaggcatgcggggcgtgaccacagtggaggagacaggtggatgtggaaccacaggctgctcattcagcacctttgttgttactgtgaacgtgaatgtgggccagt

SEQ ID NO: 9272 - DNA, 532 bp, Homo sapiens
  source 1..532: mol_type = unassigned DNA
agaaagaataaaaatgacataagcaaactcatcttcaaaagtggagatttccaaatgtccccgtatgctgaataccccaaaaatcctcgctcacaagaatggggccgagaagctattgaaatgcatgagaatggaagtaccaaaaacctcctccagatgacggatgtgtactactcgggagcctttttttgagatccaactggtcacttgaggattgctgttggcctcctggtttggggtcctaactccacctgcaactagatggtcgtaggaccttataaagcctacaagtgtaaggaatccagaacttgaacgaaacggactctacccggcctacactggactgccaggatcacggcattcttgcattttccccggacagtataacccgtctttcatcagtgatgaaagcagaagaagagactacttttaagtccaggagagagagggactcattgctctgagccagtcacctgggacctctgctcagaggaccgcaccaggaggctgcgcccaggatttgtcgggagcc

SEQ ID NO: 9273 - DNA, 421 bp, Homo sapiens
  source 1..421: mol_type = unassigned DNA
gctgtgctgtgaacccttgtcttcacaatggcgaatgcgtcgcagacaacaccagccgtggctaccactgcaggtgcccgccttcctggcaaggggatgattgcagtgtggatgtgaatgagtgcctgtcgaacccctgcccatccacagccatgtgcaacaatactcagggatcctttatctgcaaatgcccggttgggtaccagttggaaaaagggatatgcaatttgggtaagagacttagtctatttcggactttattccgtaccacaatatattttacaaggtaacatttgttatttttcttgctaaccaaaatcagtatttgtccaaggtataaacttaaggaatatagaaaaaagtggaagctattgtccattattctaatacttggagatagaacaccctactttgcattatg

SEQ ID NO: 9274 - DNA, 1054 bp, Homo sapiens
  source 1..1054: mol_type = unassigned DNA
ggagagatcactgcacactggctcttgaccaacagcacaacatctgcagatgtgacaggaagctctgcttcatatcctgaaggtgtgaatgcttcagtgttgacccagttctcagactctactgtacagtctggaggaagtcacacagcattgggagataggagttattcagagtcttcatctacatcttcctcggaaagcttgaattcatcagcaccacgtggagaacgttcgaccttggaagacagccgagagccaggccaagcactaggtgacagttccgccaatgcagaggacaggacttctggggtgccctctctcggcacccacaccttggctactgtcactggaaacggggaacgcacactgcggtctgtcaccctcaccaacaccagcatgagcacgacttctggggaagcaggcagccctgcagcggccatgcaccaagaaacagagggtgcctctctgcacgtaaacgtgacggacgacatgggcctggtctcacggtcactggccgcctccagtgcactcggagtcgctgggattagctacggtcaagtgcgtggcacagctattgaacaaaggacttccagcgaccacacagaccacacctacctgtcatctactttcaccaaaggagaacgggcgttactgtccattacagataacagttcatcctcagacattgtggagagctcaacttcttatattaaaatctcaaactcttcacattcagagtattcctccttttttcatgctcagactgagagaagtaacatctcatcctatgacggggaatatgctcagccttctactgagtcgccagttctgcatacatccaaccttccgtcctacacacccaccattaatatgccgaacacttcggttgttctggacactgatgctgagtttgttagtgactcctcctcctcctcttcctcctcctcctcttcttcttcttcagggcctcctttgcctctgccctctgtgtcacaatcccaccatttattttcatcaattttaccatcaaccagggcctctgtgcatctactaa

SEQ ID NO: 9275 - DNA, 946 bp, Homo sapiens
  source 1..946: mol_type = unassigned DNA
gttaggtggagacagggtaggttgggacacaaagtccagttaagtgtgtgtcccagctcagtgctctgagcccagatcctcatctccctgggtagtgaggctcagcacagacaagcaaccaactgctgggctgccggtgccccccatgttggaacctgagttggagattatctcctaagcagatacctgcttccaaactggggatgtagggcttggaaactagaaaatgccaggtctgagggagaggaaagaacaagtccagcaatacacagagctctgtgtattcagagggaagttggcagggttgtgttcgggcagagaaactccgagtggtacaaaggggacgtgcccagagtggagaaatcatgctaattgtctgcactagagctggagaacgccacccaaaatgaagagagaaaggggagccctgtccagagcctccagggccctgcgccttgctccttttgtctaccttcttctgatccagacagaccccctggagggggtgaacatcaccagccccgtgcgcctgatccatggcaccgtggggaagtcggctctgctttctgtgcagtacagcagtaccagcagcgacaggcctgtagtgaagtggcagctgaagcgggacaagccagtgaccgtggtgcagtccattggcacagaggtcatcggcaccctgcggcctgactatcgagaccgtatccgactctttgaaaatggctccctgcttctcagcgacctgcagctggccgatgagggcacctatgaggtcgagatctccatcaccgacgacaccttcactggggagaagaccatcaaccttactgtagatggtaaagcgctctggcagggaaagaggcaagactggcaggtgggactagggaaaggtctgcccagcgcaccagctagactgagggaaaaccaacccaaaaggcacttgggagct

SEQ ID NO: 9276 - DNA, 595 bp, Homo sapiens
  source 1..595: mol_type = unassigned DNA
gtgaccgtggtgcagtccattggcacagaggtcatcggcaccctgcggcctgactatcgagaccgtatccgactctttgaaaatggctccctgcttctcagcgacctgcagctggccgatgagggcacctatgaggtcgagatctccatcaccgacgacaccttcactggggagaagaccatcaaccttactgtagatgtgcccatttcgaggccacaggtgttggtggcttcaaccactgtgctggagctcagcgaggccttcaccttgaactgctcacatgagaatggcaccaagcccagctacacctggctgaaggatggcaagcccctcctcaatgactcgagaatgctcctgtcccccgaccaaaaggtgctcaccatcacccgcgtgctcatggaggatgacgacctgtacagctgcatggtggagaaccccatcagccagggccgcagcctgcctgtcaagatcaccgtatacagtgagtttccccgcaggctttcctttagtactcaaagccccaagaggcaggtgaccatgagggactgaggacatcccaaagaaatgtcactggggggaggggaacagagatggg

SEQ ID NO: 9277 - DNA, 3602 bp, Homo sapiens
  source 1..3602: mol_type = unassigned DNA
gttaggtggagacagggtaggttgggacacaaagtccagttaagtgtgtgtcccagctcagtgctctgagcccagatcctcatctccctgggtagtgaggctcagcacagacaagcaaccaactgctgggctgccggtgccccccatgttggaacctgagttggagattatctcctaagcagatacctgcttccaaactggggatgtagggcttggaaactagaaaatgccaggtctgagggagaggaaagaacaagtccagcaatacacagagctctgtgtattcagagggaagttggcagggttgtgttcgggcagagaaactccgagtggtacaaaggggacgtgcccagagtggagaaatcatgctaattgtctgcactagagctggagaacgccacccaaaatgaagagagaaaggggagccctgtccagagcctccagggccctgcgccttgctccttttgtctaccttcttctgatccagacagaccccctggagggggtgaacatcaccagccccgtgcgcctgatccatggcaccgtggggaagtcggctctgctttctgtgcagtacagcagtaccagcagcgacaggcctgtagtgaagtggcagctgaagcgggacaagccagtgaccgtggtgcagtccattggcacagaggtcatcggcaccctgcggcctgactatcgagaccgtatccgactctttgaaaatggctccctgcttctcagcgacctgcagctggccgatgagggcacctatgaggtcgagatctccatcaccgacgacaccttcactggggagaagaccatcaaccttactgtagatgtgcccatttcgaggccacaggtgttggtggcttcaaccactgtgctggagctcagcgaggccttcaccttgaactgctcacatgagaatggcaccaagcccagctacacctggctgaaggatggcaagcccctcctcaatgactcgagaatgctcctgtcccccgaccaaaaggtgctcaccatcacccgcgtgctcatggaggatgacgacctgtacagctgcatggtggagaaccccatcagccagggccgcagcctgcctgtcaagatcaccgtatacagaagaagctccctttacatcatcttgtctacaggaggcatcttcctccttgtgaccttggtgacagtctgtgcctgctggaaaccctccaaaaggaaacagaagaagctagaaaagcaaaactccctggaatacatggatcagaatgatgaccgcctgaaaccagaagcagacaccctccctcgaagtggtgagcaggaacggaagaaccccatggcactctatatcctgaaggacaaggactccccggagaccgaggagaacccggccccggagcctcgaagcgcgacggagcccggcccgcccggctactccgtgtctcccgccgtgcccggccgctcgccggggctgcccatccgctctgcccgccgctacccgcgctccccagcgcgctccccagccaccggccggacacactcgtcgccgcccagggccccgagctcgcccggccgctcgcgcagcgcctcgcgcacactgcggactgcgggcgtgcacataatccgcgagcaagacgaggccggcccggtggagatcagcgcctgagccgcctcgggatcccctgagaggcgcccgcggtctgcggccagtggcccgggggaaagctggggctgggaagcccgggcgcggcgcgctggggacgaggggaggtcccgggggggcgctggtgtctcgggtgtgaacgtgtatgagcatgcgcagacggaggcgggtgcgcggaggcggcagtgttgatatggtgaaaccgggtcgcatttgcttccggtttactggctgtgtcctcacttggtataggttgtgccctcttaggaccacatagattattacatttctggcccaatacccaaaagggttttatggaaactaacatcagtaacctaacccccgtgactatcctgtgctcttcctagggagctgtgttgtttcccacccaccacccttccctctgaacaaatgcctgagtgctggggcactttttttttttttttttttttttttttttttgcaagttcagattagagaggccactttcccagaatccacagctgcactaagctaaggagaagccagatgccggttactgggtgtgcaggggctgttctgagctggggggatcattgtgaaggccttcttccctgggcacctggtacctggggacctacaaggtggtgagggaagggtacgagtacattccttttccctctgacctgggcgctagcaagggcaaagaacccgagcctgccagcttggcctcctcccacagcctccctcggaggcatgccatgccaagcactctttctgtctctgttcatgaataaaagagatggatgggcttattcttatagagaagtgaatttcacttactcccctggcccgaaaactagaccaaatgaggaactgttttagctcatcaaactcatatattcctcctggcttccttacaaaacaagcctttcaaacaatcattgtcctcaggaaagttgttgagcttcctccagctgtgagaataagtcctaatctccagagaaatggtggggggaggaggaggcttattgcttcccagcatttggggggaacatgatccaacccctggcctcctgccacccatctgccctgctcccacatgctcaggtcccagggcacagaaaaagggcagactccctaatcacactaacatcaaaataaagaggctgggccgctgtgtagccaggacatgcccatgccaccgcctattgaacagttcataggagtggcagtaatctactgtgtgaggagagagggcaattaaaaagctgaaagagaaggaggccctctgtgtattccattccctcctccttaatgcctccaagggtccttgcatccctagtctcctaaactccagctctgattcgccatcaacccatggagcaattccaaggccccagttacccatcacctccacaccaggtcaagttttgtctcagccccaaaggcactgacatttctagtttgccccctctgccctgaaccccacagcatgcctgtctcagctccctgtccctcggcacttccccaggctcatttgagcaggtgtgccttcgcagctcccctaaacttcccaggtgcctcatccataatgagataatgcatgtaggggaaaagtttctcaagaaggtggaagaggcagcaggacttggataaggagtacctgctggtcagccttgagatgcacaggtgaaggttagggtgagatgagaacatgccataccctggtgctgaatccctgaggggccagcttgccaggcttaagccaaatctgccttaaattgggggtggggaggggtaagtaaggaagtggggtttgtttttgtgttgttttcatcttcatctttgtattactagcatccagcagagtgcctagcacatactggatgctcaataaacttttgatgaaatgaaatgacaactttattccacataaacaagggtaacaaaacaagctgcttaaata

SEQ ID NO: 9278 - DNA, 2946 bp, Homo sapiens
  source 1..2946: mol_type = unassigned DNA
ctccgcctcagccaatgggcggcagccacagagcgttctgtccgcagagccgggcgcggggcttctataaaaggcgcccgaagcgggggcgcgcgccccagagacgtgaactgtcgttgcagagattgcgggcggctgagacgccgcctgcctggcacctaggagcgcagcggagccccgacaccgccgccgccgccatggagtccgagaccgaacccgagcccgtcacgctcctggtgaagagccccaaccagcgccaccgcgacttggagctgagtggcgaccgcggctggagtgtgggccacctcaaggcccacctgagccgcgtctaccccgagcgtccgcgtccagaggaccagaggttaatttattctgggaagctgttgttggatcaccaatgtctcagggacttgcttccaaagcaggaaaaacggcatgttttgcatctggtgtgcaatgtgaagagtccttcaaaaatgccagaaatcaacgccaaggtggctgaatccacagaggagcctgctggttctaatcggggacagtatcctgaggattcctcaagtgatggtttaaggcaaagggaagttcttcggaacctttcttcccctggatgggaaaacatctcaaggcctgaagctgcccagcaggcattccaaggcctgggtcctggtttctccggttacacaccctatgggtggcttcagctttcctggttccagcagatatatgcacgacagtactacatgcaatatttagcagccactgctgcatcaggggcttttgttccaccaccaagtgcacaagagatacctgtggtctctgcacctgctccagcccctattcacaaccagtttccagctgaaaaccagcctgccaatcagaatgctgctcctcaagtggttgttaatcctggagccaatcaaaatttgcggatgaatgcacaaggtggccctattgtggaagaagatgatgaaataaatcgagattggttggattggacctattcagcagctacattttctgtttttctcagtatcctctacttctactcctccctgagcagattcctcatggtcatgggggccaccgttgttatgtacctgcatcacgttgggtggtttccatttagaccgaggccggttcagaacttcccaaatgatggtcctcctcctgacgttgtaaatcaggaccccaacaataacttacaggaaggcactgatcctgaaactgaagaccccaaccacctccctccagacagggatgtactagatggcgagcagaccagcccctcctttatgagcacagcatggcttgtcttcaagactttctttgcctctcttcttccagaaggccccccagccatcgcaaactgatggtgtttgtgctgtagctgttggaggctttgacaggaatggactggatcacctgactccagctagattgcctctcctggacatggcaatgatgagtttttaaaaaacagtgtggatgatgatatgcttttgtgagcaagcaaaagcagaaacgtgaagccgtgatacaaattggtgaacaaaaaatgcccaaggcttctcatgtctttattctgaagagctttaatatatactctatgtagtttaataagcactgtacgtagaaggccttaggtgttgcatgtctatgcttgaggaacttttccaaatgtgtgtgtctgcatgtgtgtttgtacatagaagtcatagatgcagaagtggttctgctggtacgatttgattcctgttggaatgtttaaattacactaagtgtactactttatataatcaatgaaattgctagacatgttttagcaggacttttctaggaaagacttatgtataattgctttttaaaatgcagtgctttactttaaactaaggggaactttgcggaggtgaaaacctttgctgggttttctgttcaataaagttttactatgaatgaccctggcagagactcctgtcatcctagcagtttactctgcgtttgttgtatctagacagtcaacaactgagttgtcggtgtttaacctgaatgcttgtttttcagaagaggactgtttgtgccggtaagaatgatcaggtaaggccatgaaagtttttgttggcgtttttgtttttgagatggggtcttgctttgttccttgggccagagtacattggctactcacaagtgggctggtagctggctacagccccagactcctggcttaagccacctcctgcctcagccaccctggcagctgggactacaggcatgcgccatcacacttagcttgaaagttttaatttactaagaatatacctgtgtttccccccatttcctgatttaaacagtactggcttatataggaacccatcaaagttaaattccccaaatttaaatttagtaaatttagtggtttcaccttggcaaatctgcaatagtttcaccagctcaaatttcatgcttttgtaagctgagcttatgtttgtgattttaatcctttaagtactactgtggtaactaatcatttttttgttttttttggtggtgtttttgtttttgttttgagatggagtctcactctgttgcccaggctggagtgccgtggcgcgatctcggctcactgcaacctctacctcctgagttcaagcgattctcctgcctcagcctcccgaatagctgggattacaggtgcccaccacaatgtctggctaattttttgtatttttagtagagacgaggtttcacccatgttggccaggctggtctcaaacccctgacctcaggtgatctgcccgcctcggcctcccaaagtgctgggattacagatgtgagccaccgcacccagccagggactaatctttaaagcaaagttttatatatttttacgtgagtaatgttatgtgtaggtgttctatttggcaaaataaatcagccttttctatc

SEQ ID NO: 9279 - DNA, 570 bp, Homo sapiens
  source 1..570: mol_type = unassigned DNA
gccccagagacgtgaactgtcgttgcagagattgcgggcggctgagacgccgcctgcctggcacctaggagcgcagcggagccccgacaccgccgccgccgccatggagtccgagaccgaacccgagcccgtcacgctcctggtgaagagccccaaccagcgccaccgcgacttggagctgagtggcgaccgcggctggagtgtgggccacctcaaggcccacctgagccgcgtctaccccgagcgtccgcgtccagaggaccagaggttaatttattctgggaagctgttgttggatcaccaatgtctcagggacttgcttccaaaggtacatcacttacacattaacttctgaatgtttttaagcactcaccaggttaggttcaggtccttaagtaccttcgtattacttttagcaggaaaaacggcatgttttgcatctggtgtgcaatgtgaagagtccttcaaaaatgccagaaatcaacgccaaggtgtgtctgcctcttcatgatggtaacaatttgtatcattcagactttcaggggagtaataaaagaagttggataaaac

SEQ ID NO: 9280 - DNA, 571 bp, Homo sapiens
  source 1..571: mol_type = unassigned DNA
agagacgtgaactgtcgttgcagagattgcgggcggctgagacgccgcctgcctggcacctaggagcgcagcggagccccgacaccgccgccgccgccatggagtccgagaccgaacccgagcccgtcacgctcctggtgaagagccccaaccagcgccaccgcgacttggagctgagtggcgaccgcggctggagtgtgggccacctcaaggcccacctgagccgcgtctaccccgagcgtccgcgtccagaggaccagaggttaatttattctgggaagctgttgttggatcaccaatgtctcagggacttgcttccaaagcaggaaaaacggcatgttttgcatctggtgtgcaatgtgaagagtccttcaaaaatgccagaaatcaacgccaaggtgtgtctgcctcttcatgatggtaacaatttgtatcattcagactttcaggggagtaataaaagaagttggataaaacgtttattgagagactgtatggtgttattaccaagtaatattttgtttctttcctaggaattagaaactgtattatcaacacaaagtgatgagtt

SEQ ID NO: 9281 - DNA, 1125 bp, Homo sapiens
  source 1..1125: mol_type = unassigned DNA
agagacgtgaactgtcgttgcagagattgcgggcggctgagacgccgcctgcctggcacctaggagcgcagcggagccccgacaccgccgccgccgccatggagtccgagaccgaacccgagcccgtcacgctcctggtgaagagccccaaccagcgccaccgcgacttggagctgagtggcgaccgcggctggagtgtgggccacctcaaggcccacctgagccgcgtctaccccgagcgtccgcgtccagaggaccagaggttaatttattctgggaagctgttgttggatcaccaatgtctcagggacttgcttccaaagcaggaaaaacggcatgttttgcatctggtgtgcaatgtgaagagtccttcaaaaatgccagaaatcaacgccaaggtggctgaatccacagaggagcctgctggttctaatcggggacagtatcctgaggattcctcaagtgatggtttaaggcaaagggaagttcttcggaacctttcttcccctggatgggaaaacatctcaaggtgagtgttataataaagatcttggcttatgcaacatgaatgttcctcgtttgcatcaatttaagaataaggtatgtttacacgtatataatcagaacttttaaacatacagaattttgctttataaatagcttcgctttaaagatctcttatatatttaacttttcttaatacacagccttttagtacacacaaatttaaaaagtaggtaatgcatatattgaaaaaaaaaagaaaatgtaggcgttttatccttccattgtgctgaccgcttggttgccgtcatgataggaaattagtgctgctgcaggagaaaacagctgtcgtaagcattgtgcagctgctttgctgagtggctttgtgctttattgtaacaatgggtgacaacaagggagagactgtttaagaagtgtccttccaaagacttgggggtactaggaaaattggccaatttcttataactattaaagcttttctttagagcaaaagtcagaactaaatgctctgttatttggatttttatagctcttggaatacattgtttttggggaaaaattcattaactgcaagttgcaattctgtaactctccaattct

SEQ ID NO: 9282 - DNA, 798 bp, Homo sapiens
  source 1..798: mol_type = unassigned DNA
agagacgtgaactgtcgttgcagagattgcgggcggctgagacgccgcctgcctggcacctaggagcgcagcggagccccgacaccgccgccgccgccatggagtccgagaccgaacccgagcccgtcacgctcctggtgaagagccccaaccagcgccaccgcgacttggagctgagtggcgaccgcggctggagtgtgggccacctcaaggcccacctgagccgcgtctaccccgagcgtccgaggaccagaggttaatttattctgggaagctgttgttggatcaccaatgtctcagggacttgcttccaaagcaggaaaaacggcatgttttgcatctggtgtgcaatgtgaagagtccttcaaaaatgccagaaatcaacgccaaggtggctgaatccacagaggagcctgctggttctaatcggggacagtatcctgaggattcctcaagtgatggtttaaggcaaagggaagttcttcggaacctttcttcccctggatgggaaaacatctcaaggcctgaagctgcccagcaggcattccaaggcctgggtcctggtttctccggttacacaccctatgggtggcttcagctttcctggttccagcagatatatgcacgacagtactacatgcaatatttagcagccactgctgcatcaggggcttttgttccaccaccaagtgcacaagagatacctgtggtctctgcacctgctccagcccctattcacaaccagtttccagctgaaaaccagcctgccaatcagaatgctgctcctcaagtggttgt

SEQ ID NO: 9283 - DNA, 1388 bp, Homo sapiens
  source 1..1388: mol_type = unassigned DNA
agagacgtgaactgtcgttgcagagattgcgggcggctgagacgccgcctgcctggcacctaggagcgcagcggagccccgacaccgccgccgccgccatggagtccgagaccgaacccgagcccgtcacgctcctggtgaagagccccaaccagcgccaccgcgacttggagctgagtggcgaccgcggctggagtgtgggccacctcaaggcccacctgagccgcgtctaccccgagcgtccgcgtccagaggaccagaggttaatttattctgggaagctgttgttggatcaccaatgtctcagggacttgcttccaaaggaaaaacggcatgttttgcatctggtgtgcaatgtgaagagtccttcaaaaatgccagaaatcaacgccaaggtggctgaatccacagaggagcctgctggttctaatcggggacagtatcctgaggattcctcaagtgatggtttaaggcaaagggaagttcttcggaacctttcttcccctggatgggaaaacatctcaaggcatcacgttgggtggtttccatttagaccgaggccggttcagaacttcccaaatgatggtcctcctcctgacgttgtaaatcaggaccccaacaataacttacaggaaggcactgatcctgaaactgaagaccccaaccacctccctccagacagggatgtactagatggcgagcagaccagcccctcctttatgagcacagcatggcttgtcttcaagactttctttgcctctcttcttccagaaggccccccagccatcgcaaactgatggtgtttgtgctgtagctgttggaggctttgacaggaatggactggatcacctgactccagctagattgcctctcctggacatggcaatgatgagtttttaaaaaacagtgtggatgatgatatgcttttgtgagcaagcaaaagcagaaacgtgaagccgtgatacaaattggtgaacaaaaaatgcccaaggcttctcatgtctttattctgaagagctttaatatatactctatgtagtttaataagcactgtacgtagaaggccttaggtgttgcatgtctatgcttgaggaacttttccaaatgtgtgtgtctgcatgtgtgtttgtacatagaagtcatagatgcagaagtggttctgctggtacgatttgattcctgttggaatgtttaaattacactaagtgtactactttatataatcaatgaaattgctagacatgttttagcaggacttttctaggaaagacttatgtataattgctttttaaaatgcagtgctttactttaaactaaggggaactttgcggaggtgaaaacctttgctgggttttctgttcaataaagttttactatgaatgaccctg

SEQ ID NO: 9284 - DNA, 1862 bp, Homo sapiens
  source 1..1862: mol_type = unassigned DNA
agagacgtgaactgtcgttgcagagattgcgggcggctgagacgccgcctgcctggcacctaggagcgcagcggagccccgacaccgccgccgccgccatggagtccgagaccgaacccgagcccgtcacgctcctggtgaagagccccaaccagcgccaccgcgacttggagctgagtggcgaccgcggctggagtgtgggccacctcaaggcccacctgagccgcgtctaccccgagcgtccgcgtccagaggaccagaggttaatttattctgggaagctgttgttggatcaccaatgtctcagggacttgcttccaaaggaaaaacggcatgttttgcatctggtgtgcaatgtgaagagtccttcaaaaatgccagaaatcaacgccaaggtggctgaatccacagaggagcctgctggttctaatcggggacagtatcctgaggattcctcaagtgatggtttaaggcaaagggaagttcttcggaacctttcttcccctggatgggaaaacatctcaaggcctgaagctgcccagcaggcattccaaggcctgggtcctggtttctccggttacacaccctatgggtggcttcagctttcctggttccagcagatatatgcacgacagtactacatgcaatatttagcagccactgctgcatcaggggcttttgttccaccaccaagtgcacaagagatacctgtggtctctgcacctgctccagcccctattcacaaccagtttccagctgaaaaccagcctgccaatcagaatgctgctcctcaagtggttgttaatcctggagccaatcaaaatttgcggatgaatgcacaaggtggccctattgtggaagaagatgatgaaataaatcgagattggttggattggacctattcagcagctacattttctgtttttctcagtatcctctacttctactcctccctgagcagattcctcatggtcatgggggccaccgttgttatgtacctgcatcacgttgggtggtttccatttagaccgaggccggttcagaacttcccaaatgatggtcctcctcctgacgttgtaaatcaggaccccaacaataacttacaggaaggcactgatcctgaaactgaagaccccaaccacctccctccagacagggatgtactagatggcgagcagaccagcccctcctttatgagcacagcatggcttgtcttcaagactttctttgcctctcttcttccagaaggccccccagccatcgcaaactgatggtgtttgtgctgtagctgttggaggctttgacaggaatggactggatcacctgactccagctagattgcctctcctggacatggcaatgatgagtttttaaaaaacagtgtggatgatgatatgcttttgtgagcaagcaaaagcagaaacgtgaagccgtgatacaaattggtgaacaaaaaatgcccaaggcttctcatgtctttattctgaagagctttaatatatactctatgtagtttaataagcactgtacgtagaaggccttaggtgttgcatgtctatgcttgaggaacttttccaaatgtgtgtgtctgcatgtgtgtttgtacatagaagtcatagatgcagaagtggttctgctggtacgatttgattcctgttggaatgtttaaattacactaagtgtactactttatataatcaatgaaattgctagacatgttttagcaggacttttctaggaaagacttatgtataattgctttttaaaatgcagtgctttactttaaactaaggggaactttgcggaggtgaaaacctttgctgggttttctgttcaataaagttttactatgaatgaccctg

SEQ ID NO: 9285 - DNA, 1425 bp, Homo sapiens
  source 1..1425: mol_type = unassigned DNA
gagacgtgaactgtcgttgcagagattgcgggcggctgagacgccgcctgcctggcacctaggagcgcagcggagccccgacaccgccgccgccgccatggagtccgagaccgaacccgagcccgtcacgctcctggtgaagagccccaaccagcgccaccgcgacttggagctgagtggcgaccgcggctggagtgtgggccacctcaaggcccacctgagccgcgtctaccccgagcgtccgcgtccagaggaccagaggttaatttattctgggaagctgttgttggatcaccaatgtctcagggacttgcttccaaagcaggaaaaacggcatgttttgcatctggtgtgcaatgtgaagagtccttcaaaaatgccagaaatcaacgccaaggtggctgaatccacagaggagcctgctggttctaatcggggacagtatcctgaggattcctcaagtgatggtttaaggcaaagggaagttcttcggaacctttcttcccctggatgggaaaacatctcaaggcctgaagctgcccagcaggcattccaaggcctgggtcctggtttctccggttacacaccctatgggtggcttcagctttcctggttccagcagatatatgcacgacagtactacatgcaatatttagcagccactgctgcatcaggggcttttgttccaccaccaagtgcacaagagatacctgtggtctctgcacctgctccagcccctattcacaaccagtttccagctgaaaaccagcctgccaatcagaatgctgctcctcaagtggttgttaatcctggagccaatcaaaatttgcggatgaatgcacaaggcatcacgttgggtggtttccatttagaccgaggccggttcagaacttcccaaatgatggtcctcctcctgacgttgtaaatcaggaccccaacaataacttacaggaaggcactgatcctgaaactgaagaccccaaccacctccctccagacagggatgtactagatggcgagcagaccagcccctcctttatgagcacagcatggcttgtcttcaagactttctttgcctctcttcttccagaaggccccccagccatcgcaaactgatggtgtttgtgctgtagctgttggaggctttgacaggaatggactggatcacctgactccagctagattgcctctcctggacatggcaatgatgagtttttaaaaaacagtgtggatgatgatatgcttttgtgagcaagcaaaagcagaaacgtgaagccgtgatacaaattggtgaacaaaaaatgcccaaggcttctcatgtctttattctgaagagctttaatatatactctatgtagtttaataagcactgtacgtagaaggccttaggtgttgcatgtctatgcttgaggaacttttccaaat

SEQ ID NO: 9286 - DNA, 1782 bp, Homo sapiens
  source 1..1782: mol_type = unassigned DNA
gtcgttgcagagattgcgggcggctgagacgccgcctgcctggcacctaggagcgcagcggagccccgacaccgccgccgccgccatggagtccgagaccgaacccgagcccgtcacgctcctggtgaagagccccaaccagcgccaccgcgacttggagctgagtggcgaccgcggctggagtgtgggccacctcaaggcccacctgagccgcgtctaccccgagcgtccgcgtccagaggaccagaggttaatttattctgggaagctgttgttggatcaccaatgtctcagggacttgcttccaaaggtggctgaatccacagaggagcctgctggttctaatcggggacagtatcctgaggattcctcaagtgatggtttaaggcaaagggaagttcttcggaacctttcttcccctggatgggaaaacatctcaaggcctgaagctgcccagcaggcattccaaggcctgggtcctggtttctccggttacacaccctatgggtggcttcagctttcctggttccagcagatatatgcacgacagtactacatgcaatatttagcagccactgctgcatcaggggcttttgttccaccaccaagtgcacaagagatacctgtggtctctgcacctgctccagcccctattcacaaccagtttccagctgaaaaccagcctgccaatcagaatgctgctcctcaagtggttgttaatcctggagccaatcaaaatttgcggatgaatgcacaaggtggccctattgtggaagaagatgatgaaataaatcgagattggttggattggacctattcagcagctacattttctgtttttctcagtatcctctacttctactcctccctgagcagattcctcatggtcatgggggccaccgttgttatgtacctgcatcacgttgggtggtttccatttagaccgaggccggttcagaacttcccaaatgatggtcctcctcctgacgttgtaaatcaggaccccaacaataacttacaggaaggcactgatcctgaaactgaagaccccaaccacctccctccagacagggatgtactagatggcgagcagaccagcccctcctttatgagcacagcatggcttgtcttcaagactttctttgcctctcttcttccagaaggccccccagccatcgcaaactgatggtgtttgtgctgtagctgttggaggctttgacaggaatggactggatcacctgactccagctagattgcctctcctggacatggcaatgatgagtttttaaaaaacagtgtggatgatgatatgcttttgtgagcaagcaaaagcagaaacgtgaagccgtgatacaaattggtgaacaaaaaatgcccaaggcttctcatgtctttattctgaagagctttaatatatactctatgtagtttaataagcactgtacgtagaaggccttaggtgttgcatgtctatgcttgaggaacttttccaaatgtgtgtgtctgcatgtgtgtttgtacatagaagtcatagatgcagaagtggttctgctggtacgatttgattcctgttggaatgtttaaattacactaagtgtactactttatataatcaatgaaattgctagacatgttttagcaggacttttctaggaaagacttatgtataattgctttttaaaatgcagtgctttactttaaactaaggggaactttgcggaggtgaaaacctttgctgggttttctgttcaataaagttttactatgaatgaccctggcaga

SEQ ID NO: 9287 - DNA, 562 bp, Homo sapiens
  source 1..562: mol_type = unassigned DNA
ctgcccacgagcataattcttcatcacacaggagagggcatccgggcaggaaaagatagtgaagtcgtgagttccagcttgtggtagcgcctgtgtctgtttttgtttcatatggtcaagaatgttttagaacgtccagaggaccagaggttaatttattctgggaagctgttgttggatcaccaatgtctcagggacttgcttccaaaggtggctgaatccacagaggagcctgctggttctaatcggggacagtatcctgaggattcctcaagtgatggtttaaggcaaagggaagttcttcggaacctttcttcccctggatgggaaaacatctcaaggcctgaagctgcccagcaggcattccaaggcctgggtcctggtttctccggttacacaccctatgggtggcttcagctttcctggttccagcagatatatgcacgacagtactacatgcaatatttagcagccactgctgcatcaggggcttttgttccaccaccaagtgcacaagagatacctgtggtctctgcacctgctccagcccctattcacaacc

SEQ ID NO: 9288 - DNA, 567 bp, Homo sapiens
  source 1..567: mol_type = unassigned DNA
cacacaggagagggcatccgggcaggaaaagatagtgaagtcgtgagttccagcttgtggtagcgcctgtgtctgtttttgtttcatatggtcaagaatgttttagaacgtccagaggaccagaggttaatttattctgggaagctgttgttggatcaccaatgtctcagggacttgcttccaaagcaggaaaaacggcatgttttgcatctggtgtgcaatgtgaagagtccttcaaaaatgccagaaatcaacgccaaggtggctgaatccacagaggagcctgctggttctaatcggggacagtatcctgaggattcctcaagtgatggtttaaggcaaagggaagttcttcggaacctttcttcccctggatgggaaaacatctcaaggcctgaagctgcccagcaggcattccaaggcctgggtcctggtttctccggttacacaccctatgggtggcttcagctttcctggttccagcagatatatgcacgacagtactacatgcaatatttagcagccactgctgcatcaggggcttttgttccaccaccaagtgcacaa

SEQ ID NO: 9289 - DNA, 511 bp, Homo sapiens
  source 1..511: mol_type = unassigned DNA
gcctcccacagtgcttggattacaggcatgagccaccatgcccagccgataatttgccattctgtatttatttgcgtgttagagaccagttaaagttaagacactttctaaatagaagtcttgtatatggggcttttgagaaagtgttttcccgtgatgctggggggaaacacacatattcaaattacttgtataaaacagtttattctgtgtttaggaacttgtaggggtgaaatgctgacctgtgttactctttctttccatgatcagcgtccagaggaccagaggttaatttattctgggaagctgttgttggatcaccaatgtctcagggacttgcttccaaagcaggaaaaacggcatgttttgcatctggtgtgcaatgtgaagagtccttcaaaaatgccagaaatcaacgccaaggtgtgtctgcctcttcatgatggtaacaatttgtatcattcagactttcaggggagtaataaaagaagttggataaaacgtttattga

SEQ ID NO: 9290 - DNA, 774 bp, Homo sapiens
  source 1..774: mol_type = unassigned DNA
aagtaccttcgtattacttttagcaggaaaaacggcatgttttgcatctggtgtgcaatgtgaagagtccttcaaaaatgccagaaatcaacgccaaggtggctgaatccacagaggagcctgctggttctaatcggggacagtatcctgaggattcctcaagtgatggtttaaggcaaagggaagttcttcggaacctttcttcccctggatgggaaaacatctcaaggcctgaagctgcccagcaggcattccaaggcctgggtcctggtttctccggttacacaccctatgggtggcttcagctttcctggttccagcagatatatgcacgacagtactacatgcaatatttagcagccactgctgcatcaggggcttttgttccaccaccaagtgcacaagagatacctgtggtctctgcacctgctccagcccctattcacaaccagtttccagctgaaaaccagcctgccaatcagaatgctgctcctcaagtggttgttaatcctggagccaatcaaaatttgcggatgaatgcacaaggtggccctattgtggaagaagatgatgaaataaatcgagattggttggattggacctattcagcagctacattttctgtttttctcagtatcctctacttctactcctccctgagcagattcctcatggtcatgggggccaccgttgttatgtacctgcatcacgttgggtggtttccatttagaccgaggccggttcagaacttcccaaatgatggtcctcctcctg

SEQ ID NO: 9291 - DNA, 751 bp, Homo sapiens
  source 1..751: mol_type = unassigned DNA
aggaaaaacggcatgttttgcatctggtgtgcaatgtgaagagtccttcaaaaatgccagaaatcaacgccaaggtggctgaatccacagaggagcctgctggttctaatcggggacagtatcctgaggattcctcaagtgatggtttaaggcaaagggaagttcttcggaacctttcttcccctggatgggaaaacatctcaaggcctgaagctgcccagcaggcattccaaggcctgggtcctggtttctccggttacacaccctatgggtggcttcagctttcctggttccagcagatatatgcacgacagtactacatgcaatagaaggcactgatcctgaaactgaagaccccaaccacctccctccagacagggatgtactagatggcgagcagaccagcccctcctttatgagcacagcatggcttgtcttcaagactttctttgcctctcttcttccagaaggccccccagccatcgcaaactgatggtgtttgtgctgtagctgttggaggctttgacaggaatggactggatcacctgactccagctagattgcctctcctggacatggcaatgatgagtttttaaaaaacagtgtggatgatgatatgcttttgtgagcaagcaaaagcagaaacgtgaagccgtgatacaaattggtgaacaaaaaatgcccaaggcttctcatgtctttattctgaagagctttaatatatactctatgtagtttaataagcactgta

SEQ ID NO: 9292 - DNA, 2199 bp, Homo sapiens
  source 1..2199: mol_type = unassigned DNA
gctgtgtggcccaggcttttctcaaactcctgagggcaagcgatcctcccacctcagcctcctgagtagctgggactacaggcatgtgccactagacctggctctaaagacatatatgacacacgaaaccatttatttttcatttcacaatgtttattcacatatatggtattagtattctaatgtagtgatgcactctaaatttgcattatatttcctagaacatctgaacagagcataggaaattccctattttgccattatcagttctaacaaaaatcttaaaagcactttatcatttcatttccctgcactgtaatttttttaaatgatcaaaaacagtatcataccaaggcttacttatattggaatactattttagaaagttgtgggctgggttgtatttataaatcttgttggtcagatgtctgcaatgagtaaatttagcaccattatcaggaagctttctcaccaatgacaacttcattggaagattttaatgaaagtgtagcatactctagggaaaaaatatgaatattttagcatctatgtattgaaaattatgttgaataaatgtcagactattttttacataacgttgcttctgtttaattttgtcacgttcagaggtggggggtaggagatgtaagcccttgacagcaaaataattccttttgcttgatttcagacagttgcatcagctcctttgttctgtgttcatgttacacttatttaggtggctgaatccacagaggagcctgctggttctaatcggggacagtatcctgaggattcctcaagtgatggtttaaggcaaagggaagttcttcggaacctttcttcccctggatgggaaaacatctcaaggcctgaagctgcccagcaggcattccaaggcctgggtcctggtttctccggttacacaccctatgggtggcttcagctttcctggttccagcagatatatgcacgacagtactacatgcaatatttagcagccactgctgcatcaggggcttttgttccaccaccaagtgcacaagagatacctgtggtctctgcacctgctccagcccctattcacaaccagtttccagctgaaaaccagcctgccaatcagaatgctgctcctcaagtggttgttaatcctggagccaatcaaaatttgcggatgaatgcacaaggtggccctattgtggaagaagatgatgaaataaatcgagattggttggattggacctattcagcagctacattttctgtttttctcagtatcctctacttctactcctccctgagcagattcctcatggtcatgggggccaccgttgttatgtacctgcatcacgttgggtggtttccatttagaccgaggccggttcagaacttcccaaatgatggtcctcctcctgacgttgtaaatcaggaccccaacaataacttacaggaaggcactgatcctgaaactgaagaccccaaccacctccctccagacagggatgtactagatggcgagcagaccagcccctcctttatgagcacagcatggcttgtcttcaagactttctttgcctctcttcttccagaaggccccccagccatcgcaaactgatggtgtttgtgctgtagctgttggaggctttgacaggaatggactggatcacctgactccagctagattgcctctcctggacatggcaatgatgagtttttaaaaaacagtgtggatgatgatatgcttttgtgagcaagcaaaagcagaaacgtgaagccgtgatacaaattggtgaacaaaaaatgcccaaggcttctcatgtctttattctgaagagctttaatatatactctatgtagtttaataagcactgtacgtagaaggccttaggtgttgcatgtctatgcttgaggaacttttccaaatgtgtgtgtctgcatgtgtgtttgtacatagaagtcatagatgcagaagtggttctgctggtacgatttgattcctgttggaatgtttaaattacactaagtgtactactttatataatcaatgaaattgctagacatgttttagcaggacttttctaggaaagacttatgtataattgctttttaaaatgcagtgctttactttaaactaaggggaactttgcggaggtgaaaacctttgctgggttttctgttcaataaagttttactatgaatgac

SEQ ID NO: 9293 - DNA, 844 bp, Homo sapiens
  source 1..844: mol_type = unassigned DNA
ggggacagtatcctgaggattcctcaagtgatggtttaaggcaaagggaagttcttcggaacctttcttcccctggatgggaaaacatctcaagtttagcagccactgctgcatcaggggcttttgttccaccaccaagtgcacaagagatacctgtggtctctgcacctgctccagcccctattcacaaccagtttccagctgaaaaccagcctgccaatcagaatgctgctcctcaagtggttgttaatcctggagccaatcaaaatttgcggatgaatgcacaaggtggccctattgtggaagaagatgatgaaataaatcgagattggttggattggacctattcagcagctacattttctgtttttctcagtatcctctacttctactcctccctgagcagattcctcatggtcatgggggccaccgttgttatgtacctgcatcacgttgggtggtttccatttagaccgaggccggttcagaacttcccaaatgatggtcctcctcctgacgttgtaaatcaggaccccaacaataacttacagaaggccccccagccatcgcaaactgatggtgtttgtgctgtagctgttggaggctttgacaggaatggactggatcacctgactccagctagattgcctctcctggacatggcaatgatgagtttttaaaaaacagtgtggatgatgatatgcttttgtgagcaagcaaaagcagaaacgtgaagccgtgatacaaattggtgaacaaaaaatgcccaaggcttctcatgtctttattctgaagagctttaatatatactctatgtagtttaataagcactgtacgtagaagg

SEQ ID NO: 9294 - DNA, 435 bp, Homo sapiens
  source 1..435: mol_type = unassigned DNA
tcgatttgaattcttgattttaatttaaacttagttttcatttgttcatactcaacccactcaaaatgagtgttttttcaaatctatgtataggcctgaagctgcccagcaggcattccaaggcctgggtcctggtttctccggttacacaccctatgggtggcttcagctttcctggttccagcagatatatgcacgacagtactacatgcaatatttagcagccactgctgcatcaggggcttttgttccaccaccaagtgcacaagagatacctgtggtctctgcacctgctccagcccctattcacaaccagtttccagctgaaaaccagcctgccaatcagaatgctgctcctcaagtggttgttaatcctggagccaatcaaaatttgcggatgaatgcacaaggtggccctattgtggaagaagatga

SEQ ID NO: 9295 - DNA, 458 bp, Homo sapiens
  source 1..458: mol_type = unassigned DNA
ccagcaggcattccaaggcctgggtcctggtttctccggttacacaccctatgggtggcttcagctttcctggttccagcagatatatgcacgacagtactacatgcaatatatcctctacttctactcctccctgagcagattcctcatggtcatgggggccaccgttgttatgtacctgcatcacgttgggtggtttccatttagaccgaggccggttcagaacttcccaaatgatggtcctcctcctgacgttgtaaatcaggaccccaacaataacttacaggaaggcactgatcctgaaactgaagaccccaaccacctccctccagacagggatgtactagatggcgagcagaccagcccctcctttatgagcacagcatggcttgtcttcaagactttctttgcctctcttcttccagaaggccccccagccatcgcaaactgatggtgtt

SEQ ID NO: 9296 - DNA, 509 bp, Homo sapiens
  source 1..509: mol_type = unassigned DNA
gatgggtcttgcagtgagcttatcagggtgctgctgtgattagaggtggggagccttggattcttgagtaagtctcactgtgacatcagctaagatggacttttatgtgcttcctttgaaggcatcacgttgggtggtttccatttagaccgaggccggttcagaacttcccaaatgatggtcctcctcctgacgttgtaaatcaggaccccaacaataacttacaggaaggcactgatcctgaaactgaagaccccaaccacctccctccagacagggatgtactagatggcgagcagaccagcccctcctttatgagcacagcatggcttgtcttcaagactttctttgcctctcttcttccagaaggccccccagccatcgcaaactgatggtgtttgtgctgtagctgttggaggctttgacaggaatggactggatcacctgactccagctagattgcctctcctggacatggcaatgatgagtttttaaaaaacagtgtggat

SEQ ID NO: 9297 - DNA, 1578 bp, Homo sapiens
  source 1..1578: mol_type = unassigned DNA
atcacacaggatccggagctggtgctgataacagcggaatcccccgtctacctctctccttggtcctggaacagcgctactgatcaccaagtagccacaaaatataataaaccctcagcacttgctcagtagttttgtgaaagtctcaagtaaaagagacacaaacaaaaaattctttttcgtgaagaactccaaaaataaaattctctagagataaaaaaaaaaaaaaaaggaaaatgccagctgatataatggagaaaaattcctcgtccccggtggctgctaccccagccagtgtcaacacgacaccggataaaccaaagacagcatctgagcacagaaagtcatcaaagcctattatggagaaaagacgaagagcaagaataaatgaaagtctgagccagctgaaaacactgattttggatgctctgaagaaagatagctcgcggcattccaagctggagaaggcggacattctggaaatgacagtgaagcacctccggaacctgcagcgggcgcagatgacggctgcgctgagcacagacccaagtgtgctggggaagtaccgagccggcttcagcgagtgcatgaacgaggtgacccgcttcctgtccacgtgcgagggcgttaataccgaggtgcgcactcggctgctcggccacctggccaactgcatgacccagatcaatgccatgacctaccccgggcagccgcaccccgccttgcaggcgccgccaccgcccccaccgggacccggcggcccccagcacgcgccgttcgcgccgccgccgccactcgtgcccatccccgggggcgcggcgccccctcccggcggcgccccctgcaagctgggcagccaggctggagaggcggctaaggtgtttggaggcttccaggtggtaccggctcccgatggccagtttgctttcctcattcccaacggggccttcgcgcacagcggccctgtcatccccgtctacaccagcaacagcggcacctccgtgggccccaacgcagtgtcaccttccagcggcccctcgcttacggcggactccatgtggaggccgtggcggaactgagggggctcaggccacccctcctcctaaactccccaacccacctctcttccctccggactctaaacaggaacttgaatactgggagagaagaggacttttttgattaagtggttactttgtgtttttttaatttctaagaagttactttttgtagagagagctgtattaagtgactgaccatgcactatatttgtatatattttatatgttcatattggattgcgcctttgtattataaaagctcagatgacatttcgttttttacacgagatttcttttttatgtgatgccaaagatgtttgaaaatgctcttaaaatatcttcctttggggaagtttatttgagaaaatataataaaagaaaaaagtaaaggcttttatgtcttcgaactgattcttccagaatatgtaaaaaggcttttggtggaatttgaattacatgtaattggtaattcaggaattgactcttttgttattaaaagaacatttgtaaaaatcca

SEQ ID NO: 9298 - DNA, 1009 bp, Homo sapiens
  source 1..1009: mol_type = unassigned DNA
acacaggatccggagctggtgctgataacagcggaatcccccgtctacctctctccttggtcctggaacagcgctactgatcaccaagtagccacaaaatataataaaccctcagcacttgctcagtagttttgtgaaagtctcaagtaaaagagacacaaacaaaaaattctttttcgtgaagaactccaaaaataaaattctctagagataaaaaaaaaaaaaaaaggaaaatgccagctgatataatggagaaaaattcctcgtccccggtggctgctaccccagccagtgtcaacacgacaccggataaaccaaagacagcatctgagcacagaaagtcatcaaagcctattatggagaaaagacgaagagcaagaataaatgaaagtctgagccagctgaaaacactgattttggatgctctgaagaaagatgtaagtggggaaatgctgctcgctcttttaattaaaaaacaaacactttctcagctactaagagtgaaaccccccgccctgcggggtctggcactcgctggtactgcgttctcccaggcgggagggcccggccttattcgctggggtccagagataatgcttgcgctccgtggccgggaggagggacccccagcactctgaagcagctgacacggggctcactttcctttcttgcctactctatgcagagctcgcggcattccaagctggagaaggcggacattctggaaatgacagtgaagcacctccggaacctgcagcgggcgcagatgacgggtgagggcggctcgccgcgtccccctgtgcgggcgtcccgctcgcctcgcggtgatttcttccagacttccgcccgtggttgtgagaggcattcagctacattttactgccttggctcactcttgcgttcccacggtctggggcttatttatagccacaactccaagttgttactgttccggaaagggagggaaagaggttgcagccgcgagggtggcgggcgccgggtaggggcg

SEQ ID NO: 9299 - DNA, 697 bp, Homo sapiens
  source 1..697: mol_type = unassigned DNA
tgggcacggagcctgctgcccggggcagcctccccggcaacttccgaaagatttccaagccgctgatggagaaaaagcgccgggcacgcatcaatgtgtcactggagcagctcaagtcgctgctggagaaacactactcgcaccagatccggaagcgcaaattggagaaggccgacatcctggagttgagcgtgaagtacatgagaagccttcagaactccttgcaagggctctggcctgtgcccaggggagccgagcaaccgtcgggcttccgcagctgcctgcccggcgtgagccagctccttcggcgcggagatgaggtcggcagcggcctgcgctgccccctggtgcccgagagcgccgccggcagcaccatggacagcgccgggttgggccaggaggcgcccgcgctgttccgcccttgcacccctgccgtctgggctcctgctccggccgccggcggcccgcggtccccaccacccctgctcctcctccccgaaagtctccctggctcgtccgccagcgtccccccgccgcagccagcgtcgagtcgctgcgccgagagtcccgggctgggcctgcgcgtgtggcggccctggggaagccccggggatgacctgaactgaaggcgctccctatttggtctcgcgacacagggactattttcagcacgcccacagtgactgccaggaccccc

SEQ ID NO: 9300 - DNA, 2461 bp, Homo sapiens
  source 1..2461: mol_type = unassigned DNA
ggaaagttgtgacggtcgagcttgagcctggcgggccgcggagcgttcacctgcggccgggaggcaaagtactagctctgtgattagattgaattctccaacaacaacatctcagattatggcaagaaagaaaaggagagggattatagagaaaaggcgtcgggatcggataaataacagtttatctgagttgagaagacttgtgccaactgcttttgaaaaacaaggatctgcaaagttagaaaaagctgaaatattgcaaatgacagtggatcatttgaagatgcttcaggcaacagggggtaaaggctactttgacgcacacgctcttgccatggacttcatgagcataggattccgagagtgcctaacagaagttgcgcggtacctgagctccgtggaaggcctggactcctcggatccgctgcgggtgcggcttgtgtctcatctcagcacttgcgccacccagcgggaggcggcggccatgacatcctccatggcccaccaccatcatccgctccacccgcatcactgggccgccgccttccaccacctgcccgcagccctgctccagcccaacggcctccatgcctcagagtcaaccccttgtcgcctctccacaacttcagaagtgcctcctgcccacggctctgctctcctcacggccacgtttgcccatgcggattcagccctccgaatgccatccacgggcagcgtcgccccctgcgtgccacctctctccacctctctcttgtccctctctgccaccgtccacgccgcagccgcagcagccaccgcggctgcacacagcttccctctgtccttcgcgggggcattccccatgcttcccccaaacgcagcagcagcagtggccgcggccacagccatcagcccgcccttgtcagtatcagccacgtccagtcctcagcagaccagcagtggaacaaacaataaaccttaccgaccctgggggacagaagttggagctttttaaatttttcttgaacttcttgcaatagtaactgaatgtcctccatttcagagtcagcttaaaacctctgcaccctgaaggtagccatacagatgccgacagatccacaaaggaacaataaagctatttgagacacaaacctcacgagtggaaatgtggtattctcttttttttctctcccttttttgtttggttcaaggcagctcggtaactgacatcagcaacttttgaaaacttcacacttgttaccatttagaagtttcctggaaaatatatggaccgtaccatccagcagtgcatcagtatgtctgaattggggaagtaaaatgccctgactgaattctcttgagactagatgggacatacatatatagagagagagtgagagagtcgtgtttcgtaagtgcctgagcttaggaagttttcttctggatatataacattgcacaagggaagacgagtgtggaggataggttaagaaaggaaagggacagaagtcttgcaataggctgcagacattttaataccatgccagagaagagtattctgctgaaaccaacaggttttactggtcaaaatgactgctgaaaataattttcaagttgaaagatctagttttatcttagtttgccttctttgtacagacatgccaagaggtgacatttagcagtgcattggtataagcaattatttcatcagttctcagattaacaagcatttctgctctgcctgcaggcccccaggcacttttttttttggatggctcaaaatatggtgctgctttatataaaccttacatttatatagtgcacctatgagcagttgcctaccatgtgtccaccagaggctatttaattcatgccaacttgaaaactctccagtttgtaggagtttggtttaatttattcagtttcattaggactatttttatatatttatcctcttcattttctcctaatgatgcaacatctattcttgtcaccctttgggagaagttacatttctggaggtgatgaagcaaggagggagcactaggaagagaaaagctacaatttttaaagctctttgtcaagttagtgattgcatttgatcccaaaacaagatgaatgtatgcaatgggatgtacataagttatttttgcccatgcctaaactagtgctatgtaatggggttgtggttttgtttttttcgatttcgtttaatgacaaaataatctcttaatatgctgaaatcaagcacgtgagagtttttgtttaaaagataagagacacagcatgtattatgcacttcatttctctactgtgtggagaaagcaataaacattatgagaatgttaaacgttatgcaaaattatacttttaaatatttgttttgaaattactgtacctagtcttttttgcattactttgtaacctttttctatgcaagagtctttacataccactaattaaatgaagtcctttttgacta

SEQ ID NO: 9301 - DNA, 2678 bp, Homo sapiens
  source 1..2678: mol_type = unassigned DNA
gggggggcgtggccggcgccggctcttgcggccgagcagagttgcggcgtgggaaagagccgctaggagcagaccgcgccgccgccggagccgcgcctgcccaggcccggggagggaggaggcgggcgtcagggtgctgcgccccgctcggcgtccgagcttccggccgggctgtgccccgcgcggtcttcgccgggatgaagcgcccctgcgaggagacgacctccgagagcgacatggacgagaccatcgacgtggggagcgagaacaattactcggggcaaagtactagctctgtgattagattgaattctccaacaacaacatctcagattatggcaagaaagaaaaggagagggattatagagaaaaggcgtcgggatcggataaataacagtttatctgagttgagaagacttgtgccaactgcttttgaaaaacaaggatctgcaaagttagaaaaagctgaaatattgcaaatgacagtggatcatttgaagatgcttcaggcaacagggggtaaaggctactttgacgcacacgctcttgccatggacttcatgagcataggattccgagagtgcctaacagaagttgcgcggtacctgagctccgtggaaggcctggactcctcggatccgctgcgggtgcggcttgtgtctcatctcagcacttgcgccacccagcgggaggcggcggccatgacatcctccatggcccaccaccatcatccgctccacccgcatcactgggccgccgccttccaccacctgcccgcagccctgctccagcccaacggcctccatgcctcagagtcaaccccttgtcgcctctccacaacttcagaagtgcctcctgcccacggctctgctctcctcacggccacgtttgcccatgcggattcagccctccgaatgccatccacgggcagcgtcgccccctgcgtgccacctctctccacctctctcttgtccctctctgccaccgtccacgccgcagccgcagcagccaccgcggctgcacacagcttccctctgtccttcgcgggggcattccccatgcttcccccaaacgcagcagcagcagtggccgcggccacagccatcagcccgcccttgtcagtatcagccacgtccagtcctcagcagaccagcagtggaacaaacaataaaccttaccgaccctgggggacagaagttggagctttttaaatttttcttgaacttcttgcaatagtaactgaatgtcctccatttcagagtcagcttaaaacctctgcaccctgaaggtagccatacagatgccgacagatccacaaaggaacaataaagctatttgagacacaaacctcacgagtggaaatgtggtattctcttttttttctctcccttttttgtttggttcaaggcagctcggtaactgacatcagcaacttttgaaaacttcacacttgttaccatttagaagtttcctggaaaatatatggaccgtaccatccagcagtgcatcagtatgtctgaattggggaagtaaaatgccctgactgaattctcttgagactagatgggacatacatatatagagagagagtgagagagtcgtgtttcgtaagtgcctgagcttaggaagttttcttctggatatataacattgcacaagggaagacgagtgtggaggataggttaagaaaggaaagggacagaagtcttgcaataggctgcagacattttaataccatgccagagaagagtattctgctgaaaccaacaggttttactggtcaaaatgactgctgaaaataattttcaagttgaaagatctagttttatcttagtttgccttctttgtacagacatgccaagaggtgacatttagcagtgcattggtataagcaattatttcatcagttctcagattaacaagcatttctgctctgcctgcaggcccccaggcacttttttttttggatggctcaaaatatggtgctgctttatataaaccttacatttatatagtgcacctatgagcagttgcctaccatgtgtccaccagaggctatttaattcatgccaacttgaaaactctccagtttgtaggagtttggtttaatttattcagtttcattaggactatttttatatatttatcctcttcattttctcctaatgatgcaacatctattcttgtcaccctttgggagaagttacatttctggaggtgatgaagcaaggagggagcactaggaagagaaaagctacaatttttaaagctctttgtcaagttagtgattgcatttgatcccaaaacaagatgaatgtatgcaatgggatgtacataagttatttttgcccatgcctaaactagtgctatgtaatggggttgtggttttgtttttttcgatttcgtttaatgacaaaataatctcttaatatgctgaaatcaagcacgtgagagtttttgtttaaaagataagagacacagcatgtattatgcacttcatttctctactgtgtggagaaagcaataaacattatgagaatgttaaacgttatgcaaaattatacttttaaatatttgttttgaaattactgtacctagtcttttttgcattactttgtaacctttttctatgcaagagtctttacataccactaattaaatgaagtcctttttgacta

SEQ ID NO: 9302 - DNA, 5989 bp, Homo sapiens
  source 1..5989: mol_type = unassigned DNA
gaggaaaggagggggctggaagagagtaaagggctgttgttaaacagtttcttaccgtaagagggagttcagacctagatctttccagttaatcacacaacaaacttagctcatcgcaataaaaagcagctcagagccgactggctcttttaggcactgactccgaacaggattctttcacccaggcatctcctccagagggatccgccagcccgtccagcagcaccatgtgggtgaccaaactcctgccagccctgctgctgcagcatgtcctcctgcatctcctcctgctccccatcgccatcccctatgcagagggacaaaggaaaagaagaaatacaattcatgaattcaaaaaatcagcaaagactaccctaatcaaaatagatccagcactgaagataaaaaccaaaaaagtgaatactgcagaccaatgtgctaatagatgtactaggaataaaggacttccattcacttgcaaggcttttgtttttgataaagcaagaaaacaatgcctctggttccccttcaatagcatgtcaagtggagtgaaaaaagaatttggccatgaatttgacctctatgaaaacaaagactacattagaaactgcatcattggtaaaggacgcagctacaagggaacagtatctatcactaagagtggcatcaaatgtcagccctggagttccatgataccacacgaacacagctttttgccttcgagctatcggggtaaagacctacaggaaaactactgtcgaaatcctcgaggggaagaagggggaccctggtgtttcacaagcaatccagaggtacgctacgaagtctgtgacattcctcagtgttcagaagttgaatgcatgacctgcaatggggagagttatcgaggtctcatggatcatacagaatcaggcaagatttgtcagcgctgggatcatcagacaccacaccggcacaaattcttgcctgaaagatatcccgacaagggctttgatgataattattgccgcaatcccgatggccagccgaggccatggtgctatactcttgaccctcacacccgctgggagtactgtgcaattaaaacatgcgctgacaatactatgaatgacactgatgttcctttggaaacaactgaatgcatccaaggtcaaggagaaggctacaggggcactgtcaataccatttggaatggaattccatgtcagcgttgggattctcagtatcctcacgagcatgacatgactcctgaaaatttcaagtgcaaggacctacgagaaaattactgccgaaatccagatgggtctgaatcaccctggtgttttaccactgatccaaacatccgagttggctactgctcccaaattccaaactgtgatatgtcacatggacaagattgttatcgtgggaatggcaaaaattatatgggcaacttatcccaaacaagatctggactaacatgttcaatgtgggacaagaacatggaagacttacatcgtcatatcttctgggaaccagatgcaagtaagctgaatgagaattactgccgaaatccagatgatgatgctcatggaccctggtgctacacgggaaatccactcattccttgggattattgccctatttctcgttgtgaaggtgataccacacctacaatagtcaatttagaccatcccgtaatatcttgtgccaaaacgaaacaattgcgagttgtaaatgggattccaacacgaacaaacataggatggatggttagtttgagatacagaaataaacatatctgcggaggatcattgataaaggagagttgggttcttactgcacgacagtgtttcccttctcgagacttgaaagattatgaagcttggcttggaattcatgatgtccacggaagaggagatgagaaatgcaaacaggttctcaatgtttcccagctggtatatggccctgaaggatcagatctggttttaatgaagcttgccaggcctgctgtcctggatgattttgttagtacgattgatttacctaattatggatgcacaattcctgaaaagaccagttgcagtgtttatggctggggctacactggattgatcaactatgatggcctattacgagtggcacatctctatataatgggaaatgagaaatgcagccagcatcatcgagggaaggtgactctgaatgagtctgaaatatgtgctggggctgaaaagattggatcaggaccatgtgagggggattatggtggcccacttgtttgtgagcaacataaaatgagaatggttcttggtgtcattgttcctggtcgtggatgtgccattccaaatcgtcctggtatttttgtccgagtagcatattatgcaaaatggatacacaaaattattttaacatataaggtaccacagtcatagctgaagtaagtgtgtctgaagcacccaccaatacaactgtcttttacatgaagatttcagagaatgtggaatttaaaatgtcacttacaacaatcctaagacaactactggagagtcatgtttgttgaaattctcattaatgtttatgggtgttttctgttgttttgtttgtcagtgttattttgtcaatgttgaagtgaattaaggtacatgcaagtgtaataacatatctcctgaagatacttgaatggattaaaaaaacacacaggtatatttgctggatgataaagatttcatgggaaaaaaaatcaattaatctgtctaagctgctttctgatgttggtttcttaataatgagtaaaccacaaattaaatgttattttaacctcaccaaaacaatttataccttgtgtccctaaattgtagccctatattaaattatattacatttcatatgctatatgttatagttcattcatttctcttcaccatgtatcctgcaatactggtacacgaacacactttttacaaaaccacatacccatgtacacatgcctaggtacacatgtgcatgcactacagtttaaattatggtgtacctaatgtaacccctaaatattttagaagtatgtacctatagttttacctcaaaaaaaccagaaatctctaaagaccagtagaaatattaaaaaatgatgcaagatcaaaatgattagctaattctccatacataatctgcagatgatcttctttggttggcatttcaggtgtggccatcacccagagttaaataacacctaatctaggtgtttacatgtattcattatcctagttatttcatgtagtttctaattcttaaaggaaagagggtaatagttctatttgtgtaatttgtttcctccaaacttaaggccacttatttacacaagatatttgtagatctattttcctaaagcatttcttaagtgctcagatcagtatctaattgaagaagtttaaaagtgttttggtcattaaaaatgtacttaaataggttaaatctaagccttgctgctgtgattggcttctagctcactgcctttaaattttaaaaaatttaagaggaaaatttccaagtctccaaagttttataaatacccttcatcaagtcatgcattaaagtatatattggagaaaaaaataaaaatacttttctcaacctggaagattttagcctaataaagcttttttgaagtaaaagacaacttgtaaaaggaaagaaactagtttgtctcaactctgtattcatttattttttttttgaagtagagtggaatctgttgaatcagatattttatcaagatatgtttattttttcttatttcattttacaaagttcactcctaatgccatatgtaacagacatttaaattttgtgttctgtataacagccaaattatcatatttatcattgtatttgtcatgcttagctaaagatcatgtatttgttgagaaatagaataacaaaaagtaataggataggctttgaatttttgcagaaatcttcctgtacaaaacacctttaaaaataattttttgaatggtgtgaatccagtagtcccatttctctgacttagttttcttgagtgatttttatcaaggccaagtccccaaacaattccctaccagctctttagagtactgttcaatctggactaaaatggttttaagtttatggagagcttagtccacagaatatagggcggcgagtccagaaatgcttatacaatttttttttcataataagatatgtgctggcatcaagaaacttaaagtggaagcaaaaagacatccaactagttgctggtctctatcatcttatctgatggtatttctattttccttatataatacaccattttagtaagaactcctagaaatttcaagagcatattgccaaaatataaagtatatttcatagtttcttctggctgaaccagtgaaattttattattgcatattaatgatatttgtaaaacttttataaaaattgtcataattttaaatactcacattttaaaaatacttctttaatgactcttcctctaaatttcctggaaatacagataaagattagctagatacaagatacagctaagtatttagacattttgaggctagtatttttcattttattaaaggctaaaaacaataccaccaataaatcatcaaacaaaccgtacaaagtaattctctctttgggaggctcctttcgtgatagagggacatgggtggaattgacaatgaaacttagatgaacaaggtccatgttattttaggtggtagaacagggtagagtcatgtcattatttgctggtggaagacactatttaccaggtgttctttgctgaataaatcattaaacatttttaaaaatccaacaatccactttattttgtgtcattgacaaaaggatcttttaaatcagaaggtttcaatgcaatttttggtttggctgtttgaataatggttatgtactgttataattgtagacattttctcacgtctaccaggaattgaagtgtaaaactaaaatatttttcataatgcctctgccgtgcagaaggaatgataatccttttgtatacttctttaattttattgtaaaatgtgtaatgacttttacctatatgctgtgggcaggtcctcagtaaaatctattgagtcaatttctagtattaacaggcttttgcttgctatctaagtgtttcaaattatgggaagtgtgagacactggaaggcaagaaaattaacaataatggcatgtgatagcaaaattgtatttcacttattcctgtgaatatttcttgttggtaccaatggtactgtacaaagtgaatgttatagccacaacattctcttgaaaagaacactgtcaagaagtgggaaattgctgtcaggcatttcattgttgtttttaaacttttttaaaagaaatactggttttgcaatatagagatcatgtggtaaagaattttaataagatcttatactaaaaagccttaaatcaatttattgagattcaaaaaatactattataattaattacatcccatacatataggcaaactcatttaaaaaataaaactaattttggtaaaagtacatggcctttgtttttaaaatacataattttaaaataaatcacttgtcatgataaagtccaaaaagaagttatcattcaacattcaactaaggttggagctaagaatttactaatacaaaaaaagttaaaattttttggaccatatatatcttgacagtgtaacttttaagtaggttcatttccatttgcacagaaagtttctgtctttaggaaactgaaaatgaaatactgtggatgctatgactgtttgtcttgtatgtaaataggaaattaataagctgcctattgagtggtatagctgtatgcttacccaaaaaagggaacactgtggttatgacttgtattataaactttctgtagttaataaagttgttatttttataaccatgattatattattattattaataaaatattttatcaaaatgct

SEQ ID NO: 9303 - DNA, 2249 bp, Homo sapiens
  source 1..2249: mol_type = unassigned DNA
taggcactgactccgaacaggattctttcacccaggcatctcctccagagggatccgccagcccgtccagcagcaccatgtgggtgaccaaactcctgccagccctgctgctgcagcatgtcctcctgcatctcctcctgctccccatcgccatcccctatgcagagggacaaaggaaaagaagaaatacaattcatgaattcaaaaaatcagcaaagactaccctaatcaaaatagatccagcactgaagataaaaaccaaaaaagtgaatactgcagaccaatgtgctaatagatgtactaggaataaaggacttccattcacttgcaaggcttttgtttttgataaagcaagaaaacaatgcctctggttccccttcaatagcatgtcaagtggagtgaaaaaagaatttggccatgaatttgacctctatgaaaacaaagactacattagaaactgcatcattggtaaaggacgcagctacaagggaacagtatctatcactaagagtggcatcaaatgtcagccctggagttccatgataccacacgaacacagctatcggggtaaagacctacaggaaaactactgtcgaaatcctcgaggggaagaagggggaccctggtgtttcacaagcaatccagaggtacgctacgaagtctgtgacattcctcagtgttcagaagttgaatgcatgacctgcaatggggagagttatcgaggtctcatggatcatacagaatcaggcaagatttgtcagcgctgggatcatcagacaccacaccggcacaaattcttgcctgaaagatatcccgacaagggctttgatgataattattgccgcaatcccgatggccagccgaggccatggtgctatactcttgaccctcacacccgctgggagtactgtgcaattaaaacatgcgctgacaatactatgaatgacactgatgttcctttggaaacaactgaatgcatccaaggtcaaggagaaggctacaggggcactgtcaataccatttggaatggaattccatgtcagcgttgggattctcagtatcctcacgagcatgacatgactcctgaaaatttcaagtgcaaggacctacgagaaaattactgccgaaatccagatgggtctgaatcaccctggtgttttaccactgatccaaacatccgagttggctactgctcccaaattccaaactgtgatatgtcacatggacaagattgttatcgtgggaatggcaaaaattatatgggcaacttatcccaaacaagatctggactaacatgttcaatgtgggacaagaacatggaagacttacatcgtcatatcttctgggaaccagatgcaagtaagctgaatgagaattactgccgaaatccagatgatgatgctcatggaccctggtgctacacgggaaatccactcattccttgggattattgccctatttctcgttgtgaaggtgataccacacctacaatagtcaatttagaccatcccgtaatatcttgtgccaaaacgaaacaattgcgagttgtaaatgggattccaacacgaacaaacataggatggatggttagtttgagatacagaaataaacatatctgcggaggatcattgataaaggagagttgggttcttactgcacgacagtgtttcccttctcgagacttgaaagattatgaagcttggcttggaattcatgatgtccacggaagaggagatgagaaatgcaaacaggttctcaatgtttcccagctggtatatggccctgaaggatcagatctggttttaatgaagcttgccaggcctgctgtcctggatgattttgttagtacgattgatttacctaattatggatgcacaattcctgaaaagaccagttgcagtgtttatggctggggctacactggattgatcaactatgatggcctattacgagtggcacatctctatataatgggaaatgagaaatgcagccagcatcatcgagggaaggtgactctgaatgagtctgaaatatgtgctggggctgaaaagattggatcaggaccatgtgagggggattatggtggcccacttgtttgtgagcaacataaaatgagaatggttcttggtgtcattgttcctggtcgtggatgtgccattccaaatcgtcctggtatttttgtccgagtagcatattatgcaaaatggatacacaaaattattttaacatataaggtaccacagtcatag

SEQ ID NO: 9304 - DNA, 1184 bp, Homo sapiens
  source 1..1184: mol_type = unassigned DNA
caggattctttcacccaggcatctcctccagagggatccgccagcccgtccagcagcaccatgtgggtgaccaaactcctgccagccctgctgctgcagcatgtcctcctgcatctcctcctgctccccatcgccatcccctatgcagagggacaaaggaaaagaagaaatacaattcatgaattcaaaaaatcagcaaagactaccctaatcaaaatagatccagcactgaagataaaaaccaaaaaagtgaatactgcagaccaatgtgctaatagatgtactaggaataaaggacttccattcacttgcaaggcttttgtttttgataaagcaagaaaacaatgcctctggttccccttcaatagcatgtcaagtggagtgaaaaaagaatttggccatgaatttgacctctatgaaaacaaagactacattagaaactgcatcattggtaaaggacgcagctacaagggaacagtatctatcactaagagtggcatcaaatgtcagccctggagttccatgataccacacgaacacagctttttgccttcgagctatcggggtaaagacctacaggaaaactactgtcgaaatcctcgaggggaagaagggggaccctggtgtttcacaagcaatccagaggtacgctacgaagtctgtgacattcctcagtgttcagaagttgaatgcatgacctgcaatggggagagttatcgaggtctcatggatcatacagaatcaggcaagatttgtcagcgctgggatcatcagacaccacaccggcacaaattcttgcctgaaagatatcccgacaagggctttgatgataattattgccgcaatcccgatggccagccgaggccatggtgctatactcttgaccctcacacccgctgggagtactgtgcaattaaaacatgcgagacataacatgggctctcaactgatggtgaacttcttctggtgagtgacagaggctgcagtgaagaataatgagtctaatagaagtttatcacagatgtctctaatctttatagctgatccctacctctctcgctgtctttgtacccagcctgcattctgtttcgatctgtcttttagcagtccatacaatcatttttctacatgctggcccttacctagcttttctgaatttacaataaaaactattttttaacgtg

SEQ ID NO: 9305 - DNA, 1111 bp, Homo sapiens
  source 1..1111: mol_type = unassigned DNA
ggcatctcctccagagggatccgccagcccgtccagcagcaccatgtgggtgaccaaactcctgccagccctgctgctgcagcatgtcctcctgcatctcctcctgctccccatcgccatcccctatgcagagggacaaaggaaaagaagaaatacaattcatgaattcaaaaaatcagcaaagactaccctaatcaaaatagatccagcactgaagataaaaaccaaaaaagtgaatactgcagaccaatgtgctaatagatgtactaggaataaaggacttccattcacttgcaaggcttttgtttttgataaagcaagaaaacaatgcctctggttccccttcaatagcatgtcaagtggagtgaaaaaagaatttggccatgaatttgacctctatgaaaacaaagactacattagaaactgcatcattggtaaaggacgcagctacaagggaacagtatctatcactaagagtggcatcaaatgtcagccctggagttccatgataccacacgaacacagctatcggggtaaagacctacaggaaaactactgtcgaaatcctcgaggggaagaagggggaccctggtgtttcacaagcaatccagaggtacgctacgaagtctgtgacattcctcagtgttcagaagttgaatgcatgacctgcaatggggagagttatcgaggtctcatggatcatacagaatcaggcaagatttgtcagcgctgggatcatcagacaccacaccggcacaaattcttgcctgaaagatatcccgacaagggctttgatgataattattgccgcaatcccgatggccagccgaggccatggtgctatactcttgaccctcacacccgctgggagtactgtgcaattaaaacatgcgagacataacatgggctctcaactgatggtgaacttcttctggtgagtgacagaggctgcagtgaagaataatgagtctaatagaagtttatcacagatgtctctaatctttatagctgatccctacctctctcgctgtctttgtacccagcctgcattctgtttcgatctgtcttttagcagtccatacaatcatttttctacatgctggcccttacc

SEQ ID NO: 9306 - DNA, 1990 bp, Homo sapiens
  source 1..1990: mol_type = unassigned DNA
cacacaacaaacttagctcatcgcaataaaaagcagctcagagccgactggctcttttaggcactgactccgaacaggattctttcacccaggcatctcctccagagggatccgccagcccgtccagcagcaccatgtgggtgaccaaactcctgccagccctgctgctgcagcatgtcctcctgcatctcctcctgctccccatcgccatcccctatgcagagggacaaaggaaaagaagaaatacaattcatgaattcaaaaaatcagcaaagactaccctaatcaaaatagatccagcactgaagataaaaaccaaaaaagtgaatactgcagaccaatgtgctaatagatgtactaggaataaaggacttccattcacttgcaaggcttttgtttttgataaagcaagaaaacaatgcctctggttccccttcaatagcatgtcaagtggagtgaaaaaagaatttggccatgaatttgacctctatgaaaacaaagactacattagaaactgcatcattggtaaaggacgcagctacaagggaacagtatctatcactaagagtggcatcaaatgtcagccctggagttccatgataccacacgaacacagctttttgccttcgagctatcggggtaaagacctacaggaaaactactgtcgaaatcctcgaggggaagaagggggaccctggtgtttcacaagcaatccagaggtacgctacgaagtctgtgacattcctcagtgttcagaaggtaaataaacctgaatgccatgtgggccattctattccccctatgtgtagaactgtaactcacattaaaggttaacagcaacgaatcaatcataacaaatatgttgttcgtgcaaatgcaactacaaataattatttaaacatttttatacaatgtttttaaaactgttggattatcaccagattaatgcaaaataacagagcgagttatcagtttgaatttcaacactgcctgagacatccctctggggaaagtgaaagagagggtttacttacctactgtcttgagctcacatacctcaaaatctactactgtgtggcacctgaaaggagttgaatgaagcttagcctttcattagcaatgttaattctattcaaccagcacctgcttccacagaaattctgtccaaactatcatgaagtggtgtgacaagggtatatggacccagaagataatacaatataagaagggatcactggaagcttgaccccatgcacattttggtgaaaatgtgcctagaatcaaatgtgacacgtaggctggaactgagtaccattcagaataggatctgaagagatcaaagcaatggagaccaccaaactgtcttgaaggcatgtctatggaccttaagtccatgtctatgttttcagctcttctcacagcataaaagggcattgtccttacttttgcagtggaaaactgaatggctgacaagatggaagagtaaccatttcagcattgtatgtggtttcatttttcttagttatctggctactgaatagccggatttttcagttctgtcagaaactctaaatttccaaaaatctaagtgaaacatggatgaaactctgttagaaaattgttaggattttggagtatttggggagggggactactggaatgctgtccaagttttatactaagatatcttacctgtttgttattaaccaaatatttttaaaaatatttcctccataaatattcatttaatattaggttgatatttatcacataaaaagtaaaggctactgttagctaattgtcacagagaaggatttgttttctgttgttagtgaatttgaaatccttgactttatgtgctacagccagttccatctctgtttgtaaattcttactttccattccatatcatattctgttccctataacctcttcattgttttcttttcttttaaaaataataaacttttctatgatcacgttttgaaca

SEQ ID NO: 9307 - DNA, 842 bp, Homo sapiens
  source 1..842: mol_type = unassigned DNA
gggatccgccagcccgtccagcagcaccatgtgggtgaccaaactcctgccagccctgctgctgcagcatgtcctcctgcatctcctcctgctccccatcgccatcccctatgcagagggacaaaggaaaagaagaaatacaattcatgaattcaaaaaatcagcaaagactaccctaatcaaaatagatccagcactgaagataaaaaccaaaaaagtgaatactgcagaccaatgtgctaatagatgtactaggaataaaggacttccattcacttgcaaggcttttgtttttgataaagcaagaaaacaatgcctctggttccccttcaatagcatgtcaagtggagtgaaaaaagaatttggccatgaatttgacctctatgaaaacaaagactacattagaaactgcatcattggtaaaggacgcagctacaagggaacagtatctatcactaagagtggcatcaaatgtcagccctggagttccatgataccacacgaacacagctatcggggtaaagacctacaggaaaactactgtcgaaatcctcgaggggaagaagggggaccctggtgtttcacaagcaatccagaggtacgctacgaagtctgtgacattcctcagtgttcagaaggtaaataaacctgaatgccatgtgggccattctattccccctatgtgtagaactgtaactcacattaaaggttaacagcaacgaatcaatcataacaaatatgttgttcgtgcaaatgcaactacaaataattatttaaacatttttatacaatgtttttaaaactgttggattatcaccagattaatgcaaaataacagagcg

SEQ ID NO: 9308 - DNA, 721 bp, Homo sapiens
  source 1..721: mol_type = unassigned DNA
gaaatctagtatattgtcaagtaaaatcactttcttgtagatgatccttaggattttttttatatatgagccttaaaaacatttctccaatgtttatttttttaaaacattttgtatttaatagagggacaaaggaaaagaagaaatacaattcatgaattcaaaaaatcagcaaagactaccctaatcaaaatagatccagcactgaagataaaaaccaaaaaagtgaatactgcagaccaatgtgctaatagatgtactaggaataaaggacttccattcacttgcaaggcttttgtttttgataaagcaagaaaacaatgcctctggttccccttcaatagcatgtcaagtggagtgaaaaaagaatttggccatgaatttgacctctatgaaaacaaagactacattagaaactgcatcattggtaaaggacgcagctacaagggaacagtatctatcactaagagtggcatcaaatgtcagccctggagttccatgataccacacgaacacaggtaagaacagtatgaagaaaagagatgaagcctctgtcttttttacatgttaacagtctcatattagtccttcagaataattctacaatcctaaaataacttagccaacttgctgaattgtattacggcaaggtttatatgaattcatgactgatatttagcaaatgattaattaatatgttaataaaatgtagccaaaacaa

SEQ ID NO: 9309 - DNA, 590 bp, Homo sapiens
  source 1..590: mol_type = unassigned DNA
attgggctcagccttgctcctcccttccttactcggataggagccactgggatctggagctccagcttccaaattgaagctggcctcaggccaggtgaccttttctttgattctttcacccaggcatctcctccagagggatccgccagcccgtccagcagcaccatgtgggtgaccaaactcctgccagccctgctgctgcagcatgtcctcctgcatctcctcctgctccccatcgccatcccctatgcagagggacaaaggaaaagaagaaatacaattcatgaattcaaaaaatcagcaaagactaccctaatcaaaatagatccagcactgaagataaaaaccaaaaaagtgaatactgcagaccaatgtgctaatagatgtactaggaataaaggacttccattcacttgcaaggcttttgtttttgataaagcaagaaaacaatgcctctggttccccttcaatagcatgtcaagtggagtgaaaaaagaatttggccatgaatttgacctctatgaaaacaaagactacattagaaactgcatcattggtaaaggacgcagctacaagggaacagtatctat

SEQ ID NO: 9310 - DNA, 545 bp, Homo sapiens
  source 1..545: mol_type = unassigned DNA
attgagcgaattggtcccctgcctgtgccttgatttagccattgggctcagccttgctcctcccttccttactcggataggagccactgggatctggagctccagcttccaaattgaagctggcctcaggccaggtgaccttttctttgcatctcctccagagggatccgccagcccgtccagcagcaccatgtgggtgaccaaactcctgccagccctgctgctgcagcatgtcctcctgcatctcctcctgctccccatcgccatcccctatgcagagggacaaaggaaaagaagaaatacaattcatgaattcaaaaaatcagcaaagactaccctaatcaaaatagatccagcactgaagataaaaaccaaaaaagtgaatactgcagaccaatgtgctaatagatgtactaggaataaaggacttccattcacttgcaaggcttttgtttttgataaagcaagaaaacaatgcctctggttccccttcaatagcatgtcaagtggagtgaaaaaagaatttggccatgaatttgacctct

SEQ ID NO: 9311 - DNA, 1425 bp, Homo sapiens
  source 1..1425: mol_type = unassigned DNA
atgtgggtgaccaaactcctgccagccctgctgctgcagcatgtcctcctgcatctcctcctgctccccatcgccatcccctatgcagagggacaaaggaaaagaagaaatacaattcatgaattcaaaaaatcagcaaagactaccctaatcaaaatagatccagcactgaagataaaaaccaaaaaagtgaatactgcagaccaatgtgctaatagatgtactaggaataaaggacttccattcacttgcaaggcttttgtttttgataaagcaagaaaacaatgcctctggttccccttcaatagcatgtcaagtggagtgaaaaaagaatttggccatgaatttgacctctatgaaaacaaagactacattagaaactgcatcattggtaaaggacgcagctacaagggaacagtatctatcactaagagtggcatcaaatgtcagccctggagttccatgataccacacgaacacagtggtggtgatgactgccttgttgaatccactttttattctattccattttggggacacaattctgcaagatgattcttcattaggaaacagagatgagttattgaccaacacagaaagaaaaagagtttgttgctccacactgggattaaacctatgatcttggcctaattaacactagctagtaagtgtccaagctgatcatctctacaacatttcaataacagaaaacaacaattttcaaaattagttacttacaattatgtagaaatgcctctaaaacacagtattttccttatattacaaaaacaaaaattataattggttttgtcctcttttgagagtttgcatggtgttactccctgcatagtgaagaaaacattttatttaagtagatggatctaagtttttcatgaacaaaggaatgacatttgaaatcaatcctaccctagtccaggagaatgcattagattaacctagtagaggtcttatttcaccctgagttttctatgatcgtgattctctgctggaggagtaattgtgaaatagatctctctgggaactggcttcctagtccaatcagctcttttaccaatgaacacttccttgtgatatagatgtttatggccgagaggatccagtatattaataaaatccctttttgtattcaatgagggaaacacataattttcatcaattagcagcttattggaatatctgcatgatggtttaacacttttaagtgttgactaaagattaattttacagaaaatagaaaaagaaatatgtttctgtctggaggaatgatttattgttgacccctaaattgaaatattttactagtggcttaatggaaagatgatgaaagatgatgaaattaatgtagaagcttaactagaaaatcaggtgacctgatatctacatctgtatccttcattggccacc

SEQ ID NO: 9312 - DNA, 587 bp, Homo sapiens
  source 1..587: mol_type = unassigned DNA
ctcccttctatgaggaatggagcacctgggccttgccatgttggtcaggccttgtcctctctctggacctgtttccccatgtttaacaaggagggagagctgacctggggctctccgagacccagacatagccccaagacctgactggccaggtgggtaaggctgctgacccaccatgtcctctttcctttggcctcttgtcccgctgcccatgctttcctggaccggataggcctctctgtcagtgcagatgtcccgtagggtccgggccctgtttggagccatgaacttctgggccatcatcatgtacaaccttgtgagcctgaacagcctcaaattcacagagctggttgcccggcgcctgctactcacagggttcccccagaccacgctgtccatcctgtttgtcacctactgtggcgtccagctggtaaaggagcgtgagcgaaccttggcactggaggaggagcagaagcaggacaaagagaagccggagtaggagggagcgggtagagggatgggctctgctcagctattcttgggccagatggggcctgaccgatagaataaaagacttttctacaaca

SEQ ID NO: 9313 - DNA, 702 bp, Homo sapiens
  source 1..702: mol_type = unassigned DNA
gaggaggagctgctacgtgaggtcaggaatgttgaatgcacccagggtgacagtgttgaggaggacgccctgttgtgtgtcctctcccatctcatccctgccctttcccacactcccagtggcccttctcccatctttcctgcagatatgtgtataaccacattggtggggagcattccgctgtgatcccagagctggcagccacagtggccacatttgccatcaccacactgtggcttgggccttgtgacattgtctacctgtggtcattccttaactgctttggcctcaactttgagctctggatgcaaaaactggcagagtgggggcccctagcacgaattgaggcctctctgtcagtgcagatgtcccgtagggtccgggccctgtttggagccatgaacttctgggccatcatcatgtacaaccttgtgagcctgaacagcctcaaattcacagagctggttgcccggcgcctgctactcacagggttcccccagaccacgctgtccatcctgtttgtcacctactgtggcgtccagctggtaaaggagcgtgagcgaaccttggcactggaggaggagcagaagcaggacaaagagaagccggagtaggagggagcgggtagagggatgggctctgctcagctattcttgggccagatggggcctgaccgatagaataaaagacttttctacaaca

SEQ ID NO: 9314 - DNA, 461 bp, Homo sapiens
  source 1..461: mol_type = unassigned DNA
cgtcctctttggtgttgtcaacactgtggcatgcctcgaccacctggacccaccccagcctcccaagtgcatcaccgcactctacgtctttgcggaaacgcactttgaccgtggcatcaacgactggctttgcaaggtccgggccctgtttggagccatgaacttctgggccatcatcatgtacaaccttgtgagcctgaacagcctcaaattcacagagctggttgcccggcgcctgctactcacagggttcccccagaccacgctgtccatcctgtttgtcacctactgtggcgtccagctggtaaaggagcgtgagcgaaccttggcactggaggaggagcagaagcaggacaaagagaagccggagtaggagggagcgggtagagggatgggctctgctcagctattcttgggccagatggggcctgaccgatagaataaaagacttttctacaaca

SEQ ID NO: 9315 - DNA, 1750 bp, Homo sapiens
  source 1..1750: mol_type = unassigned DNA
agggcctgaatacacagagcgctgagagagtggggcagtgtggtcacggacacaggtcatgggggccttggcaggagcggttttggcagagggtggggccggtgcctctggaaggtatgaagatgtaaatgaagccctgtccaggctatgggcatcaagacagcattgccggcggctgagctgggcctctactctctggtgctgagtggggccctggcctatgctggccggggcctccttgaggcttcacaagatggggcccacaggaaggccttccgggagtctgtgcgacctggctgggagtacattggccggaagatggatgtggctgacttcgagtgggtgatgtggttcacctcctttcgcaacgtcatcatctttgccctctccggacatgtgctgtttgctaaactctgcacgatggttgccccaaagctccgctcctggatgtatgctgtgtacggggccttggctgtgatgggcacaatgggcccttggtacctgctgctgctgcttggtcactgtgtgggcctctatgtggcctcgcttttgggccagccctggctctgtcttggccttggcttggccagcctggcctccttcaagatggaccccctaatctcttggcagagcgggtttgtaacaggcacttttgatcttcaagaggtgctgtttcatgggggcagcagcttcacagtgctgcgttgcaccagctttgcactggagagctgtgcccaccctgaccgccactactccttagctgacctgctcaagtacaacttctacctgcccttcttcttcttcgggcccatcatgacctttgatcgcttccatgctcaggtgagccaggtggagccagtgagacgcgagggtgagctgtggcacatccgagcccaggcaggcctaagcgtggtggccatcatggccgtcgacatcttctttcacttcttctacatcctcactatccccagcgacctcaagttcgccaaccgcctcccagacagtgccctcgctggcctagcctattcaaacctggtgtatgactgggtgaaggcggccgtcctctttggtgttgtcaacactgtggcatgcctcgaccacctggacccaccccagcctcccaagtgcatcaccgcactctacgtctttgcggaaacgcactttgaccgtggcatcaacgactggctttgcaaatatgtgtataaccacattggtggggagcattccgctgtgatcccagagctggcagccacagtggccacatttgccatcaccacactgtggcttgggccttgtgacattgtctacctgtggtcattccttaactgctttggcctcaactttgagctctggatgcaaaaactggcagagtgggggcccctagcacgaattgaggcctctctgtcagtgcagatgtcccgtagggtccgggccctgtttggagccatgaacttctgggccatcatcatgtacaaccttgtgagcctgaacagcctcaaattcacagagctggttgcccggcgcctgctactcacagggttcccccagaccacgctgtccatcctgtttgtcacctactgtggcgtccagctggtaaaggagcgtgagcgaaccttggcactggaggaggagcagaagcaggacaaagagaagccggagtaggagggagcgggtagagggatgggctctgctcagctattcttgggccagatggggcctgaccgatagaataaaagacttttctacaaca

SEQ ID NO: 9316 - DNA, 1865 bp, Homo sapiens
  source 1..1865: mol_type = unassigned DNA
agcagctctgcagcactcggctctgctccactctgctcagctccgctccaggaaggccacctcctcctccccctcctcctcccgctgtcaccactcaccgctcataacctcaagggggtggggaccccagggctggacacaccccaccgtggccccagagctcagccggtcgcacggacggacagttggaagccggaccccagagcctgaggtgggcagtgtgccagggtcccttgcggcctcctcaagccctgtccaggctatgggcatcaagacagcattgccggcggctgagctgggcctctactctctggtgctgagtggggccctggcctatgctggccggggcctccttgaggcttcacaagatggggcccacaggaaggccttccgggagtctgtgcgacctggctgggagtacattggccggaagatggatgtggctgacttcgagtgggtgatgtggttcacctcctttcgcaacgtcatcatctttgccctctccggacatgtgctgtttgctaaactctgcacgatggttgccccaaagctccgctcctggatgtatgctgtgtacggggccttggctgtgatgggcacaatgggcccttggtacctgctgctgctgcttggtcactgtgtgggcctctatgtggcctcgcttttgggccagccctggctctgtcttggccttggcttggccagcctggcctccttcaagatggaccccctaatctcttggcagagcgggtttgtaacaggcacttttgatcttcaagaggtgctgtttcatgggggcagcagcttcacagtgctgcgttgcaccagctttgcactggagagctgtgcccaccctgaccgccactactccttagctgacctgctcaagtacaacttctacctgcccttcttcttcttcgggcccatcatgacctttgatcgcttccatgctcaggtgagccaggtggagccagtgagacgcgagggtgagctgtggcacatccgagcccaggcaggcctaagcgtggtggccatcatggccgtcgacatcttctttcacttcttctacatcctcactatccccagcgacctcaagttcgccaaccgcctcccagacagtgccctcgctggcctagcctattcaaacctggtgtatgactgggtgaaggcggccgtcctctttggtgttgtcaacactgtggcatgcctcgaccacctggacccaccccagcctcccaagtgcatcaccgcactctacgtctttgcggaaacgcactttgaccgtggcatcaacgactggctttgcaaatatgtgtataaccacattggtggggagcattccgctgtgatcccagagctggcagccacagtggccacatttgccatcaccacactgtggcttgggccttgtgacattgtctacctgtggtcattccttaactgctttggcctcaactttgagctctggatgcaaaaactggcagagtgggggcccctagcacgaattgaggcctctctgtcagtgcagatgtcccgtagggtccgggccctgtttggagccatgaacttctgggccatcatcatgtacaaccttgtgagcctgaacagcctcaaattcacagagctggttgcccggcgcctgctactcacagggttcccccagaccacgctgtccatcctgtttgtcacctactgtggcgtccagctggtaaaggagcgtgagcgaaccttggcactggaggaggagcagaagcaggacaaagagaagccggagtaggagggagcgggtagagggatgggctctgctcagctattcttgggccagatggggcctgaccgatagaataaaagacttttctacaaca

SEQ ID NO: 9317 - DNA, 704 bp, Homo sapiens
  source 1..704: mol_type = unassigned DNA
gaggacggagctgggtttgagcagggataggggaatctgtcaatcaagtgacatggctagtagcaattgcatatacaaatcaggagagactgggctaaagacacagatttaggggtcatcgtcatagagctagtacttgaaatcttgggtctggatgagatcatttgggaagtaaacgaacagagatagagaagctataatgtcccaggctgagcctgccacaatttgaagttggttggaggaggagctgctacgtgaggtcaggaatgttgaatgcacccagggtgacagtgttgaggaggacgccctgttgtgtgtcctctcccatctcatccctgccctttcccacactcccagtggcccttctcccatctttcctgcagatatgtgtataaccacattggtggggagcattccgctgtgatcccagagctggcagccacagtggccacatttgccatcaccacactgtggcttgggccttgtgacattgtctacctgtggtcattccttaactgctttggcctcaactttgagctctggatgcaaaaactggcagagtgggggcccctagcacgaattgaggcctctctgtcagtgcagatgtcccgtagggtccgggccctgtttggagccatgaacttctgggccatcatcatgtacaaccttgtgagcctgaacagcctcaaattcacagagctggt

SEQ ID NO: 9318 - DNA, 996 bp, Homo sapiens
  source 1..996: mol_type = unassigned DNA
aggaaggccacctcctcctccccctcctcctcccgctgtcaccactcaccgctcataacctcaagggggtggggaccccagggctggacacaccccaccgtggccccagagctcagccggtcgcacggacggacagttggaagccggaccccagagcctgaggtgggcagtgtgccagggtcccttgcggcctcctcaagccctgtccaggctatgggcatcaagacagcattgccggcggctgagctgggcctctactctctggtgctgagtggggccctggcctatgctggccggggcctccttgaggcttcacaagatggggcccacaggaaggccttccgggagtctgtgcgacctggctgggagtacattggccggaagatggatgtggctgacttcgagtgggtgatgtggttcacctcctttcgcaacgtcatcatctttgccctctccggacatgtgctgtttgctaaactctgcacgatggttgccccaaagagcgggtttgtaacaggcacttttgatcttcaagaggtgctgtttcatgggggcagcagcttcacagtgctgcgttgcaccagctttgcactggagagctgtgcccaccctgaccgccactactccttagctgacctgctcaagtacaacttctacctgcccttcttcttcttcgggcccatcatgacctttgatcgcttccatgctcaggtgagccaggtggagccagtgagacgcgagggtgagctgtggcacatccgagcccaggcaggcctaagcgtggtggccatcatggccgtcgacatcttctttcacttcttctacatcctcactatccccagcgacctcaagttcgccaaccgcctcccagacagtgccctcgctggcctagcctattcaaacctggtgtatgactgggtgaaggcggccgtcctctttggtgttgtcaacactgtggcatgcctcgaccacctggacccaccccagcctcccaag

SEQ ID NO: 9319 - DNA, 915 bp, Homo sapiens
  source 1..915: mol_type = unassigned DNA
agctctgcagcactcggctctgctccactctgctcagctccgctccaggaaggccacctcctcctccccctcctcctcccgctgtcaccactcaccgctcataacctcaagggggtggggaccccagggctggacacaccccaccgtggccccagagctcagccggtcgcacggacggacagttggaagccggaccccagagcctgagccctgtccaggctatgggcatcaagacagcattgccggcggctgagctgggcctctactctctggtgctgagtggggccctggcctatgctggccggggcctccttgaggcttcacaagatggggcccacaggaaggccttccgggagtctgtgcgacctggctgggagtacattggccggaagatggatgtggctgacttcgagtgggtgatgtggttcacctcctttcgcaacgtcatcatctttgccctctccggacatgtgctgtttgctaaactctgcacgatggttgccccaaagctccgctcctggatgtatgctgtgtacggggccttggctgtgatgggcacaatgggcccttggtacctgctgctgctgcttggtcactgtgtgggcctctatgtggcctcgcttttgggccagccctggctctgtcttggccttggcttggccagcctggcctccttcaagatggaccccctaatctcttggcagagcgggtttgtaacaggcacttttgatcttcaagaggtgctgtttcatgggggcagcagcttcacagtgctgcgttgcaccagctttgcactggagagctgtgcccaccctgaccgccactactccttagctgacctgctcaagtacaacttctacctgcccttcttcttcttcgggcccatcatgacctttgatcgcttccatgctcagg

SEQ ID NO: 9320 - DNA, 690 bp, Homo sapiens
  source 1..690: mol_type = unassigned DNA
cacgcaggtcatgggggccttggcaggagcggttttggcagagggtggggccggtgcctctggaagccctgtccaggctatgggcatcaagacagcattgccggcggctgagctgggcctctactctctggtgctgagtggggccctggcctatgctggccggggcctccttgaggcttcacaagatggggcccacaggaaggccttccgggagtctgtgcgacctggctgggagtacattggccggaagatggatgtggctgacttcgagtgggtgatgtggttcacctcctttcgcaacgtcatcatctttgccctctccggacatgtgctgtttgctaaactctgcacgatggttgccccaaagctccgctcctggatgtatgctgtgtacggggccttggctgtgatgggcacaatgggcccttggtacctgctgctgctgcttggtcactgtgtgggcctctatgtggcctcgcttttgggccagccctggctctgtcttggccttggcttggccagcctggcctccttcaagatggaccccctaatctcttggcagagcgggtttgtaacaggcacttttgatcttcaagaggtgctgtttcatgggggcagcagcttcacagtgctgcgttgcaccagctttgcactggagagctgtgcccaccctgaccgccactactcctt

SEQ ID NO: 9321 - DNA, 487 bp, Homo sapiens
  source 1..487: mol_type = unassigned DNA
agttggaagccggaccccagagcctgaggtgggcagtgtgccagggtcccttgcggcctcctcaaggtcatgggggccttggcaggagcggttttggcagagggtggggccggtgcctctggaagccctgtccaggctatgggcatcaagacagcattgccggcggctgagctgggcctctactctctggtgctgagtggggccctggcctatgctggccggggcctccttgaggcttcacaagatggggcccacaggaaggccttccgggagtctgtgcgacctggctgggagtacattggccggaagatggatgtggctgacttcgagtgggtgatgtggttcacctcctttcgcaacgtcatcatctttgccctctccggacatgtgctgtttgctaaactctgcacgatggttgccccaaagagcgggtttgtaacaggcacttttgatcttcaagaggtgctgtttcatgggggcagcagct

SEQ ID NO: 9322 - DNA, 491 bp, Homo sapiens
  source 1..491: mol_type = unassigned DNA
agttggaagccggaccccagagcctgaggtgggcagtgtgccagggtcccttgcggcctcctcaaggtcatgggggccttggcaggagcggttttggcagagggtggggccggtgcctctggaagccctgtccaggctatgggcatcaagacagcattgccggcggctgagctgggcctctactctctggtgctgagtggggccctggcctatgctggccggggcctccttgaggcttcacaagatggggcccacaggaaggccttccgggagtctgtgcgacctggctgggagtacattggccggaagatggatgtggctgacttcgagtgggtgatgtggttcacctcctttcgcaacgtcatcatctttgccctctccggacatgtgctgtttgctaaactctgcacgatggttgccccaaagctccgctcctggatgtatgctgtgtacggggccttggctgtgatgggcacaatgggcccttggta

SEQ ID NO: 9323 - DNA, 690 bp, Homo sapiens
  source 1..690: mol_type = unassigned DNA
agggcctgaatacacagagcgctgagagagtggggcagtgtggtcacggacacaggcagggactgggatgtgacaggctggagctcagggacttgttgggggaatgggggtcagtgacaggctggaggcttaatgcgaggatggaggcttggctctaggggcagcacctggggtggtcatgggatctcagggaggggagtgggagtcagagaaagggtcttagagaagctggggctttgtgaggagctaagggagactcactgatcgaggtggggaccctgcaggcagaaacctgactgtagtgatagaggtggggtttctccgcacgcaggtcatgggggccttggcaggagcggttttggcagagggtggggccggtgcctctggaaggtatgaagatgtaaatgaagccctgtccaggctatgggcatcaagacagcattgccggcggctgagctgggcctctactctctggtgctgagtggggccctggcctatgctggccggggcctccttgaggcttcacaagatggggcccacaggaaggccttccgggagtctgtgcgacctggctgggagtacattggccggaagatggatgtggctgacttcgagtgggtgatgtggttcacctcctttcgcaacgtcatcatctttgccctctccggacatgtgctgtttgctaaactc

SEQ ID NO: 9324 - DNA, 10072 bp, Homo sapiens
  source 1..10072: mol_type = unassigned DNA
tcgcgcgggggccgccccctccccttccctccaccctgggcgggggcgcgcgagaagcggtgacgtcaaggggcgcgctgtggcagcacctccccgcgcgctagttaaaaagaagaagaaaagagggaacgaaacatgagaggctgtgtgagaagctgcagccgccggcagaggagacctcagcatcatctagagcccagcgctggccctgcctccgcctgccccgccgccgccgtcgccgtttctgttcctgctactgtcccacctaaacaactcccgttacacggacaagtgaacatctgtggctgtcctctccttttcttcctcctcttccaactccttctcctcctcccacttcccagccgcagcagaaagcccccaacccaactgacactggcacaactgcaaacggtgtcatccgcacaactttatctcgctcctcgggctcccctaaggcattggacccatcgccgcgtcttttattttttgcaaagttgcatcgctgtacatatttttgtccccgccacctccctctgtctctggagtgccctacagccccgcaaactcctcctggagctgcgccctagtgcccctgctgggcagtggcgttcccccccatcctcccgcgcccagcccctgctgctctgggcagacgatgctgaagatgctctcctttaagctgctgctgctggccgtggctctgggcttctttgaaggagatgctaagtttggggaaagaaacgaagggagcggagcaaggaggagaaggtgcctgaatgggaaccccccgaagcgcctgaaaaggagagacaggaggatgatgtcccagctggagctgctgagtgggggagagatgctgtgcggtggcttctaccctcggctgtcctgctgcctgcggagtgacagcccggggctagggcgcctggagaataagatattttctgttaccaacaacacagaatgtgggaagttactggaggaaatcaaatgtgcactttgctctccacattctcaaagcctgttccactcacctgagagagaagtcttggaaagagacctagtacttcctctgctctgcaaagactattgcaaagaattcttttacacttgccgaggccatattccaggtttccttcaaacaactgcggatgagttttgcttttactatgcaagaaaagatggtgggttgtgctttccagattttccaagaaaacaagtcagaggaccagcatctaactacttggaccagatggaagaatatgacaaagtggaagagatcagcagaaagcacaaacacaactgcttctgtattcaggaggttgtgagtgggctgcggcagcccgttggtgccctgcatagtggggatggctcgcaacgtctcttcattctggaaaaagaaggttatgtgaagatacttacccctgaaggagaaattttcaaggagccttatttggacattcacaaacttgttcaaagtggaataaagggaggagatgaaagaggactgctaagcctcgcattccatcccaattacaagaaaaatggaaagttgtatgtgtcctataccaccaaccaagaacggtgggctatcgggcctcatgaccacattcttagggttgtggaatacacagtatccagaaaaaatccacaccaagttgatttgagaacagccagagtctttcttgaagttgcagaactccacagaaagcatctgggaggacaactgctctttggccctgacggctttttgtacatcattcttggtgatgggatgattacactggatgatatggaagaaatggatgggttaagtgatttcacaggctcagtgctacggctggatgtggacacagacatgtgcaacgtgccttattccataccaaggagcaacccacacttcaacagcaccaaccagccccccgaagtgtttgctcatgggctccacgatccaggcagatgtgctgtggatagacatcccactgatataaacatcaatttaacgatactgtgttcagactccaatggaaaaaacagatcatcagccagaattctacagataataaaggggaaagattatgaaagtgagccatcacttttagaattcaagccattcagtaatggtcctttggttggtggatttgtataccggggctgccagtcagaaagattgtatggaagctacgtgtttggagatcgtaatgggaatttcctaactctccagcaaagtcctgtgacaaagcagtggcaagaaaaaccactctgtctcggcactagtgggtcctgtagaggctacttttccggtcacatcttgggatttggagaagatgaactaggtgaagtttacattttatcaagcagtaaaagtatgacccagactcacaatggaaaactctacaaaattgtagatcccaaaagacctttaatgcctgaggaatgcagagccacggtacaacctgcacagacactgacttcagagtgctccaggctctgtcgaaacggctactgcacccccacgggaaagtgctgctgcagtccaggctgggagggggacttctgcagaactgcaaaatgtgagccagcatgtcgtcatggaggtgtctgtgttagaccgaacaagtgcctctgtaaaaaaggatatcttggtcctcaatgtgaacaagtggacagaaacatccgcagagtgaccagggcaggtattcttgatcagatcattgacatgacatcttacttgctggatctaacaagttacattgtatagtttctgggactgtttgaatattctattccaatgggcatttattttttatcctgtcattaaaaaaaaaagactgttatcctgctacacactcctgtgatttcattctcttttattaatttaaaaataatttccagaaatgtgcagatcctctgtgtgtatgtcagcatgtttgttcacatatgcacatacacatactcataacccctatatgcgttgttgcataacagatgattttttaaaatatatacttccttatgcaaagtaatttacacagaaattccattgtaaattgataatggattttttatgttactagaagagattatttgacttcccaggaattttctgtctgtaatcactaaagtcaactttaatagagttttgaaacagtactgtgcaatccgatggatctaattaaaaaaaaggcaatatttttatattaaagtactatactaggagagaatgtttcagaactccctgatgaatttctaagtgagcaacttgatataaaattgtaatcttcatttttgtcagtgtatccagttacagaatgctacacacttacctttttattggctgagaaatctggttatttcatcttaatctcaagattgttttcaagtgttttataattaaatcataatagcatattttaaaatcaatcttcctaaaaggtctgcttttattgtatattttatttaacaataggcactgggtttgtgttacatatttatatattttattttatttttataatatagacatcacctagatgaaacacctttaccctgtcctgtaaaacactaaagttacatttttcaccaacttaattggaaagaaggggagtgagaaagcaaacagtctttaatgtgctgtggatctaatctagcaaggtatccttgtgccaacatgtaatcattaacgacggatgaaaaagcaagaaaacagccaatccttataaaattccagcattaaacatttgtaaagtgcttttcaccatagcaagactgtcagagtctatgttattagaatgttgcagatttccactgaatcgaacctcactggagaagagctcacttgtttttaaaaatcttggctatgtaagctgtcacctgtacaaatttttaacataataattcttgccaaatatgactttaaatgtacgtgttccttcagaactcaatgaaaatactctttggctaatgtatcaataaattttctgtaaatgttctgttcagggttttacagagatgacatgttctgacttaaaactgcaaaaagtctagtagatatttttcttcatggttttcaaagccagctctccacgtttggattttaacaaaatataaggcctctttgcactagtgaaaaaacacgtctactcatgacaagtgcacacccactatggctgtccttcttctgtaaacatccattcctctagaatctaaattgtagagcagtatagattatgcagcgccagctgactttctaaaccttctccttacctttaggaatacaagcctcaatttaaaaaatatattgtagctagtatttctctattgttttaaggtgagagatttgcaattaaagcccagtaagcatttatatagaagccacaatgtagaaagattggttaagtacactgctcttgtcttccatatatgattacttaagtttcaagtgacctcatgccaaatggaaatgggttgagaaatcttggttcagtgcttagtgaacaatagcctgcattaaaaagtgcatgcataattttgcacaatttagattcaattgacagtctattcaaagaagtctcaggattaaatgagcatggagaccaaattgccctcttaccccagaaaaggggtggtcccttctagtcacactaacacttcattggcccaacagtgtgacaaatcttgcaatgaaccatgcagtagcctgcatctgtaggttaatagcaatcttttgtctccattgctttctcttcatagcccttttactgaattccatcacagaaagttttacaattaaaaaaaaatgtcctgacaaccatttttgtaaatggaccttaccatctaattgtcccttattcaacgtgggtgacattaacaaaatgtgaacttcttgtgagggagccagctgtctaaatctgtcaaatcgtgcagttttattacacattctccaattcttcctagtttccctgaaaacaataaggatactgctatatattcagtaaaatctaaaaaaatcaagcattacttcttacatctttaaactttccatctcctccccaaaataaaaggtgttctattgccattagttctactgttttaaaatatctatattaagttgaccaggcccagattttttatacagctttttcccaagtgaaagattttcaagtgacttagaaaaacatatgtgccccaggtgtcattgccttttcttttgtgagtcattagaatgaaaggccaagttcttctcaagagaagatagcaagatccacggatattaagccaagcaaagaaagtaaaatcattggagtcatttctttctgttcttaggagaaaagtagatagcactggctaattgatggcaacatattttaaattaagtggtcaattcaaaaattctctttgaccttttctttcaagtagatttttttaaatgcatgactggagaattatcttcaatgattcatgatgagaggcaggtaggaattggttaagaagtatgagcaggaaaaaattattgtttaatcacatgaaaggcaacatctgttcagttcataaagcacacagtctcgaatggaagaaaaaaaggtccttcgtaagaatactgatgcataagataaagacgaaataatgaaaaagaaaaatgtatattattattcccttgtccattctcaagtttaagctgcggttgtcagttgaatgtgaaatgatgttatagttgttttaaatggttggaaataacctttctactactgtttctgccacactgttgtcctggttcatagaaccttgttttcttgacagttatttaaggtaataaaaggaacacaatttggcagatctttaagtgaaagagagaaaaaatttaagaaattgagtgatggctaaaagtaagtgcttccatccataacttttcttcttggatttttttcaatgtaattattgtaaaatatatttttttattttatcatgaagaatactcggaaggtttctcagattaatgagtatctcataaagagtagagaaaccaacacatacaatatatacacacaacctaaatagaaaactattttctttgtcatttgcatgccccagagaagttacttcttccctatttatttctttgaaaataattacaaaatagtatactaacaattttaatccatttgctgttttttttttttttttggtttctttttttttttttttgagacggagccttgctatgttgcccaggctgcagagcagcacaatctcagctcactacaacctccgcctcccgggttcaagcaattctcctgcctcagcctcccaagtagctgggattacaggtgcccgccaccacacccggctaatttttttgtgtttttagtagagacagggtttcaccatgttggccaggctgatttcaaactccagacttcaagtgatccagccccccaggcctcccaaagtgctaggattacaggcgtgagccaccatgcccagcttccatttgcttttgatattgtttttatctctgagttacaaactatacaagcttaccaggtataaggttagatgctacatctaggagcattcaagatatacattaatttaaacttttattagtctaactttctgttaagtctcttagctttgaaacataaaagagaaatcaagcccaaatttttagaggaaggctaaggtatactattggcagttgtagttttaattgtaattgactgattaaccaagtaatttataaaatgttacctatactgtcagtgttcacctcctctccctccctccttctctctctctctccccctctcgctctctcggctaatatatatgtgtatgtgtatatatatatgtatgtatatatatacacacacacacacacatacatacatacatacatatattctttttccttttaaccacttccctctcctacattttctattggttttgcctaaatagacatgttctcaatacacccatgttgaaggtatcctgggctagattgctgttgattttgctggttatgatcttttctttgtttttctgaaaaatagcctctcttgattccacattttctcaaattctatataacaaataatagtggatagtaaacaaatgacatactaggctgatctattacaatcattgaaagaaataaggaagagcagaaatcactaacagtccagaggctccaattcagctgctctagcatagatacaggaaagacatggagaataacactggggttagctaacagcagggaaagttagtagctatttcctagccaaggaacaaccttctctatggaataattttaagaaaattattccaaatctgtgaggaaaaaataagaagcagttcctcaatggagactttataaatcttaatttcctcacccctgggatgagatttgaagttgcagaggactcagaccaaagtcccatggcagaaaatgtacatatttttaaactactcccaggaagtaaactagtactgtgaatgctggcaataccatcagaaagtttatctttaaaatacctaaaaataaatatatatttgctatcttatcctctttttgtcacacaaacataaattggtcatatatatatttatatatatggttatatatatttggttatatatatatctttatatatatatcttatatatatatctttttatatatatcttatatatatatctttttatatatatcttatatatatatctttatatatatcttatatatatatcttatacatataagatatatgtatatatatatacattatatatatataatatatatatattatatatatataatatatatcttatatatatatatatcttaatacatatatataaccatggaacctgccaaacactaatcctagccaacttcaatccttctttctcttaactatcttctctgaataagttctggacttcaccttaaaataagtttttaggagagtaatatatattcatgggattgtgagggagcattgtagagctgttttcttctcagtcatagtggtggttttcctagctgctatggaaaggtttgttcacttatgagattaggacttttcttaaattcctcattaaatatgaacctaaggcatacccatcatttaccttgattcccatataatttgtataagtcatatataagtccattgacaaaataaaaaaataaataattggattccttgtatcaacagaaagccttgtgcttaaaacctgttattcttctttgagccagactaaacagtaacatttacaaaatggtatcagctcaacattaaatctaaggttacttctcacatacatcataaagtcagccatcatctttcatttaggatttcttggggttttctttttgcatatatagattatgtattacttaaatccaaaatacatgtgtgtatatatatacatatatatgtaacttaatataaatgtttgatgagttatctcaattgactataatcttctaagtcaaaaagaaaacatttaagtacataatataaaaagaactgaacattaacagtaatgggaaattcataatggctaaatatgaaataagctttgtctttgcagttacaaactaattcttgtacattttccttttcactaaaaaaataactaattgatagtttccattcacatgaacaagttataatcaggtttgggatagtatgcccaaaacctatgtttctttactttatattcttaaaatctgagacatgatttttctggaacaaattaagatttcatgtacaatagagtccctttcctaatactgttatgaagaaaccaagttgactaccttatgagagatcagatatttcccttatctcattatattcacagcatatgtttggacatgcgtttcaccaagaaccatgtagtaataagataaatggtaactgaggtactatggaatttttagaacttgattccccaggacatgctacagtaaactaaactatttattcaaaagtaacccaactaattaaagtgaaaaaaaattgttgaatcacaatgaacaaacataaaacaatacttaaatgagaattctgtgtcttttttggttttatctgtgatttattttgtccagtattaaggaatggttatctttatcattcttctaacatgttttggtttctctaatggttcattttcctttagcttgtgaaaattagggcagtttgtccagagccttactcgcaggagacaccagacccaacccatgcttagatttctgttaataaaagggagaagggtatttgaataggtagtaaaggcaggtacaagtttaagggagcagggctatcatatgtactaggtgagatttctataaatgtctgaaaagttacatgcatagtcattggctcaggtaatttctctgaatttgaacttatttgatttatttaaccaagttattataatatgcagttctctttaatcaatcttctattattcaatcatctatccatttattaattcaacaaatatttattaaagtgcctaccatgattatgtgctgtagaaaagacaaggacatttactagggggggattgtgggcccaatcggcatcataagcatgtctgaagcaaaagacaataatcacatccaacggcaccagttcagctcaactttagaattcagcagtaacagtacagatggcctaaagtacatctgtgtgtatctgtacgtgtgcacacacccatgtatatatatttatctatctgtacaaacactacatatgtatacacactatctatgtaaaatataatatatgtataatgcatataaattctaacaagtgtatttgtgttatctttaaaatagaacaattgtatcttgaagtggtaaatgcagagaattggttttattgttgatctgtggatttaatgatttctaggtgaaaaggacgtttaagtgtacaatttcttttcttaatttaatatatttatgtaaatgcatgcctgaaatttggttagattggctgtgttttgtgtcttttaacatgatcaaatgattaaactttatcttatgacttga

SEQ ID NO: 9325 - DNA, 1770 bp, Homo sapiens
  source 1..1770: mol_type = unassigned DNA
gaagctgcagccgccggcagaggagacctcagcatcatctagagcccagcgctggccctgcctccgcctgccccgccgccgccgtcgccgtttctgttcctgctactgtcccacctaaacaactcccgttacacggacaagtgaacatctgtggctgtcctctccttttcttcctcctcttccaactccttctcctcctcccacttcccagccgcagcagaaagcccccaacccaactgacactggcacaactgcaaacggtgtcatccgcacaactttatctcgctcctcgggctcccctaaggcattggacccatcgccgcgtcttttattttttgcaaagttgcatcgctgtacatatttttgtccccgccacctccctctgtctctggagtgccctacagccccgcaaactcctcctggagctgcgccctagtgcccctgctgggcagtggcgttcccccccatcctcccgcgcccagcccctgctgctctgggcagacgatgctgaagatgctctcctttaagctgctgctgctggccgtggctctgggcttctttgaaggagatgctaagtttggggaaagaaacgaagggagcggagcaaggaggagaaggtgcctgaatgggaaccccccgaagcgcctgaaaaggagagacaggaggatgatgtcccagctggagctgctgagtgggggagagatgctgtgcggtggcttctaccctcggctgtcctgctgcctgcggagtgacagcccggggctagggcgcctggagaataagatattttctgttaccaacaacacagaatgtgggaagttactggaggaaatcaaatgtgcactttgctctccacattctcaaagcctgttccactcacctgagagagaagtcttggaaagagacctagtacttcctctgctctgcaaagactattgcaaagaattcttttacacttgccgaggccatattccaggtttccttcaaacaactgcggatgagttttgcttttactatgcaagaaaagatggtgggttgtgctttccagattttccaagaaaacaagtcagaggaccagcatctaactacttggaccagatggaagaatatgacaaagtggaagagatcagcagaaagcacaaacacaactgcttctgtattcaggaggttgtgagtgggctgcggcagcccgttggtgccctgcatagtggggatggctcgcaacgtctcttcattctggaaaaagaaggttatgtgaagatacttacccctgaaggagaaattttcaaggagccttatttggacattcacaaacttgttcaaagtggaataaaggttggctttttaaattttatttatttttgtgctggctacgttaattttattttagtgttaccttcctcactgaaggtatttctttgtaataaaagaaagaatcttgcaggagaaaataagggggcaacataagaaacaataattatggcacctgaattaggacagtgacattaaatttctgttatttgttgactattgtgcgctgcaatcgaattgatatttgacatgctttccccatgtaattgacacatttaaaggaatctttggctttataaagtattgtttaaatattgtttaatgggcataacacaggactgtacatcagcatttgctagtagaaacaaagaggtcttttggttattttggcaattgcaaatcattctttcaccatctctgtttttgagtctgtctcataaaaaatactacttatactac

SEQ ID NO: 9326 - DNA, 547 bp, Homo sapiens
  source 1..547: mol_type = unassigned DNA
gattccgttgtgtgttcctctggggtaagcaagtagcatttcctcccccagagtccgcggtcgggatgctgtgcaaacttgcctatctctgaaaacagacgtttctgcggtacccgcaccctgggctggatattttctgttaccaacaacacagaatgtgggaagttactggaggaaatcaaatgtgcactttgctctccacattctcaaagcctgttccactcacctgagagagaagtcttggaaagagacctagtacttcctctgctctgcaaagactattgcaaagaattcttttacacttgccgaggccatattccagattttccaagaaaacaagtcagaggaccagcatctaactacttggaccagatggaagaatatgacaaagtggaagagatcagcagaaagcacaaacacaactgcttctgtattcaggaggttgtgagtgggctgcggcagcccgttggtgccctgcatagtggggatggctcgcaacgtctcttcattctggaaaaagaaggttatgtgaagatacttacccctg

SEQ ID NO: 9327 - DNA, 1298 bp, Homo sapiens
  source 1..1298: mol_type = unassigned DNA
aggacaaaaaggggtcgacttatcctcctccccactaaactgctgcccacacacagagtcctgttgcttatggcaaaagaataacaacaacaccattgtatttgttagttggttcactaatgggtgaaactagagaacatcattctctttcagtccccagctctgtccaaatgttcatgccttttgagggagcatttgtccaactccttctattcccagatgagtgagaactgtcttgctgcaggttttcagctgcaactctctttttattcttaccatatgcagcaggagcctgagattcagggaacagatattccaggattttattcaaagcaatgtctttaagctcctgtgttgcaactgaattaagtttcaaaatagctatattcaggtcaccttaaaggttttatcaggagccctaaagaaccaggaaattcagagaaaagtttagaaatatttgccattaagtctcccttggtgcaatacgtactatgaatatactgatgatctagagacccctgcaatactcaactcttccagagacatgtggaatgaaaattttgttcttgactaaatgatattttctgttaccaacaacacagaatgtgggaagttactggaggaaatcaaatgtgcactttgctctccacattctcaaagcctgttccactcacctgagagagaagtcttggaaagagacctagtacttcctctgctctgcaaagactattgcaaagaattcttttacacttgccgaggccatattccagcttcatctttctacaaatcaaaaacttgaagaggaaggtaccccgagggatgtattttgctaaaagaagccaaatgctggaagaattgggagagagaaatgattccagagacatcttcatttgttccctattgcccaatgcatgaagaaatgtttccttcaaacaactgcggatgagttttgcttttactatgcaagaaaagatggtgggttgtgctttccagattttccaagaaaacaagtcagaggaccagcatctaactacttggaccagatggaagaatatgacaaagtggaagagatcagcagaaagcacaaacacaactgcttctgtattcaggaggttgtgagtgggctgcggcagcccgttggtgccctgcatagtggggatggctcgcaacgtctcttcattctggaaaaagaaggttatgtgaagatacttacccctgaaggagaaattttcaaggagccttatttggacattcacaaacttgttcaaagtggaataaaggttggctttttaaatttt

SEQ ID NO: 9328 - DNA, 585 bp, Homo sapiens
  source 1..585: mol_type = unassigned DNA
ttgaaaccaaagccagaatgatggctctatctatcttcaaataggtatttacactgcagacctcacacagagcaaaaatgttaccatcctgctgggccggaacagcatgaaactttaaaaagaataatattatacttgatttcagataatttattgaatcctacttctgaaatgtttgatgagagatctgtgaccagaacacattccaaaaattgtaaaagacaaaattccttaggcactaaaatcaagctcttcctggatagcagctgagagagtatatgaggatcattttgttttcagctataaaaaatggaagaatgcataatctccataaaaccaaagatattttctgttaccaacaacacagaatgtgggaagttactggaggaaatcaaatgtgcactttgctctccacattctcaaagcctgttccactcacctgagagagaagtcttggaaagagacctagtacttcctctgctctgcaaagactattgcaaagaattcttttacacttgccgaggccatattccaggtttccttcaaacaactgcggatgagttttgcttttactatgcaagaaaa

SEQ ID NO: 9329 - DNA, 563 bp, Homo sapiens
  source 1..563: mol_type = unassigned DNA
tgtgcactttgctctccacattctcaaagcctgttccactcacctgagagagaagtcttggaaagagacctagtacttcctctgctctgcaaagactattgcaaagaattcttttacacttgccgaggccatattccaggtttccttcaaacaactgcggatgagttttgcttttactatgcaagaaaagatggtgggttgtgctttccagattttccaagaaaacaagtcagaggaccagcatctaactacttggaccagatggaagaatatgacaaagtggaagagatcagcagaaagcacaaacacaactgcttctgtattcaggaggttgtgagtgggctgcggcagcccgttggtgccctgcatagtggggatggctcgcaacgtctcttcattctggaaaaagaaggttatgtgaagatacttacccctgaaggagaaattttcaaggagccttatttggacattcacaaacttgttcaaagtggaataaaggaccttctcatccttttcatcatcaagaaaatcacgtggctgtcactatagacaacaaacaacta

SEQ ID NO: 9330 - DNA, 824 bp, Homo sapiens
  source 1..824: mol_type = unassigned DNA
aaatgtaaaacacatactctgtcccccaatttctcagtgatttcacaggctcagtgctacggctggatgtggacacagacatgtgcaacgtgccttattccataccaaggagcaacccacacttcaacagcaccaaccagccccccgaagtgtttgctcatgggctccacgatccaggcagatgtgctgtggatagacatcccactgatataaacatcaatttaacgatactgtgttcagactccaatggaaaaaacagatcatcagccagaattctacagataataaaggggaaagattatgaaagtgagccatcacttttagaattcaagccattcagtaatggtcctttggttggtggatttgtataccggggctgccagtcagaaagattgtatggaagctacgtgtttggagatcgtaatggcacagcatggattctagtcctggcgaggaagtatcattctctggatgaaggggagggcttttctcatactcaggaatttcctaactctccagcaaagtcctgtgacaaagcagtggcaagaaaaaccactctgtctcggcactagtgggtcctgtagaggctacttttccggtcacatcttgggatttggagaagatgaactaggtactgtacaatctagttctgttaagtttcattctcacttcctttttcaagaggctttgttctgccctgaagaataaatacagcaatcttatcctctacttgttggaaatgtaatccacagcaaagatgacctactccagagattaagatagtccagttacatattctctaccagtaacttttccctgagagc

SEQ ID NO: 9331 - DNA, 327 bp, Homo sapiens
  source 1..327: mol_type = unassigned DNA
ggagggggacttctgcagaactgcaaaatgtgagccagcatgtcgtcatggaggtgtctgtgttagaccgaacaagtgcctctgtaaaaaaggatatcttggtcctcaatgtgaacaagtggacagaaacatccgcagagtgaccagggcagacatcacctagatgaaacacctttaccctgtcctgtaaaacactaaagttacatttttcaccaacttaattggaaagaaggggagtgagaaagcaaacagtctttaatgtgctgtggatctaatctagcaaggtatccttgtgccaacatgtaatcattaacgacggatgaaaaa

SEQ ID NO: 9332 - DNA, 2101 bp, Homo sapiens
  source 1..2101: mol_type = unassigned DNA
ccgagggctccggagcggcgactggcgagccatggcgctggggctgcagcgcgcaaggtcgaccacggagctgcgcaaggaaaagtcccgggatgcggcccgcagccggcgcagccaggagaccgaggtgctgtaccagctggctcacacgctgcccttcgcccgcggcgtcagcgcccacctggacaaggcctctatcatgcgcctcaccatcagctacctgcgcatgcaccgcctctgcgccgcaggggagtggaaccaggtgggagcagggggagaaccactggatgcctgctacctgaaggccctggagggcttcgtcatggtgctcaccgccgagggagacatggcttacctgtcggagaatgtcagcaaacacctgggcctcagtcagctggagctcattggacacagcatctttgatttcatccacccctgtgaccaagaggagcttcaggacgccctgaccccccagcagaccctgtccaggaggaaggtggaggcccccacggagcggtgcttctccttgcgcatgaagagtacactcaccagccgcgggcgcaccctcaacctcaaggcggccacctggaaggtgctgaactgctctggacatatgagggcctacaagccacctgcgcagacttctccagctgggagccctgactcagagcccccgctgcagtgcctggtgctcatctgcgaagccatcccccacccaggcagcctggagcccccactgggccgaggggccttcctcagccgccacagcctggacatgaagttcacctactgtgacgacaggattgcagaagtggctggctatagtcccgatgacctgatcggctgttccgcctacgagtacatccacgcgctggactccgatgcggtcagcaagagcatccacaccttgctgagcaagggccaggcagtaacagggcagtatcgcttcctggcccggagtggtggctacctgtggacccagacccaggccacagtggtgtcagggggacggggcccccagtcggagagtatcgtctgtgtccattttttaatcagccaggtggaagagaccggagtggtgctgtccctggagcaaacggagcaacactctcgcagacccattcagcggggcgccccctctcagaaggacacccctaaccctggggacagccttgacacccctggcccccggatccttgccttcctgcacccgccttccctgagcgaggctgccctggccgctgacccccgccgtttctgcagccctgacctccgtcgcctcctgggacccatcctggatggggcttcagtagcagccactcccagcaccccgctggccacacggcacccccaaagtcctctttcggctgatctcccagatgaactacctgtgggcaccgagaatgtgcacagactcttcacctccgggaaagacactgaggcagtggagacagatttagatatagctcaggatgctgatgctctggatttggagatgctggccccctacatctccatggatgatgacttccagctcaacgccagcgagcagctacccagggcctaccacagacctctgggggctgtcccccggccccgtgctcggagcttccatggcctgtcacctccagcccttgagccctccctgctaccccgctgggggagtgacccccggctgagctgctccagcccttccagaggggacccctcagcatcctctcccatggctggggctcggaagaggaccctggcccagagctcagaggacgaggacgagggagtggagctgctgggagtgagacctcccaaaaggtcccccagcccagaacacgaaaactttctgctctttcctctcagcctggtgtgttgggggattaatgggattctctggccctcattacctagctggcttaaacctactgttttatagataggaaaccagagaggggcaggggctggttgagggtcatacagaaagtcagtgggccagctgagactaaagcctgatcttctagtttcactaatgggtattaaaaacctctgcagtgaactgagattgcgccactgcaccccagcatgagcgacagaatgggaccttgtc

SEQ ID NO: 9333 - DNA, 5852 bp, Homo sapiens
  source 1..5852: mol_type = unassigned DNA
ccgagggctccggagcggcgactggcgagccatggcgctggggctgcagcgcgcaaggtcgaccacggagctgcgcaaggaaaagtcccgggatgcggcccgcagccggcgcagccaggagaccgaggtgctgtaccagctggctcacacgctgcccttcgcccgcggcgtcagcgcccacctggacaaggcctctatcatgcgcctcaccatcagctacctgcgcatgcaccgcctctgcgccgcaggggagtggaaccaggtgggagcagggggagaaccactggatgcctgctacctgaaggccctggagggcttcgtcatggtgctcaccgccgagggagacatggcttacctgtcggagaatgtcagcaaacacctgggcctcagtcagctggagctcattggacacagcatctttgatttcatccacccctgtgaccaagaggagcttcaggacgccctgaccccccagcagaccctgtccaggaggaaggtggaggcccccacggagcggtgcttctccttgcgcatgaagagtacactcaccagccgcgggcgcaccctcaacctcaaggcggccacctggaaggtgctgaactgctctggacatatgagggcctacaagccacctgcgcagacttctccagctgggagccctgactcagagcccccgctgcagtgcctggtgctcatctgcgaagccatcccccacccaggcagcctggagcccccactgggccgaggggccttcctcagccgccacagcctggacatgaagttcacctactgtgacgacaggattgcagaagtggctggctatagtcccgatgacctgatcggctgttccgcctacgagtacatccacgcgctggactccgatgcggtcagcaagagcatccacaccttgctgagcaagggccaggcagtaacagggcagtatcgcttcctggcccggagtggtggctacctgtggacccagacccaggccacagtggtgtcagggggacggggcccccagtcggagagtatcgtctgtgtccattttttaatcagccaggtggaagagaccggagtggtgctgtccctggagcaaacggagcaacactctcgcagacccattcagcggggcgccccctctcagaaggacacccctaaccctggggacagccttgacacccctggcccccggatccttgccttcctgcacccgccttccctgagcgaggctgccctggccgctgacccccgccgtttctgcagccctgacctccgtcgcctcctgggacccatcctggatggggcttcagtagcagccactcccagcaccccgctggccacacggcacccccaaagtcctctttcggctgatctcccagatgaactacctgtgggcaccgagaatgtgcacagactcttcacctccgggaaagacactgaggcagtggagacagatttagatatagctcaggatgctgatgctctggatttggagatgctggccccctacatctccatggatgatgacttccagctcaacgccagcgagcagctacccagggcctaccacagacctctgggggctgtcccccggccccgtgctcggagcttccatggcctgtcacctccagcccttgagccctccctgctaccccgctgggggagtgacccccggctgagctgctccagcccttccagaggggacccctcagcatcctctcccatggctggggctcggaagaggaccctggcccagagctcagaggacgaggacgagggagtggagctgctgggagtgagacctcccaaaaggtcccccagcccagaacacgaaaactttctgctctttcctctcagcctgagtttccttctgacaggaggaccagccccagggagcctgcaggaccccagcaccccactcctgaacctgaatgagcccctgggcctgggcccctcactgctctctccgtactcagacgaggacactacccagcccgggggccccttccagccaagggcaggctcagcccaggctgactgagccggctcctctccccatctgccttctcctcccccagaaaggacctcaaccacactccacgccggcagccaacgcacaggatgggggcgccaggagaggggcccctctctcctctatgtaccccctgcccacctcgggcctacctcagccctcacccctctgcctgctcccaatctgggggctctctggggtggtctcagctcagtgacctctgggaggtggtccctggccccctcctccttctctcaggatttctcttggggttctcaatacttggttacctcattatccctttctctgcctctcttggctttattttggggaatcaggggtgaggagggttgggggggtcatatctgtgtttccaggttctggggagaacaatgatccacgggtcaacgtgatcacatttccttctatccttcttgtattattatttttatttttgtcaatttcatgatatggtttttaatcatgatgaattgcctggggtctgtaagaatgtgggactctgatcttccccctcttcaggtgtcagtgcggagaggctctgggccagacctcacccccagtgacttccgattgaggccaaagaccccaagctgcccgccagctctgactgccccttgcgctctgggcttcctgccgcccccagctttgcctggacactgacttcattcatggtcctcctacttcaggggcagcctcccagttcctctgcttccaaactatgcaacctccaacctgctccagttccagactgtataacctctgacctgcactggttctagaccacacaacctccaatgtggtctgctttagatcaccttcttcttcttccttcttcctcttcctcttcctcctgctcctcttcctcttcttcttcttttttttttttgacagagtcttgctctgtcacccaggctggagtgcagtggcgcgatttcagcttactgcagcctccgcgccctgggttcaagtgattctcctgcctcaacttcccaaatagccgggactacgggcatgtgccacattgcccggctaatttttgtatttttagtagagatggggtttcaccacgttgtccagtctggtctcgaactcctgacctcaagtgctccacctgcctcagccttccaaagtgctgggattacaggcgtgagccactgcacccggctagaactcactttctccaaatccctctgcttcgaatttcaccgtcttcagctctttctagttctgggcctcaccagcctctcattctgcctgttttcaaaccttacgatccccaaaaattgtctggttctgggcctctaactccctctggctctatagtctatgactaccagattcttttggttctagaattcactaacttcctctggttctagacctcttcctataaattaatccctcttgttttagatctcacaccctccaacgccctccggttccagatcttatattcagtgatttcctctggttctggaccccacaactccaagcttcctattggttccagttctcctgatcggtaatacatttggttccaaatccagacctcttaatctctctctttttttttttttttttttgagacagagtcccactctgtcacccaggctggagtacagtggctcaatctcggctcactgcagcctccacctcctgggttcaagcaattcttgggcctcagcctcccaaatagctgggattacaggcatgtgccaccacgcccagctaagttttatatttttagtagagacagtgtttcaccatgttggccaggctggtcttgaactcccgacctcaactgatccacccgcctcagcctcccaaagtgctgaaattacaggagtgagcctggccagacttcttaatttctaaatcacttttgttttagaccttatgaggctcagcttattcttctgcagttctctataaccaagactcattttctctcatcaaaaacaagtacagagagtttgatgtgtttatctcttttttcttcctcttcttttttttttttttcttttttgagatggagtctctctctgttgcccaggctggagtataatggtgccatctaggctcactgcaacctccgcctcctgattcaagtgattctcctgcctcagcctcctaaattggtgggattacaggagcccaccaccacatccggctacctttgtgtattttttagtagagacggggttttgccaagttggaggggctggtcttgaactcttgacctcagatgatccacccgcctcagcctcccaaagtgctgggattacaggcataagccaccgtgcccgaccctgtccttatcttataataaccagttcttctagaaccagacgatgctctagttctcctagattctgaacctcatgacctgtaccactcactagttccagactacacaacttctagaaggtgccacctccagggtcctgattcaagatctggtgatctgctgtttctctggttctagaactgacttacaagtgccttctgattctagacctcattccgtaagttcccttggctctagacttcatcatttccagctcctcctcactcaagatctgactccaaattaccctgggtctagaattcagccttcaaatatcttctgattttagactttgccttatacatttctctggttttagatcttaccaccctcaactccttctgattctagatcttatggttcccaaatctctctggttctagaactcagattttaggcttttgtttttccttttttttgttaaaaaaaaaaaaatagagacggggtttcaccatgttgcccaggctggtcgcgaactactgagctcaagcaattctccctccttggcctcaccaaagtgctgggactacaggcatgagccactgagcccagccaggctttttctaattctatgctttattctataaattcctctgcttctaagcctcacagcttccaactgcctttgatttcagatccaaattcctctgattctataattcagcctccaaatgcttctgattctggaatctagacttttccctaaagattcctctggttctgaatcttataacctcaactccctaattccagaccccagcctcctaaatctattctgggcttcccaccccactgaacttacccaattccttctttcagtcttaagttttcccattctaaacccctaccctctaggctgtgctgctcctggacttcatgcctctccattctcattgcctacaatctctgtgccccagaaccccctccacttcccaccccagccctccagacatgcacttaccttgactttaccccacatgtttggggcacctggggctccctcaccccttgggtggtttgcaatctgaagacttctccagccacacaggcacatgcacaggcacggtgctgtctgcatattgccaggtggggagagaagccaggacccctcagctgtctgccaccatctatgtgcctcccttaccccccagctttctttctacagatggtgctactcttggtctcccacaggaaaaggcctccccccttcttagccccatttaccccgtttgtggaaggcactgctcgctctgttttgtcagagagtggcctatccagattggtgctatgggggggtctgacccctccctcctccctctggaggtgatgtgggccctcaatggagggaattgtgctgggctagggaaaggggagggactagactggccacactggctctgaaactcaccaatctctatacaccataaagacctcaccttggtaggcaccaga

SEQ ID NO: 9334 - DNA, 507 bp, Homo sapiens
  source 1..507: mol_type = unassigned DNA
gtcgttccgcccctctcagcgccccctcctggctgggtgggggcccctcttggctgagctcgggtgccccccctccccacccaaggccggccctttcctgtggagtcatctcaccgccgtgcgcacccactcgtaactcgcacccgggtcctggctgcaccgcatcccctcctgcaccccctggatggcccttcagccaacgggggcctgggcgatggtcgaccacggagctgcgcaaggaaaagtcccgggatgcggcccgcagccggcgcagccaggagaccgaggtgctgtaccagctggctcacacgctgcccttcgcccgcggcgtcagcgcccacctggacaaggcctctatcatgcgcctcaccatcagctacctgcgcatgcaccgcctctgcgccgcaggtgagccccgcccgcgggaattcccgtcttggtcaggccccgcccacggaaaaaaactacatcccagggaggcccctcctccgggaagccttattctga

SEQ ID NO: 9335 - DNA, 2250 bp, Homo sapiens
  source 1..2250: mol_type = unassigned DNA
ctttcctgtggagtcatctcaccgccgtgcgcacccactcgtaactcgcacccgggtcctggctgcaccgcatcccctcctgcaccccctggatggcccttcagccaacgggggcctgggcgatggtcgaccacggagctgcgcaaggaaaagtcccgggatgcggcccgcagccggcgcagccaggagaccgaggtgctgtaccagctggctcacacgctgcccttcgcccgcggcgtcagcgcccacctggacaaggcctctatcatgcgcctcaccatcagctacctgcgcatgcaccgcctctgcgccgcagctggagctcattggacacagcatctttgatttcatccacccctgtgaccaagaggagcttcaggacgccctgaccccccagcagaccctgtccaggaggaaggtggaggcccccacggagcggtgcttctccttgcgcatgaagagtacactcaccagccgcgggcgcaccctcaacctcaaggcggccacctggaaggtgctgaactgctctggacatatgagggcctacaagccacctgcgcagacttctccagctgggagccctgactcagagcccccgctgcagtgcctggtgctcatctgcgaagccatcccccacccaggcagcctggagcccccactgggccgaggggccttcctcagccgccacagcctggacatgaagttcacctactgtgacgacaggattgcagaagtggctggctatagtcccgatgacctgatcggctgttccgcctacgagtacatccacgcgctggactccgatgcggtcagcaagagcatccacaccttgctgagcaagggccaggcagtaacagggcagtatcgcttcctggcccggagtggtggctacctgtggacccagacccaggccacagtggtgtcagggggacggggcccccagtcggagagtatcgtctgtgtccattttttaatcagccaggtggaagagaccggagtggtgctgtccctggagcaaacggagcaacactctcgcagacccattcagcggggcgccccctctcagaaggacacccctaaccctggggacagccttgacacccctggcccccggatccttgccttcctgcacccgccttccctgagcgaggctgccctggccgctgacccccgccgtttctgcagccctgacctccgtcgcctcctgggacccatcctggatggggcttcagtagcagccactcccagcaccccgctggccacacggcacccccaaagtcctctttcggctgatctcccagatgaactacctgtgggcaccgagaatgtgcacagactcttcacctccgggaaagacactgaggcagtggagacagatttagatatagctcaggatgctgatgctctggatttggagatgctggccccctacatctccatggatgatgacttccagctcaacgccagcgagcagctacccagggcctaccacagacctctgggggctgtcccccggccccgtgctcggagcttccatggcctgtcacctccagcccttgagccctccctgctaccccgctgggggagtgacccccggctgagctgctccagcccttccagaggggacccctcagcatcctctcccatggctggggctcggaagaggaccctggcccagagctcagaggacgaggacgagggagtggagctgctgggagtgagacctcccaaaaggtcccccagcccagaacacgaaaactttctgctctttcctctcagcctgagtttccttctgacaggaggaccagccccagggagcctgcaggaccccagcaccccactcctgaacctgaatgagcccctgggcctgggcccctcactgctctctccgtactcagacgaggacactacccagcccgggggccccttccagccaagggcaggctcagcccaggctgactgagccggctcctctccccatctgccttctcctcccccagaaaggacctcaaccacactccacgccggcagccaacgcacaggatgggggcgccaggagaggggcccctctctcctctatgtaccccctgcccacctcgggcctacctcagccctcacccctctgcctgctcccaatctgggggctctctggggtggtctcagctcagtgacctctgggaggtggtccctggccccctcctccttctctcaggatttctcttggggttctcaatacttggttacctcatt

SEQ ID NO: 9336 - DNA, 1486 bp, Homo sapiens
  source 1..1486: mol_type = unassigned DNA
cctgtggagtcatctcaccgccgtgcgcacccactcgtaactcgcacccgggtcctggctgcaccgcatcccctcctgcaccccctggatggcccttcagccaacgggggcctgggcgatggtcgaccacggagctgcgcaaggaaaagtcccgggatgcggcccgcagccggcgcagccaggagaccgaggtgctgtaccagctggctcacacgctgcccttcgcccgcggcgtcagcgcccacctggacaaggcctctatcatgcgcctcaccatcagctacctgcgcatgcaccgcctctgcgccgcaggggagtggaaccaggtgggagcagggggagaaccactggatgcctgctacctgaaggccctggagggcttcgtcatggtgctcaccgccgagggagacatggcttacctgtcggagaatgtcagcaaacacctgggcctcagtcagctggagctcattggacacagcatctttgatttcatccacccctgtgaccaagaggagcttcaggacgccctgaccccccagcagaccctgtccaggaggaaggtggaggcccccacggagcggtgcttctccttgcgcatgaagagtacactcaccagccgcgggcgcaccctcaacctcaaggcggccacctggaaggtgctgaactgctctggacatatgagggcctacaagccacctgcgcagacttctccagctgggagccctgactcagagcccccgctgcagtgcctggtgctcatctgcgaagccatcccccacccaggcagcctggagcccccactgggccgaggggccttcctcagccgccacagcctggacatgaagttcacctactgtgacgacaggattgcagaagtggctggctatagtcccgatgacctgatcggctgttccgcctacgagtacatccacgcgctggactccgatgcggtcagcaagagcatccacaccttgctgagcaagggccaggcagtaacagggcagtatcgcttcctggcccggagtggtggctacctgtggacccagacccaggccacagtggtgtcagggggacggggcccccagtcggagagtatcgtctgtgtccattttttaatcaggtggaagagaccggagtggtgctgtccctggagcaaacggagcaacactctcgcagacccattcagcggggcgccccctctcagaaggacacccctaaccctggggacagccttgacacccctggcccccggatccttgccttcctgcacccgccttccctgagcgaggctgccctggccgctgacccccgccgtttctgcagccctgacctccgtcgcctcctgggacccatcctggatggggcttcagtagcagccactcccagcaccccgctggccacacggcacccccaaagtcctctttcggctgatctcccagatgaactacctgtgggcaccgagaatgtgcacagactcttcacctcc

SEQ ID NO: 9337 - DNA, 573 bp, Homo sapiens
  source 1..573: mol_type = unassigned DNA
acccactcgtaactcgcacccgggtcctggctgcaccgcatcccctcctgcaccccctggatggcccttcagccaacgggggcctgggcgatggtcgaccacggagctgcgcaaggaaaagtcccgggatgcggcccgcagccggcgcagccaggagaccgaggtgctgtaccagctggctcacacgctgcccttcgcccgcggcgtcagcgcccacctggacaaggcctctatcatgcgcctcaccatcagctacctgcgcatgcaccgcctctgcgccgcaggccactaggatgtacccccacttccttgggggtgcatgggagtggaaccaggtgggagcagggggagaaccactggatgcctgctacctgaaggccctggagggcttcgtcatggtgctcaccgccgagggagacatggcttacctgtcggagaatgtcagcaaacacctgggcctcagtcagctggagctcattggacacagcatctttgatttcatccacccctgtgaccaagaggagcttcaggacgccctgaccccccagcagaccctgtccaggaggaaggtgg

SEQ ID NO: 9338 - DNA, 1709 bp, Homo sapiens
  source 1..1709: mol_type = unassigned DNA
actcgtaactcgcacccgggtcctggctgcaccgcatcccctcctgcaccccctggatggcccttcagccaacgggggcctgggcgatggtcgaccacggagctgcgcaaggaaaagtcccgggatgcggcccgcagccggcgcagccaggagaccgaggtgctgtaccagctggctcacacgctgcccttcgcccgcggcgtcagcgcccacctggacaaggcctctatcatgcgcctcaccatcagctacctgcgcatgcaccgcctctgcgccgcagctggagctcattggacacagcatctttgatttcatccacccctgtgaccaagaggagcttcaggacgccctgaccccccagcagaccctgtccaggaggaaggtggaggcccccacggagcggtgcttctccttgcgcatgaagagtacactcaccagccgcgggcgcaccctcaacctcaaggcggccacctggaaggtgctgaactgctctggacatatgagggcctacaagccacctgcgcagacttctccagctgggagccctgactcagagcccccgctgcagtgcctggtgctcatctgcgaagccatcccccacccaggcagcctggagcccccactgggccgaggggccttcctcagccgccacagcctggacatgaagttcacctactgtgacgacaggattgcagaagtggctggctatagtcccgatgacctgatcggctgttccgcctacgagtacatccacgcgctggactccgatgcggtcagcaagagcatccacaccttgctgagcaagggccaggcagtaacagggcagtatcgcttcctggcccggagtggtggctacctgtggacccagacccaggccacagtggtgtcagggggacggggcccccagtcggagagtatcgtctgtgtccattttttaatcagccaggtggaagagaccggagtggtgctgtccctggagcaaacggagcaacactctcgcagacccattcagcggggcgccccctctcagaaggacacccctaaccctggggacagccttgacacccctggcccccggatccttgccttcctgcacccgccttccctgagcgaggctgccctggccgctgacccccgccgtttctgcagccctgacctccgtcgcctcctgggacccatcctggatggggcttcagtagcagccactcccagcaccccgctggccacacggcacccccaaagtcctctttcggctgatctcccagatgaactacctgtgggcaccgagaatgtgcacagactcttcacctccgggaaagacactgaggcagtggagacagatttagatatagctcaggaccccagcaccccactcctgaacctgaatgagcccctgggttttcactttgtcacccagtctggagtgcagtggcacaaacacagctcaccgcagcctcgacctcctgggctcaagtgatcctcctacttcagctcccacaagtagctgggactgcagctatgtgccatcatgcctggctgatgtttatatgttttgtagagacgaggtttcaccatgttgcccaggctggtcttgaactcctgagttcaagcgatccacctgccttggcctcccaaagtgctgggattactggtatgaaccaccacgcccgacagtaaatatgttttgaatgaataaactctcataaatg

SEQ ID NO: 9339 - DNA, 539 bp, Homo sapiens
  source 1..539: mol_type = unassigned DNA
actcgcacccgggtcctggctgcaccgcatcccctcctgcaccccctggatggcccttcagccaacgggggcctgggcgatggtcgaccacggagctgcgcaaggaaaagtcccgggatgcggcccgcagccggcgcagccaggagaccgaggtgctgtaccagctggctcacacgctgcccttcgcccgcggcgtcagcgcccacctggacaaggcctctatcatgcgcctcaccatcagctacctgcgcatgcaccgcctctgcgccgcaggggagtggaaccaggtgggagcagggggagaaccactggatgcctgctacctgaaggccctggagggcttcgtcatggtgctcaccgccgagggagacatggcttacctgtcggagaatgtcagcaaacacctgggcctcagtcagctggagctcattggacacagcatctttgatttcatccacccctgtgaccaagaggagcttcaggacgccctgaccccccagcagagtcccaattgttgggatggagctggggaggcctga

SEQ ID NO: 9340 - DNA, 2101 bp, Homo sapiens
  source 1..2101: mol_type = unassigned DNA
cgcatcccctcctgcaccccctggatggcccttcagccaacgggggcctgggcgatggtcgaccacggagctgcgcaaggaaaagtcccgggatgcggcccgcagccggcgcagccaggagaccgaggtgctgtaccagctggctcacacgctgcccttcgcccgcggcgtcagcgcccacctggacaaggcctctatcatgcgcctcaccatcagctacctgcgcatgcaccgcctctgcgccgcaggggagtggaaccaggtgggagcagggggagaaccactggatgcctgctacctgaaggccctggagggcttcgtcatggtgctcaccgccgagggagacatggcttacctgtcggagaatgtcagcaaacacctgggcctcagtcagctggagctcattggacacagcatctttgatttcatccacccctgtgaccaagaggagcttcaggacgccctgaccccccagcagaccctgtccaggaggaaggtggaggcccccacggagcggtgcttctccttgcgcatgaagagtacactcaccagccgcgggcgcaccctcaacctcaaggcggccacctggaaggtgctgaactgctctggacatatgagggcctacaagccacctgcgcagacttctccagctgggagccctgactcagagcccccgctgcagtgcctggtgctcatctgcgaagccatcccccacccaggcagcctggagcccccactgggccgaggggccttcctcagccgccacagcctggacatgaagttcacctactgtgacgacaggattgcagaagtggctggctatagtcccgatgacctgatcggctgttccgcctacgagtacatccacgcgctggactccgatgcggtcagcaagagcatccacaccttgctgagcaagggccaggcagtaacagggcagtatcgcttcctggcccggagtggtggctacctgtggacccagacccaggccacagtggtgtcagggggacggggcccccagtcggagagtatcgtctgtgtccattttttaatcagccaggtggaagagaccggagtggtgctgtccctggagcaaacggagcaacactctcgcagacccattcagcggggcgccccctctcagaaggacacccctaaccctggggacagccttgacacccctggcccccggatccttgccttcctgcacccgccttccctgagcgaggctgccctggccgctgacccccgccgtttctgcagccctgacctccgtcgcctcctgggacccatcctggatggggcttcagtagcagccactcccagcaccccgctggccacacggcacccccaaagtcctctttcggctgatctcccagatgaactacctgtgggcaccgagaatgtgcacagactcttcacctccgggaaagacactgaggcagtggagacagatttagatatagctcaggatgctgatgctctggatttggagatgctggccccctacatctccatggatgatgacttccagctcaacgccagcgagcagctacccagggcctaccacagacctctgggggctgtcccccggccccgtgctcggagcttccatggcctgtcacctccagcccttgagccctccctgctaccccgctgggggagtgacccccggctgagctgctccagcccttccagaggggacccctcagcatcctctcccatggctggggctcggaagaggaccctggcccagagctcagaggacgaggacgagggagtggagctgctgggagtgagacctcccaaaaggtcccccagcccagaacacgaaaactttctgctctttcctctcagcctggtgtgttgggggattaatgggattctctggccctcattacctagctggcttaaacctactgttttatagataggaaaccagagaggggcaggggctggttgagggtcatacagaaagtcagtgggccagctgagactaaagcctgatcttctagtttcactaatgggtattaaaaacctctgcagtgaactgagattgcgccactgcaccccagcatgagcgacagaatgggaccttgtc

SEQ ID NO: 9341 - DNA, 2551 bp, Homo sapiens
  source 1..2551: mol_type = unassigned DNA
agataagtcagggaggggacagagcggccctaggcgcgccacagagaggagcgaggcgccagaggcaccatggactggcaagaccacaggtcgaccacggagctgcgcaaggaaaagtcccgggatgcggcccgcagccggcgcagccaggagaccgaggtgctgtaccagctggctcacacgctgcccttcgcccgcggcgtcagcgcccacctggacaaggcctctatcatgcgcctcaccatcagctacctgcgcatgcaccgcctctgcgccgcaggggagtggaaccaggtgggagcagggggagaaccactggatgcctgctacctgaaggccctggagggcttcgtcatggtgctcaccgccgagggagacatggcttacctgtcggagaatgtcagcaaacacctgggcctcagtcagctggagctcattggacacagcatctttgatttcatccacccctgtgaccaagaggagcttcaggacgccctgaccccccagcagaccctgtccaggaggaaggtggaggcccccacggagcggtgcttctccttgcgcatgaagagtacactcaccagccgcgggcgcaccctcaacctcaaggcggccacctggaaggtgctgaactgctctggacatatgagggcctacaagccacctgcgcagacttctccagctgggagccctgactcagagcccccgctgcagtgcctggtgctcatctgcgaagccatcccccacccaggcagcctggagcccccactgggccgaggggccttcctcagccgccacagcctggacatgaagttcacctactgtgacgacaggattgcagaagtggctggctatagtcccgatgacctgatcggctgttccgcctacgagtacatccacgcgctggactccgatgcggtcagcaagagcatccacaccttgctgagcaagggccaggcagtaacagggcagtatcgcttcctggcccggagtggtggctacctgtggacccagacccaggccacagtggtgtcagggggacggggcccccagtcggagagtatcgtctgtgtccattttttaatcagccaggtggaagagaccggagtggtgctgtccctggagcaaacggagcaacactctcgcagacccattcagcggggcgccccctctcagaaggacacccctaaccctggggacagccttgacacccctggcccccggatccttgccttcctgcacccgccttccctgagcgaggctgccctggccgctgacccccgccgtttctgcagccctgacctccgtcgcctcctgggacccatcctggatggggcttcagtagcagccactcccagcaccccgctggccacacggcacccccaaagtcctctttcggctgatctcccagatgaactacctgtgggcaccgagaatgtgcacagactcttcacctccgggaaagacactgaggcagtggagacagatttagatatagctcaggatgctgatgctctggatttggagatgctggccccctacatctccatggatgatgacttccagctcaacgccagcgagcagctacccagggcctaccacagacctctgggggctgtcccccggccccgtgctcggagcttccatggcctgtcacctccagcccttgagccctccctgctaccccgctgggggagtgacccccggctgagctgctccagcccttccagaggggacccctcagcatcctctcccatggctggggctcggaagaggaccctggcccagagctcagaggacgaggacgagggagtggagctgctgggagtgagacctcccaaaaggtcccccagcccagaacacgaaaactttctgctctttcctctcagcctgagtttccttctgacaggaggaccagccccagggagcctgcaggaccccagcaccccactcctgaacctgaatgagcccctgggcctgggcccctcactgctctctccgtactcagacgaggacactacccagcccgggggccccttccagccaagggcaggctcagcccaggctgactgagccggctcctctccccatctgccttctcctcccccagaaaggacctcaaccacactccacgccggcagccaacgcacaggatgggggcgccaggagaggggcccctctctcctctatgtaccccctgcccacctcgggcctacctcagccctcacccctctgcctgctcccaatctgggggctctctggggtggtctcagctcagtgacctctgggaggtggtccctggccccctcctccttctctcaggatttctcttggggttctcaatacttggttacctcattatccctttctctgcctctcttggctttattttggggaatcaggggtgaggagggttgggggggtcatatctgtgtttccaggttctggggagaacaatgatccacgggtcaacgtgatcacatttccttctatccttcttgtattattatttttatttttgtcaatttcatgatatggtttttaatcatga

SEQ ID NO: 9342 - DNA, 576 bp, Homo sapiens
  source 1..576: mol_type = unassigned DNA
cttttctctttcccgagtcaccaccagtgaatgctgcccatgccctcaggtcgaccacggagctgcgcaaggaaaagtcccgggatgcggcccgcagccggcgcagccaggagaccgaggtgctgtaccagctggctcacacgctgcccttcgcccgcggcgtcagcgcccacctggacaaggcctctatcatgcgcctcaccatcagctacctgcgcatgcaccgcctctgcgccgcaggggagtggaaccaggtgggagcagggggagaaccactggatgcctgctacctgaaggccctggagggcttcgtcatggtgctcaccgccgagggagacatggcttacctgtcggagaatgtcagcaaacacctgggcctcagtcagctggagctcattggacacagcatctttgatttcatccacccctgtgaccaagaggagcttcaggacgccctgaccccccagcagaccctgtccaggaggaaggtggaggcccccacggagcggtgcttctccttgcgcatgaagagtacactcaccagccgcgggcgcaccctcaacctcaaggcggcca

SEQ ID NO: 9343 - DNA, 2101 bp, Homo sapiens
  source 1..2101: mol_type = unassigned DNA
cttttctctttcccgagtcaccaccagtgaatgctgcccatgccctcaggtcgaccacggagctgcgcaaggaaaagtcccgggatgcggcccgcagccggcgcagccaggagaccgaggtgctgtaccagctggctcacacgctgcccttcgcccgcggcgtcagcgcccacctggacaaggcctctatcatgcgcctcaccatcagctacctgcgcatgcaccgcctctgcgccgcagctggagctcattggacacagcatctttgatttcatccacccctgtgaccaagaggagcttcaggacgccctgaccccccagcagaccctgtccaggaggaaggtggaggcccccacggagcggtgcttctccttgcgcatgaagagtacactcaccagccgcgggcgcaccctcaacctcaaggcggccacctggaaggtgctgaactgctctggacatatgagggcctacaagccacctgcgcagacttctccagctgggagccctgactcagagcccccgctgcagtgcctggtgctcatctgcgaagccatcccccacccaggcagcctggagcccccactgggccgaggggccttcctcagccgccacagcctggacatgaagttcacctactgtgacgacaggattgcagaagtggctggctatagtcccgatgacctgatcggctgttccgcctacgagtacatccacgcgctggactccgatgcggtcagcaagagcatccacaccttgctgagcaagggccaggcagtaacagggcagtatcgcttcctggcccggagtggtggctacctgtggacccagacccaggccacagtggtgtcagggggacggggcccccagtcggagagtatcgtctgtgtccattttttaatcagccaggtggaagagaccggagtggtgctgtccctggagcaaacggagcaacactctcgcagacccattcagcggggcgccccctctcagaaggacacccctaaccctggggacagccttgacacccctggcccccggatccttgccttcctgcacccgccttccctgagcgaggctgccctggccgctgacccccgccgtttctgcagccctgacctccgtcgcctcctgggacccatcctggatggggcttcagtagcagccactcccagcaccccgctggccacacggcacccccaaagtcctctttcggctgatctcccagatgaactacctgtgggcaccgagaatgtgcacagactcttcacctccgggaaagacactgaggcagtggagacagatttagatatagctcaggatgctgatgctctggatttggagatgctggccccctacatctccatggatgatgacttccagctcaacgccagcgagcagctacccagggcctaccacagacctctgggggctgtcccccggccccgtgctcggagcttccatggcctgtcacctccagcccttgagccctccctgctaccccgctgggggagtgacccccggctgagctgctccagcccttccagaggggacccctcagcatcctctcccatggctggggctcggaagaggaccctggcccagagctcagaggacgaggacgagggagtggagctgctgggagtgagacctcccaaaaggtcccccagcccagaacacgaaaactttctgctctttcctctcagcctgagtttccttctgacaggaggaccagccccagggagcctgcaggaccccagcaccccactcctgaacctgaatgagcccctgggttttcactttgtcacccagtctggagtgcagtggcacaaacacagctcaccgcagcctcgacctcctgggctcaagtgatcctcctacttcagctcccacaagtagctgggactgcagctatgtgccatcatgcctggctgatgtttatatgttttgtagagacgaggtttcaccatgttgcccaggctggtcttgaactcctgagttcaagcgatccacctgccttggcctcccaaagtgctgggattactggtatgaaccaccacgcccgacagtaaatatgttttgaatgaataaactctcataaatg

SEQ ID NO: 9344 - DNA, 767 bp, Homo sapiens
  source 1..767: mol_type = unassigned DNA
aggccctgcttctaattccagtgcttcttggtcctgctttcttccttgggaatccaggccactaggatgtacccccacttccttgggggtgcatgggagtggaaccaggtgggagcagggggagaaccactggatgcctgctacctgaaggccctggagggcttcgtcatggtgctcaccgccgagggagacatggcttacctgtcggagaatgtcagcaaacacctgggcctcagtcagctggagctcattggacacagcatctttgatttcatccacccctgtgaccaagaggagcttcaggacgccctgaccccccagcagaccctgtccaggaggaaggtggaggcccccacggagcggtgcttctccttgcgcatgaagagtacactcaccagccgcgggcgcaccctcaacctcaaggcggccacctggaaggtgctgaactgctctggacatatgagggcctacaagccacctgcgcagacttctccagctgggagccctgactcagagcccccgctgcagtgcctggtgctcatctgcgaagccatcccccacccaggcagcctggagcccccactgggccgaggggccttcctcagccgccacagcctggacatgaagttcacctactgtgacgacaggattgcagaagtggctggctatagtcccgatgacctgatcggctgttccgcctacgagtacatccacgcgctggactccgatgcggtcagcaagagcatccacaccttgctgagcaaggg

SEQ ID NO: 9345 - DNA, 549 bp, Homo sapiens
  source 1..549: mol_type = unassigned DNA
cttgggaatccaggccactaggatgtacccccacttccttgggggtgcatgtaagtttctctgaatgaggaaaggcagagggaggctagcccagggtcagtccataattcagaccataactgactagagatgcccccatccccctgccccgggcaccaggggagtggaaccaggtgggagcagggggagaaccactggatgcctgctacctgaaggccctggagggcttcgtcatggtgctcaccgccgagggagacatggcttacctgtcggagaatgtcagcaaacacctgggcctcagtcagctggagctcattggacacagcatctttgatttcatccacccctgtgaccaagaggagcttcaggacgccctgaccccccagcagaccctgtccaggaggaaggtggaggcccccacggagcggtgcttctccttgcgcatgaagagtacactcaccagccgcgggcgcaccctcaacctcaaggcggccacctggaaggtgctgaactgctctggacatatgagggcctacaagccacctgcgc

SEQ ID NO: 9346 - DNA, 544 bp, Homo sapiens
  source 1..544: mol_type = unassigned DNA
actcagagcccccgctgcagtgcctggtgctcatctgcgaagccatcccccacccaggcagcctggagcccccactgggccgaggggccttcctcagccgccacagcctggacatgaagttcacctactgtgacgacaggaatggtgactctggattcagcctgcttgagtgtcagtcttggctgtgtatccttagccaaatgacttcacctctctgtgccacaatttcctcacctatactgtggaatcataacagaacctgccttgtacagtcgttctgagcagctcagattgcagaagtggctggctatagtcccgatgacctgatcggctgttccgcctacgagtacatccacgcgctggactccgatgcggtcagcaagagcatccacaccttgctgagcaagggccaggcagtaacagggcagtatcgcttcctggcccggagtggtggctacctgtggacccagacccaggccacagtggtgtcagggggacggggcccccagtcggagagtatcgtctgtgtccattttttaatcag

SEQ ID NO: 9347 - DNA, 313 bp, Homo sapiens
  source 1..313: mol_type = unassigned DNA
gagccaaggaccctccctgactcccacctccctttctgccttgtaccccagccaggtggaagagaccggagtggtgctgtccctggagcaaacggagcaacactctcgcagacccattcagcggggcgccccctctcagaaggacacccctaaccctggggacagccttgacacccctggcccccggatccttgccttcctgcacccgccttccctgagcgaggctgccctggccgctgacccccgccgtttctgcagccctgacctccgtcgcctcctgggacccatcctggatggggcttcagtagcagcc

SEQ ID NO: 9348 - DNA, 1031 bp, Homo sapiens
  source 1..1031: mol_type = unassigned DNA
ccctggcccccggatccttgccttcctgcacccgccttccctgagcgaggctgccctggccgctgacccccgccgtttctgcagccctgacctccgtcgcctcctgggacccatcctggatggggcttcagtagcagccactcccagcaccccgctggccacacggcacccccaaagtcctctttcggctgatctcccagatgaactacctgtgggcaccgagaatgtgcacagactcttcacctccgggaaagacactgaggcagtggagacagatttagatatagctcagatgaggaaactgaagctcagactgttgaccacaggcacagaactcagaagtgatggtgctgggacttcagccaaggtccacccaagtccaaggctcatcctcttacctccctcctgccctccgcaggatgctgatgctctggatttggagatgctggccccctacatctccatggatgatgacttccagctcaacgccagcgagcagctacccagggcctaccacagacctctgggggctgtcccccggccccgtgctcggagcttccatggcctgtcacctccagcccttgagccctccctgctaccccgctgggggagtgacccccggctgagctgctccagcccttccagaggggacccctcagcatcctctcccatggctggggctcggaagaggaccctggcccagagctcagaggacgaggacgagggagtggagctgctgggagtgagacctcccaaaaggtcccccagcccagaacacgaaaactttctgctctttcctctcagcctggtgtgttgggggattaatgggattctctggccctcattacctagctggcttaaacctactgttttatagataggaaaccagagaggggcaggggctggttgagggtcatacagaaagtcagtgggccagctgagactaaagcctgatcttctagtttcactaatgggtattaaaaacctctgcagtgaactgagattgcgccactgcaccccagcatgagcga

SEQ ID NO: 9349 - DNA, 2004 bp, Homo sapiens
  source 1..2004: mol_type = unassigned DNA
ccgagggctccggagcggcgactggcgagccatggcgctggggctgcagcgcgcaaggtcgaccacggagctgcgcaaggaaaagtcccgggatgcggcccgcagccggcgcagccaggagaccgaggtgctgtaccagctggctcacacgctgcccttcgcccgcggcgtcagcgcccacctggacaaggcctctatcatgcgcctcaccatcagctacctgcgcatgcaccgcctctgcgccgcaggggagtggaaccaggtgggagcagggggagaaccactggatgcctgctacctgaaggccctggagggcttcgtcatggtgctcaccgccgagggagacatggcttacctgtcggagaatgtcagcaaacacctgggcctcagtcagctggagctcattggacacagcatctttgatttcatccacccctgtgaccaagaggagcttcaggacgccctgaccccccagcagaccctgtccaggaggaaggtggaggcccccacggagcggtgcttctccttgcgcatgaagagtacactcaccagccgcgggcgcaccctcaacctcaaggcggccacctggaaggtgctgaactgctctggacatatgagggcctacaagccacctgcgcagacttctccagctgggagccctgactcagagcccccgctgcagtgcctggtgctcatctgcgaagccatcccccacccaggcagcctggagcccccactgggccgaggggccttcctcagccgccacagcctggacatgaagttcacctactgtgacgacaggattgcagaagtggctggctatagtcccgatgacctgatcggctgttccgcctacgagtacatccacgcgctggactccgatgcggtcagcaagagcatccacacctgtatgtatcccatttccccaggtgcgaagccagctgccacatggcccccagctgacaccaggaccccccagctccccataccccaggatgcactgcctccccacctcaacaccagctccctgctccccaagccccaaggaactgtctccttccttgccccctcatacccagtccccagatatttctctccccatttgcccccttggtggccctgatccctcccgatccccctcctcagtgctgagcaagggccaggcagtaacagggcagtatcgcttcctggcccggagtggtggctacctgtggacccagacccaggccacagtggtgtcagggggacggggcccccagtcggagagtatcgtctgtgtccattttttaatcaggtaagcaggaggaggggctggggtggctgtgtgtgggcctgatctgcatgtgtggacaggtgtgtgtgtgtgtgtgtgtgtgtgcgtatgagcatgcatgtgtatcatgcataagtgtatgtgagggagtgtgcacgtgtacacatatgaggaatgtgtgtcaccatgtaaatgccggtgtgtgtgtctgcatggacacaggtatgtgtatgggtgtgtagactgttaatttttttttttttttttttttttttttttgcgtgaacctctgcttaagtggattgttaattcaaattagaaaggggtctttatttggcctggcatggtggctcatgcctgtaatcctagcactttgggaggctgaggtgggcggattgcctgagctcaggagttcgaaaccagcctgggcaacatgacgaaatgctgtttctactaataataccaaaaattagccgggtgtggtgacacatgcctgtaatcccaactactcgggaggctgaggcacgagaatcattagaacccaggtggtggaggctgcagtgagccgagattgcgtcagtgcactctggcctcggcaacagagcgagactctgtctcaaacaaacaaacaaacaaacaaacaaaaggactctatattcaagttaaaataagaagtgtaacagaatcatggggtcttttttgctttttaaattttgatgtggctcacacct

SEQ ID NO: 9350 - DNA, 562 bp, Homo sapiens
  source 1..562: mol_type = unassigned DNA
ccgagggctccggagcggcgactggcgagccatggcgctggggctgcagcgcgcaaggtcgaccacggagctgcgcaaggaaaagtcccgggatgcggcccgcagccggcgcagccaggagaccgaggtgctgtaccagctggctcacacgctgcccttcgcccgcggcgtcagcgcccacctggacaaggcctctatcatgcgcctcaccatcagctacctgcgcatgcaccgcctctgcgccgcagctggagctcattggacacagcatctttgatttcatccacccctgtgaccaagaggagcttcaggacgccctgaccccccagcagaccctgtccaggaggaaggtggaggcccccacggagcggtgcttctccttgcgcatgaagagtacactcaccagccgcgggcgcaccctcaacctcaaggcggccacctggaaggtgctgaactgctctggacatatgagggcctacaagccacctgcgcagacttctccagctgggagccctgactcagagcccccgctgcagtgcctggtgctcatctgcgaagccat

SEQ ID NO: 9351 - DNA, 1373 bp, Homo sapiens
  source 1..1373: mol_type = unassigned DNA
ggctgggacggctgtgggtggggagaagccgggaggactgggtgcgcctgcagggatcggaagccggttggggtgtgagaggttttctcgctctagggagattcttcaagcaatcactatgtcaacagacacaggtgtttcccttccttcatatgaggaagatcagggatcaaaactcattcgaaaagctaaagaggcaccattcgtacccgttggaatagcgggttttgcagcaattgttgcatatggattatataaactgaagagcaggggaaatactaaaatgtccattcatctgatccacatgcgtgtggcagcccaaggctttgttgtaggagcaatgactgttggtatgggctattccatgtatcgggaattctgggcaaaacctaagccttagaagaagagatgctgtcttggtcttgttggaggagcttgctttagttagatgtcttattattaaagttacctattattgttggaaataaactaatttgtatgggtttagatggtaacatggcattttgaatattggcttcctttcttgcaggcttgatttgcttggtgaccgaattactagtgactagtttactaactaggtcattcaaggaagtcaagttaacttaaacatgtcacctaaatgcacttgatggtgttgaaatgtccaccttcttaaatttttaagatgaacttagttctaaagaagataacaggccaatcctgaaggtactccctgtttgctgcagaatgtcagatattttggatgttgcataagagtcctatttgccccagttaattcaacttttgtctgcctgttttgtggactggctggctctgttagaactctgtccaaaaagtgcatggaatataacttgtaaagcttcccacaattgacaatatatatgcatgtgtttaaaccaaatccagaaagcttaaacaatagagctgcataatagtatttattaaagaatcacaactgtaaacatgagaataatttaaggattctagtttagttttttgtaattgcaaattatatttttgctgctgatatattagaataatttttaaatgtcatcttgaaatagaaatatgtattttaagcactcacgcaaaggtaaatgaacacgttttaaatgtgtgtgttgctaattttttccataagaattgtaaacattgaactgaacaaattacctataatggatttggttaatgacttatgagcaagctggtttggccagacagtatacccaaacttttatataatatacagaaggctatcacacttgtgaaattctcttgtctaatctgaatttgcattccatggtgttaacatggtatatgtattgttattaaagtaagtgacccatgtcaaa

SEQ ID NO: 9352 - DNA, 1322 bp, Homo sapiens
  source 1..1322: mol_type = unassigned DNA
gcgcctgcagggatcggaagccggttggggtgtgagaggttttctcgctctagaacctcatagaaattctttctcagggagattcttcaagcaatcactatgtcaacagacacaggtgtttcccttccttcatatgaggaagatcagggatcaaaactcattcgaaaagctaaagaggcaccattcgtacccgttggaatagcgggttttgcagcaattgttgcatatggattatataaactgaagagcaggggaaatactaaaatgtccattcatctgatccacatgcgtgtggcagcccaaggctttgttgtaggagcaatgactgttggtatgggctattccatgtatcgggaattctgggcaaaacctaagccttagaagaagagatgctgtcttggtcttgttggaggagcttgctttagttagatgtcttattattaaagttacctattattgttggaaataaactaatttgtatgggtttagatggtaacatggcattttgaatattggcttcctttcttgcaggcttgatttgcttggtgaccgaattactagtgactagtttactaactaggtcattcaaggaagtcaagttaacttaaacatgtcacctaaatgcacttgatggtgttgaaatgtccaccttcttaaatttttaagatgaacttagttctaaagaagataacaggccaatcctgaaggtactccctgtttgctgcagaatgtcagatattttggatgttgcataagagtcctatttgccccagttaattcaacttttgtctgcctgttttgtggactggctggctctgttagaactctgtccaaaaagtgcatggaatataacttgtaaagcttcccacaattgacaatatatatgcatgtgtttaaaccaaatccagaaagcttaaacaatagagctgcataatagtatttattaaagaatcacaactgtaaacatgagaataatttaaggattctagtttagttttttgtaattgcaaattatatttttgctgctgatatattagaataatttttaaatgtcatcttgaaatagaaatatgtattttaagcactcacgcaaaggtaaatgaacacgttttaaatgtgtgtgttgctaattttttccataagaattgtaaacattgaactgaacaaattacctataatggatttggttaatgacttatgagcaagctggtttggccagacagtatacccaaacttttatataatatacagaaggctatcacacttgtgaaattctcttgtctaatctgaatttgcattccatggtgttaacatggtatatg

SEQ ID NO: 9353 - DNA, 983 bp, Homo sapiens
  source 1..983: mol_type = unassigned DNA
gcgcctgcagggatcggaagccggttggggtgtgagaggttttctcgctctaggaatagcgggttttgcagcaattgttgcatatggattatataaactgaagagcaggggaaatactaaaatgtccattcatctgatccacatgcgtgtggcagcccaaggctttgttgtaggagcaatgactgttggtatgggctattccatgtatcgggaattctgggcaaaacctaagccttagaagaagagatgctgtcttggtcttgttggaggagcttgctttagttagatgtcttattattaaagttacctattattgttggaaataaactaatttgtatgggtttagatggtaacatggcattttgaatattggcttcctttcttgcaggcttgatttgcttggtgaccgaattactagtgactagtttactaactaggtcattcaaggaagtcaagttaacttaaacatgtcacctaaatgcacttgatggtgttgaaatgtccaccttcttaaatttttaagatgaacttagttctaaagaagataacaggccaatcctgaaggtactccctgtttgctgcagaatgtcagatattttggatgttgcataagagtcctatttgccccagttaattcaacttttgtctgcctgttttgtggactggctggctctgttagaactctgtccaaaaagtgcatggaatataacttgtaaagcttcccacaattgacaatatatatgcatgtgtttaaaccaaatccagaaagcttaaacaatagagctgcataatagtatttattaaagaatcacaactgtaaacatgagaataatttaaggattctagtttagttttttgtaattgcaaattatatttttgctgctgatatattagaataatttttaaatgtcatcttgaaatagaaatatgtattttaagcactcacgcaaaggtaaatgaacacgttttaaatgtgtgtgttg

SEQ ID NO: 9354 - DNA, 741 bp, Homo sapiens
  source 1..741: mol_type = unassigned DNA
gtgcgcctgcagggatcggaagccggttggggtgtgagaggttttctcgctctagggagattcttcaagcaatcactatgtcaacagacacaggtgtttcccttccttcatatgaggaagatcagggatcaaaactcattcgaaaagctaaagaggcaccattcgtacccgttggaatagcgggttttgcagcaattgttgcatatggattatataaactgaagagcaggggaaatactaaaatgtccattcatctgatccacatgcgtgtggcagcccaaggctttgttgtaggagcaatgactgttgcattctttttctttaggtatgggctattccatgtatcgggaattctgggcaaaacctaagccttagaagaagagatgctgtcttggtcttgttggaggagcttgctttagttagatgtcttattattaaagttacctattattgttggaaataaactaatttgtatgggtttagatggtaacatggcattttgaatattggcttcctttcttgcaggcttgatttgcttggtgaccgaattactagtgactagtttactaactaggtcattcaaggaagtcaagttaacttaaacatgtcacctaaatgcacttgatggtgttgaaatgtccaccttcttaaatttttaagatgaacttagttctaaagaagataacaggccaatcctgaaggtactccctgtttgctgcagaatgtcagatattttggatg

SEQ ID NO: 9355 - DNA, 585 bp, Homo sapiens
  source 1..585: mol_type = unassigned DNA
aagcgaaacaagccgggggactgcgagccagggactcgggccgcggggcgggaagaagtggggcagcgcttggccaggccgaaaggactttgggggtgggggctgggagtccgtgtctcgaatgagggaggagaggtggagttgccggggctcaggcccggcctcgagcatgggcggatgagaggagtcgggagccgaggcctagggtccttcgggtgaggggagacggagccagcgaggagatggagcagaagcttgtggaggagattcttcaagcaatcactatgtcaacagacacaggtgtttcccttccttcatatgaggaagatcagggatcaaaactcattcgaaaagctaaagaggcaccattcgtacccgttggaatagcgggttttgcagcaattgttgcatatggattatataaactgaagagcaggggaaatactaaaatgtccattcatctgatccacatgcgtgtggcagcccaaggctttgttgtaggagcaatgactgttggtatgggctattccatgtatcgggaattctgggcaaaacctaagccttagaagaagagatgctgtcttg

SEQ ID NO: 9356 - DNA, 8013 bp, Homo sapiens
  source 1..8013: mol_type = unassigned DNA
gcccctgactcggctcctcgcggcgacatggatcggatggccagctccatgaagcaggtgcccaacccactgcccaaggtgctgagccggcgcggggtcggcgctgggctggaggcggcggagcgcgagagcttcgagcggactcagactgtcagcatcaataaggccattaatacgcaggaagtggctgtaaaggaaaaacacgccagaacgtgcatactgggcacccaccatgagaaaggggcacagaccttctggtctgttgtcaaccgcctgcctctgtctagcaacgcagtgctctgctggaagttctgccatgtgttccacaaactcctccgagatggacacccgaacgtcctgaaggactctctgagatacagaaatgaattgagtgacatgagcaggatgtggggccacctgagcgaggggtatggccagctgtgcagcatctacctgaaactgctaagaaccaagatggagtaccacaccaaaaatcccaggttcccaggcaacctgcagatgagtgaccgccagctggacgaggctggagaaagtgacgtgaacaactttttccagttaacagtggagatgtttgactacctggagtgtgaactcaacctcttccaaacagtattcaactccctggacatgtcccgctctgtgtccgtgacggcagcagggcagtgccgcctcgccccgctgatccaggtcatcttggactgcagccacctttatgactacactgtcaagcttctcttcaaactccactcctgcctcccagctgacaccctgcaaggccaccgggaccgcttcatggagcagtttacaaagttgaaagatctgttctaccgctccagcaacctgcagtacttcaagcggctcattcagatcccccagctgcctgagaacccacccaacttcctgcgagcctcagccctgtcagaacatatcagccctgtggtggtgatccctgcagaggcctcatcccccgacagcgagccagtcctagagaaggatgacctcatggacatggatgcctctcagcagaatttatttgacaacaagtttgatgacatctttggcagttcattcagcagtgatcccttcaatttcaacagtcaaaatggtgtgaacaaggatgagaaggaccacttaattgagcgactatacagagagatcagtggattgaaggcacagctagaaaacatgaagactgagagccagcgggttgtgctgcagctgaagggccacgtcagcgagctggaagcagatctggccgagcagcagcacctgcggcagcaggcggccgacgactgtgaattcctgcgggcagaactggacgagctcaggaggcagcgggaggacaccgagaaggctcagcggagcctgtctgagatagaaaggaaagctcaagccaatgaacagcgatatagcaagctaaaggagaagtacagcgagctggttcagaaccacgctgacctgctgcggaagaatgcagaggtgaccaaacaggtgtccatggccagacaagcccaggtagatttggaacgagagaaaaaagagctggaggattcgttggagcgcatcagtgaccagggccagcggaagactcaagaacagctggaagttctagagagcttgaagcaggaacttgccacaagccaacgggagcttcaggttctgcaaggcagcctggaaacttctgcccagtcagaagcaaactgggcagccgagttcgccgagctagagaaggagcgggacagcctggtgagtggcgcagctcatagggaggaggaattatctgctcttcggaaagaactgcaggacactcagctcaaactggccagcacagaggaatctatgtgccagcttgccaaagaccaacgaaaaatgcttctggtggggtccaggaaggctgcggagcaggtgatacaagacgccctgaaccagcttgaagaacctcctctcatcagctgcgctgggtctgcagatcacctcctctccacggtcacatccatttccagctgcatcgagcaactggagaaaagctggagccagtatctggcctgcccagaagacatcagtggacttctccattccataaccctgctggcccacttgaccagcgacgccattgctcatggtgccaccacctgcctcagagccccacctgagcctgccgactcactgaccgaggcctgtaagcagtatggcagggaaaccctcgcctacctggcctccctggaggaagagggaagccttgagaatgccgacagcacagccatgaggaactgcctgagcaagatcaaggccatcggcgaggagctcctgcccaggggactggacatcaagcaggaggagctgggggacctggtggacaaggagatggcggccacttcagctgctattgaaactgccacggccagaatagaggagatgctcagcaaatcccgagcaggagacacaggagtcaaattggaggtgaatgaaaggatccttggttgctgtaccagcctcatgcaagctattcaggtgctcatcgtggcctctaaggacctccagagagagattgtggagagcggcaggggtacagcatcccctaaagagttttatgccaagaactctcgatggacagaaggacttatctcagcctccaaggctgtgggctggggagccactgtcatggtggatgcagctgatctggtggtacaaggcagagggaaatttgaggagctaatggtgtgttctcatgaaattgctgctagcacagcccagcttgtggctgcatccaaggtgaaagctgataaggacagccccaacctagcccagctgcagcaggcctctcggggagtgaaccaggccactgccggcgttgtggcctcaaccatttccggcaaatcacagatcgaagagacagacaacatggacttctcaagcatgacgctgacacagatcaaacgccaagagatggattctcaggttagggtgctagagctagaaaatgaattgcagaaggagcgtcaaaaactgggagagcttcggaaaaagcactacgagcttgctggtgttgctgagggctgggaagaaggaacagaggcatctccacctacactgcaagaagtggtaaccgaaaaagaatagagccaaaccaacaccccatatgtcagtgtaaatccttgttacctatctcgtgtgtgttatttccccagccacaggccaaatccttggagtcccaggggcagccacaccactgccattacccagtgccgaggacatgcatgacacttccaaagactccctccatagcgacaccctttctgtttggacccatggtcatctctgttcttttcccgcctccctagttagcatccaggctggccagtgctgcccatgagcaagcctaggtacgaagaggggtggtggggggcagggccactcaacagagaggaccaacatccagtcctgctgactatttgacccccacaacaatgggtatccttaatagaggagctgcttgttgtttgttgacagcttggaaagggaagatcttatgccttttcttttctgttttcttctcagtcttttcagtttcatcatttgcacaaacttgtgagcatcagagggctgatggattccaaaccaggacactaccctgagatctgcacagtcagaaggacggcaggagtgtcctggctgtgaatgccaaagccattctccccctctttgggcagtgccatggatttccactgcttcttatggtggttggttgggttttttggttttgtttttttttttaagtttcactcacatagccaactctcccaaagggcacacccctggggctgagtctccagggccccccaactgtggtagctccagcgatggtgctgcccaggcctctcggtgctccatctccgcctccacactgaccaagtgctggcccacccagtccatgctccagggtcaggcggagctgctgagtgacagctttcctcaaaaagcagaaggagagtgagtgcctttccctcctaaagctgaatcccggcggaaagcctctgtccgcctttacaagggagaagacaacagaaagagggacaagagggttcacacagcccagttcccgtgacgaggctcaaaaacttgatcacatgcttgaatggagctggtgagatcaacaacactacttccctgccggaatgaactgtccgtgaatggtctctgtcaagcgggccgtctcccttggcccagagacggagtgtgggagtgattcccaactcctttctgcagacgtctgccttggcatcctcttgaataggaagatcgttccaccttctacgcaattgacaaacccggaagatcagatgcaattgctcccatcagggaagaaccctatacttggtttgctacccttagtatttattactaacctcccttaagcagcaacagcctacaaagagatgcttggagcaatcagaacttcaggtgtgactctagcaaggctcatctttctgcccggctacatcagccttcaagaatcagaagaaaggccaaggtgctggactgttactgacttggatcccaaagcaaggagatcatttggagctcttgggtcagagaaaatgagaaaggacagagccagcggctccaactcctttcagccacatgccccaggctctcgctgccctgtggacaggatgaggacagagggcacatgaacagcttgccagggatgggcagcccaacagcacttttcctcttctagatggaccccagcatttaagtgaccttctgatcttggaaaaacagcgtcttccttctttatctatagcaactcattggtggtagccatcaagcacttcccaggatctgctccaacagaatattgctaggttttgctacatgacgggttgtgagacttctgtttgatcactgtgaaccaacccccatctccctagcccacccccctccccaactccctctctgtgcattttctaagtgggacattcaaaaaactctctcccaggacctcggatgaccatactcagacgtgtgacctccatactgggctaaggaagtatcagcactagaaattgggcagtcttaatgttgaatgctgctttctgcttagtatttttttgattcaaggctcagaaggaatggtgcgtggcttccctgtcccagttgtggcaactaaaccaatcggtgtgttcttgatgcgggtcaacatttccaaaagtggctagtcctcacttctagatctcagccattctaactcatatgttcccaattaccaaggggtggccgggcacagtggctcacgcctgtaatcccagcactttgagaggctgaggtggtaggatcacctgaggtcaggagttcaagaccagcctgtccaacatggtgaaacccccatctctactaaaaataccaaaaattagccgagcgtagtgacgggtgcccgtaatcccagctactcaggaggctgagacaggagaatcacctgaaccccagaggcagaggttgcagtgagctgagatcacgccattgtactccagcctgggcaacaagagcaaaactccgtctcaaaaaaaaaaaaaaattacaaatggggcaaacagtctagtgtaatggatcaaattaagattctctgcccagccgggcacagtggcgcatgcctgtaatcccagaactttgggaggccaagacgggatgattgcttgagctcaggagtttgagaccaggctgggcatcatagcaagacctcatctctactaaaattcaaaaacaaaattagccgggcatgatggtgcatgcctgtagtctcagctagttggggagctaaggtgggagaattgcttgagcttgggaagtcgaggctgcagtcagccctgattgtgccagtgcactccggcctgggtgacagagtgagaccctgtctcaaaaaaaaaaagattctgtgtcagagcccagcccaggagtttgaggctgcaatgagccatgatttcccactgcactccagcctgagtgacagagcgagactccatctctttaaaaacaaacaaaaaattatctgaatgatcctgtctctaaaaagaagccacagaaatgtttaaaaacttcatcgacttagcctgagtcataacggttaagaaagcacttaaacagaagcagaggctaattcagtgtcacatgaggaagtagctgtcagatgtcacataattactttcgtaatagctcagattagaatggctaccccattctctagacaaaatcaaattgtcctattgtgactcttctaaaaatgaagatgaagagctatttaatgacacaccttggattaaaacgggaatcacatcttaaagctaaaaatgaacctgcaagccttctaaatgagtcactgagcatcactagtgacaagtctcgggtgagcgtaaatgggtcatgacaagatgggacagcaacaaaatcatggcttaggatcgacaagaagttaaaaaacagctgcatctgttacttaagtttgtaagacagtgccctgagacctctagagaaaagatgtttgtttacataagagaaagaggccagacatggtgtctcacacgtttaatcccagcactttgggaggcaggggcgggtggatcacctgaggtcaggagttcaagactagcctggccaacatggtgaaaccccgtctctactaaaaatacaaaaattagccgggcatggtggcaggcgcctataatcccagctactggggaggctgaggcaggagaatcacttgaacccgggggacagaggttgtagtgagccaagatcgcaccactgcactccagcctgggtcacagagtgagactccatctcaaaaaaaaaaaagagagagagagagaaagaaatagaagagaagagccatcttggcagggttattttatatctgagcaaggagtttaaatgagactagtttagattgtctgctgatgcagccgtccatagcagtacccctaaaatcccaccagaatacgggtccctctaacccagtggctggaagaaccactgtctagagcaacttttcttggaactgtcccagctaccaagtcagacaccaaggtttatgccaccaggtaacacgggaatcacaggtacatgtcgctccggtcagattagttggctttggcccctcgaccctgtgcaggagctagttctcagcttgcagctggaagttccctcttagctccttagtctagaggggtctcctggctccatttgaccctggtctttaataaccggtcagcatcttgctaccttctaccacctttccaaatctctggaaatcctgccagggaaagcctccagttccaacattggctttccaagcaaactggctttgccctctctctgccatccttgtcctccagagactgcaccacctgtagcatagaaaaccaccaccacggacctgccagccatcggcgcagcaaaccagccagctgtttgctgccaaattccttcctctcccaggtccagaccaaatacaagatcagcaccacaccgtggtgttgtcaggagccaaagcaacaggaaacaattcaatgctgttgggttcgattctgagagtagatttttccagacatgtctttcaggtgaccctcaactacctcaggtttgaaggccctaaatgaaactgattaccactcatagggacaaaccgagggggttcggttacatcttggtgataatgcagttgtctcaaacttataacagactctttcacatttcagtttgcagggatagggttgggtttgtttttcttctgtttttaacctttcccctgggtttccattagggtagttccttgaaatgaatttcatttttcactgagtgcctaccttcccagggcaggtggccactggcttctgtttccctccaacaatacttttattatggtattaagacctttctttgtataatacattgcatctgtgttttcaatttttcaaataaatatttccgcctggc

SEQ ID NO: 9357 - DNA, 7066 bp, Homo sapiens
  source 1..7066: mol_type = unassigned DNA
gactcggctcctcgcggcgacatggatcggatggccagctccatgaagcaggtgcccaacccactgcccaaggtgctgagccggcgcggggtcggcgctgggctggaggcggcggagcgcgagagcttcgagcggactcagactgtcagcatcaataaggccattaatacgcaggaagtggctgtaaaggaaaaacacgccagaacgtgcatactgggcacccaccatgagaaaggggcacagaccttctggtctgttgtcaaccgcctgcctctgtctagcaacgcagtgctctgctggaagttctgccatgtgttccacaaactcctccgagatggacacccgaacgtcctgaaggactctctgagatacagaaatgaattgagtgacatgagcaggatgtggggccacctgagcgaggggtatggccagctgtgcagcatctacctgaaactgctaagaaccaagatggagtaccacaccaaaaatcccaggttcccaggcaacctgcagatgagtgaccgccagctggacgaggctggagaaagtgacgtgaacaactttttccagttaacagtggagatgtttgactacctggagtgtgaactcaacctcttccaaacagtattcaactccctggacatgtcccgctctgtgtccgtgacggcagcagggcagtgccgcctcgccccgctgatccaggtcatcttggactgcagccacctttatgactacactgtcaagcttctcttcaaactccactcctgcctcccagctgacaccctgcaaggccaccgggaccgcttcatggagcagtttacaaagttgaaagatctgttctaccgctccagcaacctgcagtacttcaagcggctcattcagatcccccagctgcctgagaacccacccaacttcctgcgagcctcagccctgtcagaacatatcagccctgtggtggtgatccctgcagaggcctcatcccccgacagcgagccagtcctagagaaggatgacctcatggacatggatgcctctcagcagaatttatttgacaacaagtttgatgacatctttggcagttcattcagcagtgatcccttcaatttcaacagtcaaaatggtgtgaacaaggatgagaaggaccacttaattgagcgactatacagagagatcagtggattgaaggcacagctagaaaacatgaagactgagagccagcgggttgtgctgcagctgaagggccacgtcagcgagctggaagcagatctggccgagcagcagcacctgcggcagcaggcggccgacgactgtgaattcctgcgggcagaactggacgagctcaggaggcagcgggaggacaccgagaaggctcagcggagcctgtctgagatagaaaggaaagctcaagccaatgaacagcgatatagcaagctaaaggagaagtacagcgagctggttcagaaccacgctgacctgctgcggaagaatgcagaggtgaccaaacaggtgtccatggccagacaagcccaggtagatttggaacgagagaaaaaagagctggaggattcgttggagcgcatcagtgaccagggccagcggaagactcaagaacagctggaagttctagagagcttgaagcaggaacttgccacaagccaacgggagcttcaggttctgcaaggcagcctggaaacttctgcccagtcagaagcaaactgggcagccgagttcgccgagctagagaaggagcgggacagcctggtgagtggcgcagctcatagggaggaggaattatctgctcttcggaaagaactgcaggacactcagctcaaactggccagcacagaggaatctatgtgccagcttgccaaagaccaacgaaaaatgcttctggtggggtccaggaaggctgcggagcaggtgatacaagacgccctgaaccagcttgaagaacctcctctcatcagctgcgctgggtctgcagatcacctcctctccacggtcacatccatttccagctgcatcgagcaactggagaaaagctggagccagtatctggcctgcccagaagacatcagtggacttctccattccataaccctgctggcccacttgaccagcgacgccattgctcatggtgccaccacctgcctcagagccccacctgagcctgccgactcactgaccgaggcctgtaagcagtatggcagggaaaccctcgcctacctggcctccctggaggaagagggaagccttgagaatgccgacagcacagccatgaggaactgcctgagcaagatcaaggccatcggcgaggagctcctgcccaggggactggacatcaagcaggaggagctgggggacctggtggacaaggagatggcggccacttcagctgctattgaaactgccacggccagaatagagggtacagcatcccctaaagagttttatgccaagaactctcgatggacagaaggacttatctcagcctccaaggctgtgggctggggagccactgtcatggtggatgcagctgatctggtggtacaaggcagagggaaatttgaggagctaatggtgtgttctcatgaaattgctgctagcacagcccagcttgtggctgcatccaaggtgaaagctgataaggacagccccaacctagcccagctgcagcaggcctctcggggagtgaaccaggccactgccggcgttgtggcctcaaccatttccggcaaatcacagatcgaagagacagacaacatggacttctcaagcatgacgctgacacagatcaaacgccaagagatggattctcaggttagggtgctagagctagaaaatgaattgcagaaggagcgtcaaaaactgggagagcttcggaaaaagcactacgagcttgctggtgttgctgagggctgggaagaaggaacagaggcatctccacctacactgcaagaagtggtaaccgaaaaagaatagagccaaaccaacaccccatatgtcagtgtaaatccttgttacctatctcgtgtgtgttatttccccagccacaggccaaatccttggagtcccaggggcagccacaccactgccattacccagtgccgaggacatgcatgacacttccaaagactccctccatagcgacaccctttctgtttggacccatggtcatctctgttcttttcccgcctccctagttagcatccaggctggccagtgctgcccatgagcaagcctaggtacgaagaggggtggtggggggcagggccactcaacagagaggaccaacatccagtcctgctgactatttgacccccacaacaatgggtatccttaatagaggagctgcttgttgtttgttgacagcttggaaagggaagatcttatgccttttcttttctgttttcttctcagtcttttcagtttcatcatttgcacaaacttgtgagcatcagagggctgatggattccaaaccaggacactaccctgagatctgcacagtcagaaggacggcaggagtgtcctggctgtgaatgccaaagccattctccccctctttgggcagtgccatggatttccactgcttcttatggtggttggttgggttttttggttttgtttttttttttaagtttcactcacatagccaactctcccaaagggcacacccctggggctgagtctccagggccccccaactgtggtagctccagcgatggtgctgcccaggcctctcggtgctccatctccgcctccacactgaccaagtgctggcccacccagtccatgctccagggtcaggcggagctgctgagtgacagctttcctcaaaaagcagaaggagagtgagtgcctttccctcctaaagctgaatcccggcggaaagcctctgtccgcctttacaagggagaagacaacagaaagagggacaagagggttcacacagcccagttcccgtgacgaggctcaaaaacttgatcacatgcttgaatggagctggtgagatcaacaacactacttccctgccggaatgaactgtccgtgaatggtctctgtcaagcgggccgtctcccttggcccagagacggagtgtgggagtgattcccaactcctttctgcagacgtctgccttggcatcctcttgaataggaagatcgttccaccttctacgcaattgacaaacccggaagatcagatgcaattgctcccatcagggaagaaccctatacttggtttgctacccttagtatttattactaacctcccttaagcagcaacagcctacaaagagatgcttggagcaatcagaacttcaggtgtgactctagcaaggctcatctttctgcccggctacatcagccttcaagaatcagaagaaaggccaaggtgctggactgttactgacttggatcccaaagcaaggagatcatttggagctcttgggtcagagaaaatgagaaaggacagagccagcggctccaactcctttcagccacatgccccaggctctcgctgccctgtggacaggatgaggacagagggcacatgaacagcttgccagggatgggcagcccaacagcacttttcctcttctagatggaccccagcatttaagtgaccttctgatcttggaaaaacagcgtcttccttctttatctatagcaactcattggtggtagccatcaagcacttcccaggatctgctccaacagaatattgctaggttttgctacatgacgggttgtgagacttctgtttgatcactgtgaaccaacccccatctccctagcccacccccctccccaactccctctctgtgcattttctaagtgggacattcaaaaaactctctcccaggacctcggatgaccatactcagacgtgtgacctccatactgggctaaggaagtatcagcactagaaattgggcagtcttaatgttgaatgctgctttctgcttagtatttttttgattcaaggctcagaaggaatggtgcgtggcttccctgtcccagttgtggcaactaaaccaatcggtgtgttcttgatgcgggtcaacatttccaaaagtggctagtcctcacttctagatctcagccattctaactcatatgttcccaattaccaaggggtggccgggcacagtggctcacgcctgtaatcccagcactttgagaggctgaggtggtaggatcacctgaggtcaggagttcaagaccagcctgtccaacatggtgaaacccccatctctactaaaaataccaaaaattagccgagcgtagtgacgggtgcccgtaatcccagctactcaggaggctgagacaggagaatcacctgaaccccagaggcagaggttgcagtgagctgagatcacgccattgtactccagcctgggcaacaagagcaaaactccgtctcaaaaaaaaaaaaaaattacaaatggggcaaacagtctagtgtaatggatcaaattaagattctctgcccagccgggcacagtggcgcatgcctgtaatcccagaactttgggaggccaagacgggatgattgcttgagctcaggagtttgagaccaggctgggcatcatagcaagacctcatctctactaaaattcaaaaacaaaattagccgggcatgatggtgcatgcctgtagtctcagctagttggggagctaaggtgggagaattgcttgagcttgggaagtcgaggctgcagtcagccctgattgtgccagtgcactccggcctgggtgacagagtgagaccctgtctcaaaaaaaaaaagattctgtgtcagagcccagcccaggagtttgaggctgcaatgagccatgatttcccactgcactccagcctgagtgacagagcgagactccatctctttaaaaacaaacaaaaaattatctgaatgatcctgtctctaaaaagaagccacagaaatgtttaaaaacttcatcgacttagcctgagtcataacggttaagaaagcacttaaacagaagcagaggctaattcagtgtcacatgaggaagtagctgtcagatgtcacataattactttcgtaatagctcagattagaatggctaccccattctctagacaaaatcaaattgtcctattgtgactcttctaaaaatgaagatgaagagctatttaatgacacaccttggattaaaacgggaatcacatcttaaagctaaaaatgaacctgcaagccttctaaatgagtcactgagcatcactagtgacaagtctcgggtgagcgtaaatgggtcatgacaagatgggacagcaacaaaatcatggcttaggatcgacaagaagttaaaaaacagctgcatctgttacttaagtttgtaagacagtgccctgagacctctagagaaaagatgtttgtttacataagagaaagaggccagacatggtgtctcacacgtttaatcccagcactttgggaggcaggggcgggtggatcacctgaggtcaggagttcaagactagcctggccaacatggtgaaaccccgtctctactaaaaatacaaaaattagccgggcatggtggcaggcgcctataatcccagctactggggaggctgaggcaggagaatcacttgaacccgggggacagaggttgtagtgagccaagatcgcaccactgcactccagcctgggtcacagagtgagactccatctcaaaaaaaaaaaagagagagagagagaaagaaatagaagagaagagccatcttggcagggttattttatatctgagcaaggagtttaaatgagactagtttagattgtctgctgatgcagccgtccatagcagtacccctaaaatcccaccagaatacgggtccctctaacccagtggctggaagaaccactgtctagagcaacttttcttggaactgtcccagctaccaagtcagacaccaaggtttatgccaccaggtaacacgggaatcacaggtacatgtcgctccggtcagattagttggctttggcccctcgaccctgtgcaggagctagttctcagcttgcagctggaagttccctct

SEQ ID NO: 9358 - DNA, 728 bp, Homo sapiens
  source 1..728: mol_type = unassigned DNA
atctccttgacagcctgtgcctttgggctggggagggggcaggaaagccaggtggctgctctgtcccctacatggggctgatgaagacacccagcacccctcaggtccttctccacccctaggttgaaagatctgttctaccgctccagcaacctgcagtacttcaagcggctcattcagatcccccagctgcctgagaacccacccaacttcctgcgagcctcagccctgtcagaacatatcagccctgtggtggtgatccctgcagaggcctcatcccccgacagcgagccagtcctagagaaggatgacctcatggacatggatgcctctcagcagaatttatttgacaacaagtttgatgacatctttggcagttcattcagcagtgatcccttcaatttcaacagtcaaaatggtgtgaacaaggatgagaaggaccacttaattgagcgactatacagagagatcagtggattgaaggcacagctagaaaacatgaagactgagagccagcgggttgtgctgcagctgaagggccacgtcagcgagctggaagcagatctggccgagcagcagcacctgcggcagcaggcggccgacgactgtgaattcctgcgggcagaactggacgagctcaggaggcagcgggaggacaccgagaaggctcagcggagcctgtctgagatagaaaggaaagctcaagccaatgaacagcgatatagcaa

SEQ ID NO: 9359 - DNA, 583 bp, Homo sapiens
  source 1..583: mol_type = unassigned DNA
gtaattggctctccggaaccagccggggacacgagggcctgctgggtcaggaagtggtggacaatgccaccctttcaggggagacacggcttggtcttaggtcctgtgtgactccagggaagtccagagaacagcctgttctcagatgatgttccctaacccagagccccctccagagactgtcagcatcaataaggccattaatacgcaggaagtggctgtaaaggaaaaacacgccagaacgtgcatactgggcacccaccatgagaaaggggcacagaccttctggtctgttgtcaaccgcctgcctctgtctagcaacgcagtgctctgctggaagttctgccatgtgttccacaaactcctccgagatggacacccgaacgtcctgaaggactctctgagatacagaaatgaattgagtgacatgagcaggatgtggggccacctgagcgaggggtatggccagctgtgcagcatctacctgaaactgctaagaaccaagatggagtaccacaccaaaaatcccaggttcccaggcaacctgcagatgagtgaccgccagctggacgaggctggagaa

SEQ ID NO: 9360 - DNA, 419 bp, Homo sapiens
  source 1..419: mol_type = unassigned DNA
gctcctcgcggcgacatggatcggatggccagctccatgaagcaggtgcccaacccactgcccaaggtgctgagccggcgcggggtcggcgctgggctggaggcggcggagcgcgagagcttcgagcggactcagcagctgcagaggagatactcggaggaggaggaaagagaagtcacggagccctgttcttaaccgagttttgcagtcacctccccgtattcctctctcactctgaagccgagcacagaacccagcctctggtggtaccgagtgaaggttggcctggttggttggatggatggccaaatgaactccagaccactggattgtataacaggacagcaagaggcagcacagagccgtggaaagaacctgtagccataacatttgatgaatgaatcagacatgtgacatta

SEQ ID NO: 9361 - DNA, 503 bp, Homo sapiens
  source 1..503: mol_type = unassigned DNA
ccggggcagccgagggcccctgactcggctcctcgcggcgacatggatcggatggccagctccatgaagcaggtgcccaacccactgcccaaggtgctgagccggcgcggggtcggcgctgggctggaggcggcggagcgcgagagcttcgagcggactcagggtcgctgttggtctagccttgcctcccgcatacccagtctagagcctggccacatgcccatcaaaagactctcactgctctgcctgccttcttctgtcctggcgtctataccctcagaccagccttgcatacctactcctgccagcctcctccaggaagccttgcctcctcaactctcctgcaccatcctcacatttcacctggccactgtcactgccagaggaggcaccactgacctgcctcatggcccagccactgcacccatctccaaccagacccttggtgtgttccccacccaatccatcacaagccactttcaagctttagggaagtgaaaagt

SEQ ID NO: 9362 - DNA, 3120 bp, Homo sapiens
  source 1..3120: mol_type = unassigned DNA
tcagatgatgttccctaacccagagccccctccagagactgtcagcatcaataaggccattaatacgcaggaagtggctgtaaaggaaaaacacgccagaacgtgcatactgggcacccaccatgagaaaggggcacagaccttctggtctgttgtcaaccgcctgcctctgtctagcaacgcagtgctctgctggaagttctgccatgtgttccacaaactcctccgagatggacacccgaacgtcctgaaggactctctgagatacagaaatgaattgagtgacatgagcaggatgtggggccacctgagcgaggggtatggccagctgtgcagcatctacctgaaactgctaagaaccaagatggagtaccacaccaaaaatcccaggttcccaggcaacctgcagatgagtgaccgccagctggacgaggctggagaaagtgacgtgaacaactttttccagttaacagtggagatgtttgactacctggagtgtgaactcaacctcttccaaacagtattcaactccctggacatgtcccgctctgtgtccgtgacggcagcagggcagtgccgcctcgccccgctgatccaggtcatcttggactgcagccacctttatgactacactgtcaagcttctcttcaaactccactcctgcctcccagctgacaccctgcaaggccaccgggaccgcttcatggagcagtttacaaagttgaaagatctgttctaccgctccagcaacctgcagtacttcaagcggctcattcagatcccccagctgcctgagaacccacccaacttcctgcgagcctcagccctgtcagaacatatcagccctgtggtggtgatccctgcagaggcctcatcccccgacagcgagccagtcctagagaaggatgacctcatggacatggatgcctctcagcagaatttatttgacaacaagtttgatgacatctttggcagttcattcagcagtgatcccttcaatttcaacagtcaaaatggtgtgaacaaggatgagaaggaccacttaattgagcgactatacagagagatcagtggattgaaggcacagctagaaaacatgaagactgagagccagcgggttgtgctgcagctgaagggccacgtcagcgagctggaagcagatctggccgagcagcagcacctgcggcagcaggcggccgacgactgtgaattcctgcgggcagaactggacgagctcaggaggcagcgggaggacaccgagaaggctcagcggagcctgtctgagatagaaaggaaagctcaagccaatgaacagcgatatagcaagctaaaggagaagtacagcgagctggttcagaaccacgctgacctgctgcggaagaatgcagaggtgaccaaacaggtgtccatggccagacaagcccaggtagatttggaacgagagaaaaaagagctggaggattcgttggagcgcatcagtgaccagggccagcggaagactcaagaacagctggaagttctagagagcttgaagcaggaacttgccacaagccaacgggagcttcaggttctgcaaggcagcctggaaacttctgcccagtcagaagcaaactgggcagccgagttcgccgagctagagaaggagcgggacagcctggtgagtggcgcagctcatagggaggaggaattatctgctcttcggaaagaactgcaggacactcagctcaaactggccagcacagaggaatctatgtgccagcttgccaaagaccaacgaaaaatgcttctggtggggtccaggaaggctgcggagcaggtgatacaagacgccctgaaccagcttgaagaacctcctctcatcagctgcgctgggtctgcagatcacctcctctccacggtcacatccatttccagctgcatcgagcaactggagaaaagctggagccagtatctggcctgcccagaagacatcagtggacttctccattccataaccctgctggcccacttgaccagcgacgccattgctcatggtgccaccacctgcctcagagccccacctgagcctgccgactcactgaccgaggcctgtaagcagtatggcagggaaaccctcgcctacctggcctccctggaggaagagggaagccttgagaatgccgacagcacagccatgaggaactgcctgagcaagatcaaggccatcggcgaggagctcctgcccaggggactggacatcaagcaggaggagctgggggacctggtggacaaggagatggcggccacttcagctgctattgaaactgccacggccagaatagaggagatgctcagcaaatcccgagcaggagacacaggagtcaaattggaggtgaatgaaaggatccttggttgctgtaccagcctcatgcaagctattcaggtgctcatcgtggcctctaaggacctccagagagagattgtggagagcggcaggggtacagcatcccctaaagagttttatgccaagaactctcgatggacagaaggacttatctcagcctccaaggctgtgggctggggagccactgtcatggtggatgcagctgatctggtggtacaaggcagagggaaatttgaggagctaatggtgtgttctcatgaaattgctgctagcacagcccagcttgtggctgcatccaaggtgaaagctgataaggacagccccaacctagcccagctgcagcaggcctctcggggagtgaaccaggccactgccggcgttgtggcctcaaccatttccggcaaatcacagatcgaagagacagacaacatggacttctcaagcatgacgctgacacagatcaaacgccaagagatggattctcaggttagggtgctagagctagaaaatgaattgcagaaggagcgtcaaaaactgggagagcttcggaaaaagcactacgagcttgctggtgttgctgagggctgggaagaaggaacagaggcatctccacctacactgcaagaagtggtaaccgaaaaagaatagagccaaaccaacaccccatatgtcagtgtaaatccttgttacctatctcgtgtgtgttatttccccagccacaggccaaatccttggag

SEQ ID NO: 9363 - DNA, 3078 bp, Homo sapiens
  source 1..3078: mol_type = unassigned DNA; mol_type = unassigned DNA
cggtgcctctcccttcaaaagcaagggacctttatgcatgattccacatctgcattccgataggaaagggaaacagcagaaacacaatacccatctgagagctacgcttagagaggactctgggcttttatttatttttttacttcagtcttgtgaccagtaattttaagggaaagccaataataatgtttttaaaaagcctcacgccacccctggcggcatctcctcggtgtactttgctgttcagatccgcctgccttctgtgccagcctaacagcgcccggcctcagcccccattgtccctggagctggcgaggtgtccggttgcggagccggcggcgtctctggaaatgcatcctgcatccccgcatggataacagctgcagctatgtcagaattgcacaaagaggggagagtgtcattgtgtgccttttgacacatacattaagaccaaaaaggaaaaaaagcgtctatctgtgctgccaccgaccagactcatggaggccagattttctccaattaaccagatcttgccctggtgcagacaagacttagccatcagcatcagcaaagccatcaacacccaggaggcccccgtgaaggagaagcacgcccggcgcatcattctgggcacacaccacgagaagggggctttcaccttctggtcctacgccattgggctgccgctgcccagcagctccattctcagctggaagttctgccacgtcctccacaaggtccttcgagacgggcaccccaatgtgctgcatgactgccagcggtaccgcagcaacatccgggagattggagacctgtggggacatttgcatgaccgctacggacagctggtgaatgtctacaccaagctgctgctgaccaagatctccttccacctcaagcatccccagtttcccgcgggcctggaggtgacagatgaggtactggagaaggcagctgggaccgatgtcaacaacatcttccagctcactgtggagatgtttgattacatggattgtgagctgaagctttctgaatcagttttccgacagctcaacacggccatcgccgtatcccagatgtcctcaggccagtgccgcctggcccccctcatccaggtcatccaggactgcagccacctctaccactacacggtcaagctcctgttcaagctacactcttgtctccctgcggacaccctgcaaggccacagggaccggttccacgagcagtttcacagcctcaggaacttcttccgcagagcctccgacatgctgtacttcaagcggctcatccagatcccccggctgcccgagggaccccctaacttcctgcgggcctcagccctggctgagcacatcaagccggtggtggtgatccccgaggaggccccggaagatgaggagccggagaatctcattgagatcagcacagggccccccgcgggggagccagtggtggtggctgacctcttcgatcagacgtttggaccccccaatgggtctgtgaaggacgacagggacctccagattgagagcttgaagagagaggtggaaatgctccgctctgaactggagaagatcaagctggaggcccagcggtacatcgcgcagctgaagagccaggtgaatgcactggagggtgagctggaggagcagcggaagcagaagcagaaggccctggtggataatgagcagctccgccacgagctggcccagctgagggctgcccagctggagggcgagcggagccagggcctgcgtgaggaggctgagaggaaggccagtgccacggaggcgcgctacaacaagctgaaggaaaagcacagtgagctcgtccatgtgcacgcggagctgctcagaaagaacgcggacacagccaagcagctgacggtgacgcagcaaagccaggaggaggtggcgcgggtgaaggagcagctggccttccaggtggagcaggtgaagcgggagtcggagttgaagctagaggagaagagcgaccagctggagaagctcaagagggagctggaggccaaggccggagagctggcccgcgcgcaggaggccctgagccacacagagcagagcaagtcggagctgagctcacggctggacacgctgagtgcggagaaggatgctctgagtggagctgtgcggcagcgggaggcagacctgctggcggcgcagagcctggtgcgcgagacagaggcggcgctgagccgggagcagcagcgcagctcccaggagcagggcgagttgcagggccggctggcagagagggtatggcctccccagatgcagcagcaccactgagttcactgccgtctggcaaccatcgatctgtctccgtgatctgcctgttctagagatttcatgtaaaggggatcatacacgatgcatccttttgtgtccggcttcttcactcagcatcacgttgtcaagggtcaccacatcatagcctgtgtcattacctcattccttttatggctgagtcgtactctgccgtgtggacagaccacattgtgtttatctgttcatcacttggtggacattgggtttgttgcaactttctggctgttgtaaatagtgctgctgtgggcctttgagcacaagtttctgtgtaaacatctgccatcacttatcttggatagatagctgatgtgtgtggaacacagtagaactgctgggtctcacctctgttaccctgttgagaaactaccagactgttttccaaagtggctgcaccattttacactcccaccagcaacgcatgaatgttccagtttctccacatccttgccaatgcttattattgtcttctttttattttagccatcctagtgggtgtggagtggtttctcacggtcttgatttgtgtttccctgatagcaaagggtgctacatatcttttcatgagctacctggccatttgtgtatctttggagaaatgtcttttaggaccttgagctcacgttttaattgggttatctttttattcttgagctgtgcactgtgtgggaagcctctttctagaaatctccacccccctgaccagtgagggtctcagctgggctccaactgg

SEQ ID NO: 9364 - DNA, 4539 bp, Homo sapiens
  source 1..4539: mol_type = unassigned DNA; mol_type = unassigned DNA
ctcctccccggcgggcgggcccgggcgcggcgcggtggcctcgcggtgcctaggctggggctgccggaccgtgaggctgtgagtcgcgcggacggagccggacaaaagcgggcggcggcggcaggatgaacagcatcaagaacgtgccggcgcgggtgctgagccgcaggccgggccacagcctggaggccgagcgcgagcagttcgacaagacccaggccatcagcatcagcaaagccatcaacacccaggaggcccccgtgaaggagaagcacgcccggcgcatcattctgggcacacaccacgagaagggggctttcaccttctggtcctacgccattgggctgccgctgcccagcagctccattctcagctggaagttctgccacgtcctccacaaggtccttcgagacgggcaccccaatgtgctgcatgactgccagcggtaccgcagcaacatccgggagattggagacctgtggggacatttgcatgaccgctacggacagctggtgaatgtctacaccaagctgctgctgaccaagatctccttccacctcaagcatccccagtttcccgcgggcctggaggtgacagatgaggtactggagaaggcagctgggaccgatgtcaacaacatcttccagctcactgtggagatgtttgattacatggattgtgagctgaagctttctgaatcagttttccgacagctcaacacggccatcgccgtatcccagatgtcctcaggccagtgccgcctggcccccctcatccaggtcatccaggactgcagccacctctaccactacacggtcaagctcctgttcaagctacactcttgtctccctgcggacaccctgcaaggccacagggaccggttccacgagcagtttcacagcctcaggaacttcttccgcagagcctccgacatgctgtacttcaagcggctcatccagatcccccggctgcccgagggaccccctaacttcctgcgggcctcagccctggctgagcacatcaagccggtggtggtgatccccgaggaggccccggaagatgaggagccggagaatctcattgagatcagcacagggccccccgcgggggagccagtggtggtggctgacctcttcgatcagacgtttggaccccccaatgggtctgtgaaggacgacagggacctccagattgagagcttgaagagagaggtggaaatgctccgctctgaactggagaagatcaagctggaggcccagcggtacatcgcgcagctgaagagccaggtgaatgcactggagggtgagctggaggagcagcggaagcagaagcagaaggccctggtggataatgagcagctccgccacgagctggcccagctgagggctgcccagctggagggcgagcggagccagggcctgcgtgaggaggctgagaggaaggccagtgccacggaggcgcgctacaacaagctgaaggaaaagcacagtgagctcgtccatgtgcacgcggagctgctcagaaagaacgcggacacagccaagcagctgacggtgacgcagcaaagccaggaggaggtggcgcgggtgaaggagcagctggccttccaggtggagcaggtgaagcgggagtcggagttgaagctagaggagaagagcgaccagctggagaagctcaagagggagctggaggccaaggccggagagctggcccgcgcgcaggaggccctgagccacacagagcagagcaagtcggagctgagctcacggctggacacgctgagtgcggagaaggatgctctgagtggagctgtgcggcagcgggaggcagacctgctggcggcgcagagcctggtgcgcgagacagaggcggcgctgagccgggagcagcagcgcagctcccaggagcagggcgagttgcagggccggctggcagagagggagtctcaggagcaggggctgcggcagaggctgctggacgagcagttcgcagtgttgcggggcgctgctgccgaggccgcgggcatcctgcaggatgccgtgagcaagctggacgaccccctgcacctgcgctgtaccagctccccagactacctggtgagcagggcccaggaggccttggatgccgtgagcaccctggaggagggccacgcccagtacctgacctccttggcagacgcctccgccctggtggcagctctgacccgcttctcccacctggctgcggataccatcatcaatggcggtgccacctcgcacctggctcccaccgaccctgccgaccgcctcatagacacctgcagggagtgcggggcccgggctctggagctcatggggcagctgcaggaccagcaggctctgcggcacatgcaggccagcctggtgcggacacccctgcagggcatccttcagctgggccaggaactgaaacccaagagcctagatgtgcggcaggaggagctgggggccgtggtcgacaaggagatggcggccacatccgcagccattgaagatgctgtgcggaggattgaggacatgatgaaccaggcacgccacgccagctcgggggtgaagctggaggtgaacgagaggatcctcaactcctgcacagacctgatgaaggctatccggctcctggtgacgacatccactagcctgcagaaggagatcgtggagagcggcaggggggcagccacgcagcaggaattttacgccaagaactcgcgctggaccgaaggcctcatctcggcctccaaggctgtgggctggggagccacacagctggtggaggcagctgacaaggtggtgcttcacacgggcaagtatgaggagctcatcgtctgctcccacgagatcgcagccagcacggcccagctggtggcggcctccaaggtgaaggccaacaagcacagcccccacctgagccgcctgcaggaatgttctcgcacagtcaatgagagggctgccaatgtggtggcctccaccaagtcaggccaggagcagattgaggacagagacaccatggatttctccggcctgtccctcatcaagctgaagaagcaggagatggagacccaggtgcgtgtcctggagctggagaagacgctggaggctgaacgcatgcggctgggggagttgcggaagcaacactacgtgctggctggggcatcaggcagccctggagaggaggtggccatccggcccagcactgccccccgaagtgtaaccaccaagaaaccacccctggcccagaagcccagcgtggcccccagacaggaccaccagcttgacaaaaaggatggcatctacccagctcaactcgtgaactactaggccccccaggggtccagcagggtggctggtgacaggcctgggcctctgcaactgccctgacaggaccgagaggccttgcccctccacctggtgcccaagcctcccgccccaccgtctggatcaatgtcctcaaggcccctggcccttactgagcctgcagggtcctgggccatgtgggtggtgcttctggatgtgagtctcttatttatctgcagaaggaactttggggtgcagccaggacccggtaggcctgagcctcaactcttcagaaaatagtgtttttaatattcctcttcagaaaatagtgtttttaatattccgagctagagctcttcttcctacgtttgtagtcagcacactgggaaaccgggccagcgtggggctccctgccttctggactcctgaaggtcgtggatggatggaaggcacacagcccgtgccggctgatgggacgagggtcaggcatcctgtctgtggccttctggggcaccgattctaccaggccctccagctgcgtggtctccgcagaccaggctctgtgtgggctagaggaatgtcgcccattactcctcaggcctggccctcgggcctccgtgatgggagccccccaggaggggtcagatgctggaaggggccgctttctggggagtgaggtgagacatagcggcccgggcgctgccttcactcctggagtgagtttccatttccagctggaatctgcagccacccccatttcctgttttccattcccccgttctggccgcgccccactgcccacctgaaggggtggtttccagccctccggagagtgggcttggccctaggccctccagctcagccagaaaaagcccagaaacccaggtgctggaccagggccctcagggaggggaccctgcggctagagtgggctaggccctggctttgcccgtcagatttgaacgaatgtgtgtcccttgagcccaaggagagcggcaggaggggtgggaccaggctgggaggacagagccagcagctgccatgccctcctgctccccccaccccagccctagccctttagcctttcaccctgtgctctggaaaggctaccaaatactggccaaggtcaggaggagcaaaaatgagccagcaccagcgccttggctttgtgttagcatttcctcctgaagtgttctgttggcaataaaatgcactttgactgtttgttgtc

SEQ ID NO: 9365 - DNA, 2054 bp, Homo sapiens
  source 1..2054: mol_type = unassigned DNA; mol_type = unassigned DNA
tggggctgccggaccgtgaggctgtgagtcgcgcggacggagccggacaaaagcgggcggcggcggcaggatgaacagcatcaagaacgtgccggcgcgggtgctgagccgcaggccgggccacagcctggaggccgagcgcgagcagttcgacaagacccaggccatcagcatcagcaaagccatcaacacccaggaggcccccgtgaaggagaagcacgcccggcgcatcattctgggcacacaccacgagaagggggctttcaccttctggtcctacgccattgggctgccgctgcccagcagctccattctcagctggaagttctgccacgtcctccacaaggtccttcgagacgggcaccccaatgtgctgcatgactgccagcggtaccgcagcaacatccgggagattggagacctgtggggacatttgcatgaccgctacggacagctggtgaatgtctacaccaagctgctgctgaccaagatctccttccacctcaagcatccccagtttcccgcgggcctggaggtgacagatgaggtactggagaaggcagctgggaccgatgtcaacaacatcttccagctcactgtggagatgtttgattacatggattgtgagctgaagctttctgaatcagttttccgacagctcaacacggccatcgccgtatcccagatgtcctcaggccagtgccgcctggcccccctcatccaggtcatccaggactgcagccacctctaccactacacggtcaagctcctgttcaagctacactcttgtctccctgcggacaccctgcaaggccacagggaccggttccacgagcagtttcacagcctcaggaacttcttccgcagagcctccgacatgctgtacttcaagcggctcatccagatcccccggctgcccgagggaccccctaacttcctgcgggcctcagccctggctgagcacatcaagccggtggtggtgatccccgaggaggccccggaagatgaggagccggagaatctcattgagatcagcacagggccccccgcgggggagccagtggtggtggctgacctcttcgatcagacgtttggaccccccaatgggtctgtgaaggacgacagggacctccagattgagagcttgaagagagaggtggaaatgctccgctctgaactggagaagatcaagctggaggcccagcggtacatcgcgcagctgaagagccaggtgaatgcactggagggtgagctggaggagcagcggaagcagaagcagaaggccctggtggataatgagcagctccgccacgagctggcccagctgagggctgcccagctggagggcgagcggagccagggcctgcgtgaggaggctgagaggaaggccagtgccacggaggcgcgctacaacaagctgaaggaaaagcacagtgagctcgtccatgtgcacgcggagctgctcagaaagaacgcggacacagccaagcagctgacggtgacgcagcaaagccaggaggaggtggcgcgggtgaaggagcagctggccttccaggtggagcaggtgaagcgggagtcggagttgaagctagaggagaagagcgaccagctggagaagctcaagagggagctggaggccaaggccggagagctggcccgcgcgcaggaggccctgagccacacagagcagagcaagtcggagctgagctcacggctggacacgctgagtgcggagaaggatgctctgagtggagctgtgcggcagcgggaggcagacctgctggcggcgcagagcctggtgcgcgagacagaggcggcgctgagccgggagcagcagcgcagctcccaggagcagggcgagttgcagggccggctggcagagagggtatggcctccccagatgcagcagcaccactgagttcactgccgtctggcaaccatcgatctgtctccgtgatctgcctgttctagagatttcatgtaaaggggatcatacacgatgcatccttttgtgtccggcttcttcactcagcatcacgttgtcaagggtcacc

SEQ ID NO: 9366 - DNA, 538 bp, Homo sapiens
  source 1..538: mol_type = unassigned DNA; mol_type = unassigned DNA
tggccgctgggtgggggttctctccacagcatccccagtttcccgcgggcctggaggtgacagatgaggtactggagaaggcagctgggaccgatgtcaacaacatcttccagctcactgtggagatgtttgattacatggattgtgagctgaagctttctgaatcagttttccgacagctcaacacggccatcgccgtatcccagatgtcctcaggccagtgccgcctggcccccctcatccaggtcatccaggactgcagccacctctaccactacacggtcaagctcctgttcaagctacactcttgtctccctgcggacaccctgcaaggccacagggaccggttccacgagcagtttcacagcctcaggaacttcttccgcagagcctccgacatgctgtacttcaagcggctcatccagatcccccggctgcccgagggaccccctaacttcctgcgggcctcagccctggctgagcacatcaagccggtggtggtgatccccgaggaggccccggaagatgaggagccgga

SEQ ID NO: 9367 - DNA, 1233 bp, Homo sapiens
  source 1..1233: mol_type = unassigned DNA; mol_type = unassigned DNA
cgggccctgggggtgtcaggggcaggggagacgggccctgggggtgtcaggggcaggggagatgggccctgggggcaagcgaggtttcagggtcacttggggtgtgcagagccaagctgtgaccctagtgccgtgttacttggcagaagccctgcctgttcccacatctgtaaagttaggcatttggggtgctccatcgtgagcctccttcctgctctaacattcagcgtgggtttgaggcccgtgggcatggagctatccgtcacccttgtcagtcgggcacctcgtcctgggctcccaggtggaggtctctggaagcccttgctgagctgggctgggagctcctttgccctgaccttgttgttgccgttgacctccttcatgggagcatctggtcttgacctggggcagccaccagcacatgaggctcccgtcttggaggcagggggcacactggtgtgtgggagctggcttagggccctgcttcacagttggaccaccttggacaggttgcccagctcccaagggctcacgttcttcctcctgccccttttgcacagttttccgacagctcaacacggccatcgccgtatcccagatgtcctcaggccagtgccgcctggcccccctcatccaggtcatccaggactgcagccacctctaccactacacggtcaagctcctgttcaagctacactcttgtctccctgcggacaccctgcaaggccacagggaccggttccacgagcagtttcacagcctcaggaacttcttccgcagagcctccgacatgctgtacttcaagcggctcatccagatcccccggctgcccgagggaccccctaacttcctgcgggcctcagccctggctgagcacatcaagccggtggtggtgatccccgaggaggccccggaagatgaggagccggagaatctcattgagatcagcacagggccccccgcgggggagccagtggtggtggctgacctcttcgatcagacgtttggaccccccaatgggtctgtgaaggacgacagggacctccagattgagagcttgaagagagaggtggaaatgctccgctctgaactggagaagatcaagctggaggcccagcggtacatcgcgcagctgaagagccaggtgaatgcactggagggtgagctggaggagcagcggaagcagaagcagaaggccctggtggataatgagcagctccgccacgagctggc

SEQ ID NO: 9368 - DNA, 711 bp, Homo sapiens
  source 1..711: mol_type = unassigned DNA; mol_type = unassigned DNA
cccacccgcacagacgcctccgccctggtggcagctctgacccgcttctcccacctggctgcggataccatcatcaatggcggtgccacctcgcacctggctcccaccgaccctgccgaccgcctcatagacacctgcagggagtgcggggcccgggctctggagctcatggggcagctgcaggaccagcaggctctgcggcacatgcaggccagcctggtgcggacacccctgcagggcatccttcagctgggccaggaactgaaacccaagagcctagatgtgcggcaggaggagctgggggccgtggtcgacaaggagatggcggccacatccgcagccattgaagatgctgtgcggaggattgaggacatgatgaaccaggcacgccacgccagctcgggggtgaagctggaggtgaacgagaggatcctcaactcctgcacagacctgatgaaggtgaggggctgtgacccgggggggtctgcacctggagggccaccagtcattgctgtcttggtctcggcaggctatccggctcctggtgacgacatccactagcctgcagaaggagatcgtggagagcggcagggtgaggggccggcggcagcagggcacagtccacaaggagcctgacccccagcctaggccaccctgggcatgagaccctccaccccctaccacagggaggcctcagggatgcgccctatg

SEQ ID NO: 9369 - DNA, 1616 bp, Homo sapiens
  source 1..1616: mol_type = unassigned DNA; mol_type = unassigned DNA
ccaggaactgaaacccaagagcctagatgtgcggcaggaggagctgggggccgtggtcgacaaggagatggcggccacatccgcagccattgaagatgctgtgcggaggattgaggacatgatgaaccaggcacgccacgccagctcgggggtgaagctggaggtgaacgagaggatcctcaactcctgcacagacctgatgaaggtgaggggctgtgacccgggggggtctgcacctggagggccaccagtcattgctgtcttggtctcggcaggctatccggctcctggtgacgacatccactagcctgcagaaggagatcgtggagagcggcaggggggcagccacgcagcaggaattttacgccaagaactcgcgctggaccgaaggcctcatctcggcctccaaggctgtgggctggggagccacacagctggtggaggcagctgacaaggtggtgcttcacacgggcaagtatgaggagctcatcgtctgctcccacgagatcgcagccagcacggcccagctggtggcggcctccaaggtgaaggccaacaagcacagcccccacctgagccgcctgcaggaatgttctcgcacagtcaatgagagggctgccaatgtggtggcctccaccaagtcaggccaggagcagattgaggacagagacaccatggatttctccggcctgtccctcatcaagctgaagaagcaggagatggagacccaggtgcgtgtcctggagctggagaagacgctggaggctgaacgcatgcggctgggggagttgcggaagcaacactacgtgctggctggggcatcaggcagccctggagaggaggtggccatccggcccagcactgccccccgaagtgtaaccaccaagaaaccacccctggcccagaagcccagcgtggcccccagacaggaccaccagcttgacaaaaaggatggcatctacccagctcaactcgtgaactactaggccccccaggggtccagcagggtggctggtgacaggcctgggcctctgcaactgccctgacaggaccgagaggccttgcccctccacctggtgcccaagcctcccgccccaccgtctggatcaatgtcctcaaggcccctggcccttactgagcctgcagggtcctgggccatgtgggtggtgcttctggatgtgagtctcttatttatctgcagaaggaactttggggtgcagccaggacccggtaggcctgagcctcaactcttcagaaaatagtgtttttaatattcctcttcagaaaatagtgtttttaatattccgagctagagctcttcttcctacgtttgtagtcagcacactgggaaaccgggccagcgtggggctccctgccttctggactcctgaaggtcgtggatggatggaaggcacacagcccgtgccggctgatgggacgagggtcaggcatcctgtctgtggccttctggggcaccgattctaccaggccctccagctgcgtggtctccgcagaccaggctctgtgtgggctagaggaatgtcgcccattactcctcaggcctggccctcgggcctccgtgatgggagccccccaggaggggtcagatgctggaa

SEQ ID NO: 9370 - DNA, 1176 bp, Homo sapiens
  source 1..1176: mol_type = unassigned DNA; mol_type = unassigned DNA
ctcccccaggatcctcaactcctgcacagacctgatgaaggtgaggggctgtgacccgggggggtctgcacctggagggccaccagtcattgctgtcttggtctcggcaggctatccggctcctggtgacgacatccactagcctgcagaaggagatcgtggagagcggcaggggggcagccacgcagcaggaattttacgccaagaactcgcgctggaccgaaggcctcatctcggcctccaaggctgtgggctggggagccacacagctggtgtaggttgccctgggtgggggggggcagggggctgcttcctgccagttggagcagtttggggttcaacagggtgcagggagtagagggggtgtggagtggtgccagccgtccgtggggtcagagaccctggccctgactggcccttgacccgcagggaggcagctgacaaggtggtgcttcacacgggcaagtatgaggagctcatcgtctgctcccacgagatcgcagccagcacggcccagctggtggcggcctccaaggtgaaggccaacaagcacagcccccacctgagccgcctgcaggaatgttctcgcacagtcaatgagagggctgccaatgtggtggcctccaccaagtcaggccaggagcagattgaggacagagacaccatggatttctccggcctgtccctcatcaagctgaagaagcaggagatggagacccaggtaggcgcccatggctgccccgtgacctctgagctcatccctcgggcgaagcctggacccaggagagagctccctggggaggctgggctgggctgagcaggccgtgtggctacaggtgcgtgtcctggagctggagaagacgctggaggctgaacgcatgcggctgggggagttgcggaagcaacactacgtgctggctggggcatcaggcagccctggagaggaggtggccatccggcccagcactgccccccgaagtgtaaccaccaagaaaccacccctggcccagaagcccagcgtggcccccagacaggaccaccaggtgccgtctgcactgggatgggggagttcctggacgggggtgctgtccccagccctagaggggcacatggtgcacgtccctggggaagtcagggaccactgacaacatgcagggaggagcttgctcaagggag

SEQ ID NO: 9371 - DNA, 924 bp, Homo sapiens
  source 1..924: mol_type = unassigned DNA; mol_type = unassigned DNA
gacgacatccactagcctgcagaaggagatcgtggagagcggcaggggaggcagctgacaaggtggtgcttcacacgggcaagtatgaggagctcatcgtctgctcccacgagatcgcagccagcacggcccagctggtggcggcctccaaggtgaaggccaacaagcacagcccccacctgagccgcctgcaggaatgttctcgcacagtcaatgagagggctgccaatgtggtggcctccaccaagtcaggccaggagcagattgaggacagagacaccatggatttctccggcctgtccctcatcaagctgaagaagcaggagatggagacccaggtgcgtgtcctggagctggagaagacgctggaggctgaacgcatgcggctgggggagttgcggaagcaacactacgtgctggctggggcatcaggcagccctggagaggaggtggccatccggcccagcactgccccccgaagtgtaaccaccaagaaaccacccctggcccagaagcccagcgtggcccccagacaggaccaccagcttgacaaaaaggatggcatctacccagctcaactcgtgaactactaggccccccaggggtccagcagggtggctggtgacaggcctgggcctctgcaactgccctgacaggaccgagaggccttgcccctccacctggtgcccaagcctcccgccccaccgtctggatcaatgtcctcaaggcccctggcccttactgagcctgcagggtcctgggccatgtgggtggtgcttctggatgtgagtctcttatttatctgcagaaggaactttggggtgcagccaggacccggtaggcctgagcctcaactcttcagaaaatagtgtttttaatattcctcttcagaaaatagtgtttttaatattccgagctagagct

SEQ ID NO: 9372 - DNA, 665 bp, Homo sapiens
  source 1..665: mol_type = unassigned DNA; mol_type = unassigned DNA
aggatggcatctacccagctcaactcgtgaactactaggccccccaggggtccagcagggtggctggtgacaggcctgggcctctgcaactgccctgacaggaccgagaggccttgcccctccacctggtgcccaagcctcccgccccaccgtctggatcaatgtcctcaaggcccctggcccttactgagcctgcagggtcctgggccatgtgggtggtgcttctggatgtgagtctcttatttatctgcagaaggaactttggggtgcagccaggacccgtcagcacactgggaaaccgggccagcgtggggctccctgccttctggactcctgaaggtcgtggatggatggaaggcacacagcccgtgccggctgatgggacgagggtcaggcatcctgtctgtggccttctggggcaccgattctaccaggccctccagctgcgtggtctccgcagaccaggctctgtgtgggctagaggaatgtcgcccattactcctcaggcctggccctcgggcctccgtgatgggagccccccaggaggggtcagatgctggaaggggccgctttctggggagtgaggtgagacatagcggcccgggcgctgccttcactcctggagtgagtttccatttccagctggaatctgcagccacccccat

SEQ ID NO: 9373 - DNA, 2452 bp, Homo sapiens
  source 1..2452: mol_type = unassigned DNA; mol_type = unassigned DNA
agagccactcaacagcgctggaacccattcggtggggcctggggcccctcatcccaagccaggagggtttctggggaggggtgcagcccctggcagactgacagtgtggcctgggggtttgggggtgccagggaagcaggggccaacctcataggaggagacacgagtgcggttctctttcccccactggggggcctgctgtgtcagcagccaggcgggaggcctgggcggcagagccagtggtacaggggcctgggcagggcggtgtctggcagcagcggcaccatgtccaccatccagtcggagactgactgctacgacatcatcgaggtcttgggcaaggggaccttcggggaggtagccaagggctggcggcggagcacgggcgagatggtggccatcaagatcctcaagaatgacgcctaccgcaaccgcatcatcaagaacgagctgaagctgctgcactgcatgcgaggcctagaccctgaagaggcccacgtcatccgcttccttgagttcttccatgacgccctcaagttctacctggtctttgagctgctggagcaaaaccttttcgagttccagaaggagaacaacttcgcgcccctccccgcccgccacatccgtacagtcaccctgcaggtgctcacagccctggcccggctcaaggagctggctatcatccacgctgatctcaagcctgagaacatcatgctggtggaccagacccgctgccccttcagggtcaaggtgattgacttcggatccgccagcattttcagcgaggtgcgctacgtgaaggagccatacatccagtcgcgcttctaccgggcccctgagatcctgctggggctgcccttctgcgagaaggtggacgtgtggtccctgggctgcgtcatggctgagctgcacctgggctggcctctctaccccggcaacaacgagtacgaccaggtgcgctacatctgcgaaacccagggcctgcccaagccacacctgttgcacgccgcctgcaaggcccaccacttcttcaagcgcaacccccaccctgacgctgccaacccctggcagctcaagtcctcggctgactacctggccgagacgaaggtgcgcccattggagcgccgcaagtatatgctcaagtcgttggaccagattgagacagtgaatggtggcagtgtggccagtcggctaaccttccctgaccgggaggcgctggcggagcacgccgacctcaagagcatggtggagctgatcaagcgcatgctgacctgggagtcacacgaacgcatcagccccagtgctgccctgcgccaccccttcgtgtccatgcagcagctgcgcagtgcccacgagaccacccactactaccagctctcgctgcgcagctaccgcctctcgctgcaagtggaggggaagccccccacgcccgtcgtggccgcagaagatgggaccccctactactgtctggctgaggagaaggaggctgcgggtatgggcagtgtggccggcagcagccccttcttccgagaggagaaggcaccaggtatgcaaagagccatcgaccagctggatgacctgagtctgcaggaggctgggcatgggctgtggggtgagacctgcaccaatgcggtctccgacatgatggtccccctcaaggcagccatcactggccaccatgtgcccgactcgggccctgagcccatcctggccttctacagcagccgcctggcaggccgccacaaggcccgcaagccacctgcgggttccaagtccgactccaacttcagcaacctcattcggctgagccaggtctcgcctgaggatgacaggccctgccggggcagcagctgggaggaaggagagcatctcggggcctctgctgagccactggccatcctgcagcgagatgaggatgggcccaacattgacaacatgaccatggaagctgagaggccagaccctgagctcttcgaccccagcagctgtcctggagaatggctgagtgagccagactgcaccctggagagcgtcaggggcccacgggctcaggggctcccaccccgccgctcccaccagcatggtccaccccggggggccaccagcttcctccagcatgtcaccgggcaccactgatggtgattccacccctgcccatcactgggggctgcgctagctgggctggcattccctcccaacctgaactgctcctcagagccatctcctgaacccacaaattattcttacagaaagatagttatccagaaattctcattccccgtctgcggtgcggtgcgtgcctgcacacctctcctaaacacagcagggctttggagtctggcccatgctccttggccagaaggacagcaggaaagggggctgcaccccgctggccctgcgctcgcccttggccctgctgcctctgtctatttcaatatagaactgttcagca

SEQ ID NO: 9374 - DNA, 496 bp, Homo sapiens
  source 1..496: mol_type = unassigned DNA; mol_type = unassigned DNA
agtgttctaactattaacgctacgatgcctgaacctaccaagtctgctcctgccccaaagaagggctccaagaaggcggtgactaaggctcagaagaaggacgggaagaagcgcaagcgcagccgcaaggagagctattcagtgtatgtgtacaaggtgctgaagcaggtccatcccgacaccggcatctcttccaaggcaatggggatcatgaattccttcgtcaacgacatcttcgagcgcatcgcaggcgaggcttcccgcctggcgcattacaacaagcgctcgaccatcacctccagggagatccagacggccgtgcgcctgctgcttccgggggagctggccaagcacgccgtgtcggagggcaccaaggccgtcaccaagtacaccagttccaagtaactttgccaagtaagcatctttacacctaatcccaaaggctcttttaagagccacgcatgttttcaataaatgagttgtaatcatttcattc

SEQ ID NO: 9375 - DNA, 789 bp, Homo sapiens
  source 1..789: mol_type = unassigned DNA; mol_type = unassigned DNA
agtgttctaactattaacgctacgatgcctgaacctaccaagtctgctcctgccccaaagaagggctccaagaaggcggtgactaaggctcagaagaaggacgggaagaagcgcaagcgcagccgcaaggagagctattcagtgtatgtgtacaaggtgctgaagcaggtccatcccgacaccggcatctcttccaaggcaatggggatcatgaattccttcgtcaacgacatcttcgagcgcatcgcaggcgaggcttcccgcctggcgcattacaacaagcgctcgaccatcacctccagggagatccagacggccgtgcgcctgctgcttccgggggagctggccaagcacgccgtgtcggagggcaccaaggccgtcaccaagtacaccagttccaagtaactttgccaagggagagacatgaagacagaggagaaatgaatgcataaaataactgataatatgaatctatacatagaacttaggaagtctcatctgcctgaaaatgactgtgtggatcccacccaaatccaactcatcctggtttgctgcacactggttcatcaaaagaaggttaccgaggggaaggaactaaaggtgtttgcacttcatgttactttttgagtttataaacataaaaacagaatttacttctgttacagacctagttactgggaattcattacttgccatggactacctttgctaagaaaagtctgaatgagaagatggcaggacgtctgaaaaaaaaagttataattaataaaatctgcggagaattgtaaa

SEQ ID NO: 9376 - DNA, 752 bp, Homo sapiens
  source 1..752: mol_type = unassigned DNA; mol_type = unassigned DNA
ttttttcgcgcaaaaatgccggatccagcgaaatccgctcctgctcccaagaagggctccaaaaaggctgttaaaagagtgcagaagaaggacggcgagaagcgcaagcgcagccgcaaggagagctactccgtttacgtgtaggaggtgctgaagcaggtccaccccgacaccggcatctcgtccaaggccatgggcatcatgaactccttcgtcaacgacatcttcgagcgcatcgcgggagaggcgtcccgcctggcgcactacaacaagcgctccaccatcacatcccgtgagatccagacggccgtgcgcctgctgctgcccggcaagctggccaagcacgccgtgtccgagggcaccaaggcggtcaccaagtacaccagctcgaacattttctagctgaagttactgttgttgtcaactactcagcatccaaaattttcacaagaaaacaaggttttttctcttcaaattacagtccaaagagtggcaaacaagaaagatgacagagtccgaagaccttaagatttcttttctttggtcaagaactcattacacaatggatgatacatcttaggtggtcctactaaaaagagacacaagaatctagagactatctcactgtcaaccaatccaaggaactttgctttagatggccaaagccagaaacagcaaagtagaagaactactagagctttaagcagttccttagtatttttccttggcttatccaagcctggatactggtc

SEQ ID NO: 9377 - DNA, 381 bp, Homo sapiens
  source 1..381: mol_type = unassigned DNA; mol_type = unassigned DNA
atgccggatccagcgaaatccgctcctgctcccaagaagggctccaaaaaggctgttaaaagagtgcagaagaaggacggcgagaagcgcaagcgcagccgcaaggagagctactccgtttacgtgtaggaggtgctgaagcaggtccaccccgacaccggcatctcgtccaaggccatgggcatcatgaactccttcgtcaacgacatcttcgagcgcatcgcgggagaggcgtcccgcctggcgcactacaacaagcgctccaccatcacatcccgtgagatccagacggccgtgcgcctgctgctgcccggcaagctggccaagcacgccgtgtccgagggcaccaaggcggtcaccaagtacaccagctcgaagtaa

SEQ ID NO: 9378 - DNA, 2194 bp, Homo sapiens
  source 1..2194: mol_type = unassigned DNA; mol_type = unassigned DNA
ctgtgtcttaccatgcctgaaccggcaaaatccgctccggcccctaaaaagggctccaagaaagccgtcaccaaagcccagaagaaagacggcaagaagcgcaagcgcagccgcaaagagagctactccatctacgtgtacaaggtgctgaagcaggtccaccccgacaccggcatctcgtccaaggccatgggcatcatgaactccttcgtcaacgacatcttcgagcgcatcgcgggagaggcttcccgcctggcgcactacaacaagcgctccaccatcacatcccgcgagatccagacggccgtgcgcctgctgctgcccggcgagctggccaagcacgccgtgtccgagggcaccaaggcggtcaccaagtacaccagctccaagtgagtccctgccgggacctggcgctcgctcgctcgagtcgccggctgcttgactccaaaggctcttttcagagccacccacctaatcactagaaaagagcttgttcacttattcccttagtttcttttcataaagtaagttattttagtgtgaaggtcatgggaaatggcatacgtagctttttaactatttggaactcgaggtccccagtgcgtcattggatttgcttttgaatctagagcgtgtctttactcattgtgctgcttagccttcccaggagtcggttctcaattaggctgttgggaatccgcctctttacccgcccccactcccgccccacacgcgccctggtggctccttgggtctgtttcattctaaaacgaagtggctgagttcggctgtcatttaagagaactccaggacacaattcagcccgggttccgcaaacactgcgtgacagctctgtatgactgacgcttggcagcagcttttgtgtccggtcaccagttctgccgtgcgatggggcctcctgtggataccagccgttctgtgtattttggacgaaggccgcgcagccgggtcccagccttgtcctgattgggcgacaagaatattcaaaattctgcgcctttttctaatttgtagatttcagtttccgtcgttcactttgagactttgaaattcctatttctcattttgttgataatttctgcatttaatggtctgtgctttaaatggtaacgctacggccccaggtcactgcgaggcacttaccatgtagatacgggctcaaaagtcacctctcagagacctacgtcatccactcaggaattcgcgcctctcatacttgcctgtctcattttatcttccttctagcagctgtctgaaattggttcgtctgttttcttgtttatggtattctcaagcccttgacagaccggctagtgtggttttcccgtgcatcttcagcctggcacattatggacacttaaatactacgtattgatctaatattgttgggttaatttttccatcccacccttttcttaatcgcttccgtggatggatgaagggtgctgttcatttccattagatgtatgtgaaggcacagtgaaaatggaaatgttcttggagctacttcctcaaaatgtatccttagtcacctcagtgcaacagctgggagggggccgtgttaagattttttttgctacaaagaggaggtggcaatggtagatccacccttatgcttctcagtttagcataacctcttatggattttcatcaaattcagcgtgttggtcactggaaagagccttttccttctccttttcttactctcccctcatggtgttcccctcttaaaggagaggagcttttaatttacacttaccacctcatttgcttttctggaggccatgcaatataggcgggactacagagttaatctcctttttacaaatgaggccaagagaagcctcattggttcacagtcatgcagctcatactgtccacccttgtattctcagatgcaggacaattgcattttagttttattttgtggaggtgcagaatatttactctttctgtccaacccttgattctgccgaggaagacactgatggtttgatgagtgattcagctgtttttggctaagggcttttggagctgatggcaggggtttgatgaatccaaatgagctctagacattatcacagactgaatagatcttaactgtctcctacatgtgtgttttcaaatgtgtatagatgctattgttattaataaagttaccaattaatttaaa

SEQ ID NO: 9379 - DNA, 459 bp, Homo sapiens
  source 1..459: mol_type = unassigned DNA; mol_type = unassigned DNA
gtaatgagttggccctcagtcatccccgtccagtcttactgagttgcttgttatctgtgctacgagattcgaaaggttaataggacccatcctttggaagtaggaaagtggcatagaaggagaagctgagttagagatcactcacccacttgcccatcaactggaactgcaagagatcagagaataaagatatcagttggtccaaggaaaataatgaggaagagagaattggggagacagaattaatgtagactctgagggatcaactcagatctcttgagtttctatttctctttctcaaaatccagtactaacagaactgaacaagctacaggtggttatcaaggaaacttcactgcggtgcgtccaggcttaatgctacctcagggttgcccttcccatccttttcataaaataagctctaataaaccatggaagcacagatacaagttgcttcat

SEQ ID NO: 9380 - DNA, 752 bp, Homo sapiens
  source 1..752: mol_type = unassigned DNA; mol_type = unassigned DNA
ttttttcgcgcaaaaatgccggatccagcgaaatccgctcctgctcccaagaagggctccaaaaaggctgttacgaaagtgcagaagaaggacggcaagaagcgcaagcgcagccgcaaggagagctactccgtttacgtgtacaaggtgctgaagcaggtccaccccgacaccggcatctcgtccaaggccatgggcatcatgaactccttcgtcaacgacatcttcgagcgcatcgcgggagaggcgtcccgcctggcgcactacaacaagcgctccaccatcacatcccgcgagatccagacggccgtgcgcctgctgctgcccggcgagctggccaagcacgccgtgtccgagggcaccaaggcggtcaccaagtacaccagctcgaacattttctagctgaagttactgttgttgtcaactactcagcatccaaaattttcacaagaaaacaaggttttttctcttcaaattacagtccaaagagtggcaaacaagaaagatgacagagtccgaagaccttaagatttcttttctttggtcaagaactcattatacaatggatgatacatcttaggtggtcctactaaaaagagacacaagaatctagagactatctcactgtcaaccaatccaaggaactttgctttagatggccaaagccagaaacagcaaagtagaagaaccactagagctttaagcagttccttagtatttttccttggtttatccaagcctggatactggtc

SEQ ID NO: 9381 - DNA, 407 bp, Homo sapiens
  source 1..407: mol_type = unassigned DNA; mol_type = unassigned DNA
catcacatcccgcgagatccagacggccgtgcgcctgctgctgcccggcgagctggccaagcacgccgtgtccgagggcaccaaggcggtcaccaagtacaccagctcgaaggacagcacaacacagaatgaggatttgggtgaagttgcaaccaccgaggtccacataccagtttagaagcctcagagtataagtcattgggtatttaaggaccttacctaagctaactcagaagcattatgaagggcagtattgacattaactgccaggaatctcctaaaagtcaagggattatacatgagtcatagaaggatacttgaagatggacaattatagtcccatcactttatggaacactataagacccaaataagagaaatcccagtggtccacgaacttagctctg

SEQ ID NO: 9382 - DNA, 1954 bp, Homo sapiens
  source 1..1954: mol_type = unassigned DNA; mol_type = unassigned DNA
cttctttaagtctcttttctcttttttcgcgcaaaaatgccggatccagcgaaatccgctcctgctcccaagaagggctccaaaaaggctgttacgaaagtgcagaagaaggacggcaagaagcgcaagcgcagccgcaaggagagctactccgtttacgtgtacaaggtgctgaagcaggtccaccccgacaccggcatctcgtccaaggccatgggcatcatgaactccttcgtcaacgacatcttcgagcgcatcgcgggagaggcgtcccgcctggcgcactacaacaagcgctccaccatcacatcccgcgagatccagacggccgtgcgcctgctgctgcccggcgagctggccaagcacgccgtgtccgagggcaccaaggcggtcaccaagtacaccagctcgaagtaagagtgtgcaagggacgcaatagatcaaccacctaaccccaaaggctcttttcagagccacttcagtaatcgagaaagcagctgtaaacacttgtcagagcgtttgatagcttttggtcaggtagggagtgttaccatggtcacggatgcattcgggtttaggactaaggagtttcctgtagtcctgtaatgagttggccctcagtcatccccgtccagtcttactgagttgcttgttatctgtgctacgagattcgaaaggtttgactcgttctgggatatttgggagggatggagggaaggaggcggggggtggttctacaccccttcggcctttaacctgtatctttaaagtcgttttcctttttgtttctgaaagtaatgaacgagatgagatttcccatacagatgagaaaccctcggtccgacctcttactatttcttagtgttttaatctgttttccttaccatatacctacaggcgtctgtcacaaactttgtctaatatagccatgtgctttcgtcccttagcctttttgcaagtcctgacttagccatcctcccctaacttccattccagtgacttcaaacagggagatatattgccaccaccccaccccctgtggagtatttggcaatatctgtagatgttttgggttgtcaggtgtgtgtgtgttgcgggggaggtgctagaagtatccaatgggcagaggccaggagtgctaagcataaggcacaggacagtcctctggggggacaaagagctacctggcctgtaatgtcgatctttggtgattgagagaccccagcgcccaaagacatccctaaccttcaggatttaatcctcttcagtcaaacgtttccttaaccctatcagcccatgtttttcttttcttggtgaaagctgagcacttcataggctgtttacaggtccttctccacaggaaaatacttcctccaggacaagaaccctgtcttggttccaaactttcccaattataagagtcacctttgcgcttgttaaacctgcttccaggtgcttctcctgaggtttcctgattcagctagactggaggtgggacctgacgaggtggttggtttttagtgttctcaggagtgtggatgttttaataggtgttgggtcctcatgttaatcgacctgtgggtgtgtcacagtctttgtgtcacagatgtcctgagaaaggaaacaatttgaggatgagtggaggggaatttgtggtgtagagaaggccacagttaatatgtggggtgaatttctgaagacctctcagttcaaaacttgaataactcaagactcatcctgacaaaagccagtggatgtttcttttgccaaataaaatatacccttggtgcaactggaaaatcttagcttataattaacttgacagcctttgaaattaagccattcttgataaatcttgggggaattaacaactttgtgcttaaaatgaattttactaatttttatgatgttgaaattcaaatttacacccaattaaaagatataaaatgcggta

SEQ ID NO: 9383 - DNA, 999 bp, Homo sapiens
  source 1..999: mol_type = unassigned DNA; mol_type = unassigned DNA
ggtagttcggattacttctttaagtctcttttctcttttttcgcgcaaaaatgccggatccagcgaaatccgctcctgctcccaagaagggctccaaaaaggctgttacgaaagtgcagaagaaggacggcaagaagcgcaagcgcagccgcaaggagagctactccgtttacgtgtacaaggtgctgaagcaggtccaccccgacaccggcatctcgtccaaggccatgggcatcatgaactccttcgtcaacgacatcttcgagcgcatcgcgggagaggcgtcccgcctggcgcactacaacaagcgctccaccatcacatcccgcgagatccagacggccgtgcgcctgctgctgcccggcgagctggccaagcacgccgtgtccgagggcaccaaggcggtcaccaagtacaccagctcgaagttaataggacccatcctttggaagtaggaaagtggcatagaaggagaagctgagttagagatcactcacccacttgcccatcaactggaactgcaagagatcagagaataaagatatcagttggtccaaggaaaataatgaggaagagagaattggggagacagaattaatgtagactctgagggatcaactcagatctcttgagtttctatttctctttctcaaaatccagtactaacagaactgaacaagctacaggtggttatcaaggaaacttcactgcggtgcgtccaggcttaatgctacctcagggttgcccttcccatccttttcataaaataagctctaataaaccatggaagcacagatacaagttgcttcatactcatgagttctacccagagttaccacaggaagacaaaactcttgactcacaacagccacagcctgtacccttctaactgtcccctctgagtccaacttaccccaaaggagcagagttgtcaagaaccacatgttgtctccaagctggtgggagcagtgaaatctgtaacatgcaagatattgaaga

SEQ ID NO: 9384 - DNA, 5772 bp, Homo sapiens
  source 1..5772: mol_type = unassigned DNA; mol_type = unassigned DNA
cggccgcgcccgcgagccgtgagcgatgattggctgcgccacggcggcgggcggtccgtgggcgcacacaccctccccgcgcagccaatgggcgtgcgcacgtcactgatccggaggcccgcgggccggcagcccctcaataagccacattgttgcatgaaactccggcgcaggagtcccgggctgccgctggcaacatcgtgtcacccagctaagaaaatccgcgggcccgagccacgcgcctgtgaatcggagaggtcccactgcccgagtggagccgggctgagattcttctcaagttgagcctcagtgatcctgtggccgaagttagcgccttgacgtgggacaaccggacacgtcgccaggagagaactgaggcgccttctagcagttgtgacgccaaaatcacgtctccggagacccgcgccctccgccagccgggcgcaccctcgccggtagccttctttgtgcgccgtccggactcccagctcccggcccggcagccgagccccagcacaaagcagtcggaccgcgccgcccgcctcccctctcgcgtctccgcctcggtttcccaactctgcgccgtcgggccgcggcaggatgattgcctcgcatctgcttgcctacttcttcacggagctcaaccatgaccaagtgcagaaggttgaccagtatctctaccacatgcgcctctctgatgagaccctcttggagatctctaagcggttccgcaaggagatggagaaagggcttggagccaccactcaccctactgcagcagtgaagatgctgcccacctttgtgaggtccactccagatgggacagaacacggagagttcctggctctggatcttggagggaccaacttccgtgtgctttgggtgaaagtaacggacaatgggctccagaaggtggagatggagaatcagatctatgccatccctgaggacatcatgcgaggcagtggcacccagctgtttgaccacattgccgaatgcctggctaacttcatggataagctacaaatcaaagacaagaagctcccactgggttttaccttctcgttcccctgccaccagactaaactagacgagagtttcctggtctcatggaccaagggattcaagtccagtggagtggaaggcagagacgttgtggctctgatccggaaggccatccagaggagaggggactttgatatcgacattgtggctgtggtgaatgacacagttgggaccatgatgacctgtggttatgatgaccacaactgtgagattggtctcattgtgggcacgggcagcaacgcctgctacatggaagagatgcgccacatcgacatggtggaaggcgatgaggggcggatgtgtatcaatatggagtggggggccttcggggacgatggctcgctcaacgacattcgcactgagtttgaccaggagattgacatgggctcactgaacccgggaaagcaactgtttgagaagatgatcagtgggatgtacatgggggagctggtgaggcttatcctggtgaagatggccaaggaggagctgctctttggggggaagctcagcccagagcttctcaacaccggtcgctttgagaccaaagacatctcagacattgaaggggagaaggatggcatccggaaggcccgtgaggtcctgatgcggttgggcctggacccgactcaggaggactgcgtggccactcaccggatctgccagatcgtgtccacacgctccgccagcctgtgcgcagccaccctggccgccgtgctgcagcgcatcaaggagaacaaaggcgaggagcggctgcgctctactattggggtcgacggttccgtctacaagaaacacccccattttgccaagcgtctacataagaccgtgcggcggctggtgcccggctgcgatgtccgcttcctccgctccgaggatggcagtggcaaaggtgcagccatggtgacagcagtggcttaccggctggccgatcaacaccgtgcccgccagaagacattagagcatctgcagctgagccatgaccagctgctggaggtcaagaggaggatgaaggtagaaatggagcgaggtctgagcaaggagactcatgccagtgcccccgtcaagatgctgcccacctacgtgtgtgctaccccggacggcacagagaaaggggacttcttggccttggaccttggaggaacaaatttccgggtcctgctggtccgtgttcggaatgggaagtggggtggagtggagatgcacaacaagatctacgccatcccgcaggaggtcatgcacggcaccggggacgagctctttgaccacattgtccagtgcatcgcggacttcctcgagtacatgggcatgaagggcgtgtccctgcctctgggttttaccttctccttcccctgccagcagaacagcctggacgagagcatcctcctcaagtggacaaaaggcttcaaggcatctggctgcgagggcgaggacgtggtgaccctgctgaaggaagcgatccaccggcgagaggagtttgacctggatgtggttgctgtggtgaacgacacagtcggaactatgatgacctgtggctttgaagaccctcactgtgaagttggcctcattgttggcacgggcagcaatgcctgctacatggaggagatgcgcaacgtggaactggtggaaggagaagaggggcggatgtgtgtgaacatggaatggggggccttcggggacaatggatgcctagatgacttccgcacagaatttgatgtggctgtggatgagctttcactcaaccccggcaagcagaggttcgagaaaatgatcagtggaatgtacctgggtgagattgtccgtaacattctcatcgatttcaccaagcgtggactactcttccgaggccgcatctcagagcggctcaagacaaggggcatctttgaaaccaagttcttgtctcagattgagagtgactgcctggccctgctgcaagtccgagccatcctgcaacacttagggcttgagagcacctgtgacgacagcatcattgttaaggaggtgtgcactgtggtggcccggcgggcagcccagctctgtggcgcaggcatggccgctgtggtggacaggatacgagaaaaccgtgggctggacgctctcaaagtgacagtgggtgtggatgggaccctctacaagctacatcctcactttgccaaagtcatgcatgagacagtgaaggacctggctccgaaatgtgatgtgtctttcctgcagtcagaggatggcagcgggaagggggcggcgctcatcactgctgtggcctgccgcatccgtgaggctggacagcgatagaacccctgaaatcggaagggacttcctctttctctccttcttccctgttttaaattataagatgtcatccccttgtgtcagagacagaccccttggcttttgcttggcagagaggaccccactggactgggttttgtctctgcatctcattgtagagcttggtggctgagcttggccctattaagataaatagagttccaaataaggatttgttcacatgcatcataaccattcccattggttctcctaaaacatgaaaattatctcccttagtaatcccccttgccaaattccatgtccctgtataattctacaggatggggacactaatgaagatacggttgcttcaccttggagcctgaacatgacatttctaagtggggtgcatcccccagcactgatgttgttactgattctcctgtcagagatctgggaggtctccactgaggatgtgagcctgattatcctataggcagacgtggggagggtggaggggtgacagtggaggaaaatccatggatatccacgcagcagcccctctttaacctcatctacaagcatttgccctgtggattccagcatttgccattcctggaatcaaggaatcctgagtctgggcaatgaaaccaaagccaggagttgacgcatcctgcagttgggccagctgtcgcatctcagcggggcgcacatgttatccacaagcaatggacctttggggaagggggagtttttagtttgttttacaaatttttcctgcaaaagtggaatcactgtattttcattttaatttatatttgaaattttatttagttcttgagtagatctgcttcttcatcttgacatgtaatgaatggtcagttgtacgtaatgtatttatatgttaatttgttatgtatatagatgtgcaagtcttgtcagaattggcctcagtgtagttaaagggcagaaggggaagatactgactagtcatagaaatacctcattcgcctgtgggaagagaagggaagcctcttcagggtgagtgaatggcaaagcggttgcttctggctcctccttcccctgtggtcttggaagtgtgtggaaggcagggacagagatggaggccgagccaatagactgaagagaccacagcaattggctcctccatctagagattttcttggcagtattccatgggatgttaagcaaaggaaaccaaaggaatcgtttcaaatggactcatggcttagaaatctttattcttagggcagtcagtagtattctaaagctttctgacaagataaaggaagtcaccaaaatttctttttttaaattgtatctaatcctcaacaacaaaccaaaacagaacaattaaacagccaaataaaacctcagggacaacatttttggtgtatttgagccctcccagcaagtttcaccttgggtttgtattttaaatgttttacaagaattgtccatgtgcttccctaggctgagctggcattggtctgctgacctgtttttgtgtttttcttttttttatacacaacatttatttcaaactattgggagggatgagagtggcttaaaaacttccatccctacttttcaagagtgcagttgattctgaatctgaaagcccgcctctgtcctaaaatacaaacaagcacagacattaaacctggatactatatgataaagagggatgtaactattgaattggatacaaggatcagaatggaaagaaactcacgatgaaattgaacctggtttttgtatatttatcaaacttgtgctgagaatagtgtctgattatacgacttttaagcaaagttgggtgtaattaggtgaaaacagcccaggtcctcccgggagcacagaggggctaggggctggtccttctcgtttgctctagtcttgctttgctgtctggtgtagctcctctgctgctcccatctgcactaattgacccaaaacgtgggtatttcctgctacacaaaagccaaaaggtttcatgtagattttagttcactaaagggtgcccacaaaatagagattaattttaacttaaattttaagcttgaagattaggtactatctgtgaagttacacttttttttttttttttaaaggtagagatgtgtgtgtgtgtaggtattaaagatgtgttgttggtttccaaaaaggaacactggaaaataaattttgaatgtttatgttctcagaatcaggttgacagtcccttgctgacatggctttgctttgtgtaaatacagtggatctcaatcttcggggtgtgatgaatagcgaatcatctcaaatccttgagcactcagtctagtgaagatgttgtcattatgtacaatacataactagtttaattaactatgtgatgttaactattattaataaattttaacattttccaaaataatcaaa

SEQ ID NO: 9385 - DNA, 5278 bp, Homo sapiens
  source 1..5278: mol_type = unassigned DNA; mol_type = unassigned DNA
acccgggaaggagtaggaaaggggcagaggaactccgcccgccgcgccccctccccggaactgtggcgcccggaactgaggctcggcgaggggcgtcccccattaacccccgcccctccaaatcagcctcgggaccgcccagcctcgtgtcctcaggatctgcctctgagttgaccagtatctctaccacatgcgcctctctgatgagaccctcttggagatctctaagcggttccgcaaggagatggagaaagggcttggagccaccactcaccctactgcagcagtgaagatgctgcccacctttgtgaggtccactccagatgggacagaacacggagagttcctggctctggatcttggagggaccaacttccgtgtgctttgggtgaaagtaacggacaatgggctccagaaggtggagatggagaatcagatctatgccatccctgaggacatcatgcgaggcagtggcacccagctgtttgaccacattgccgaatgcctggctaacttcatggataagctacaaatcaaagacaagaagctcccactgggttttaccttctcgttcccctgccaccagactaaactagacgagagtttcctggtctcatggaccaagggattcaagtccagtggagtggaaggcagagacgttgtggctctgatccggaaggccatccagaggagaggggactttgatatcgacattgtggctgtggtgaatgacacagttgggaccatgatgacctgtggttatgatgaccacaactgtgagattggtctcattgtgggcacgggcagcaacgcctgctacatggaagagatgcgccacatcgacatggtggaaggcgatgaggggcggatgtgtatcaatatggagtggggggccttcggggacgatggctcgctcaacgacattcgcactgagtttgaccaggagattgacatgggctcactgaacccgggaaagcaactgtttgagaagatgatcagtgggatgtacatgggggagctggtgaggcttatcctggtgaagatggccaaggaggagctgctctttggggggaagctcagcccagagcttctcaacaccggtcgctttgagaccaaagacatctcagacattgaaggggagaaggatggcatccggaaggcccgtgaggtcctgatgcggttgggcctggacccgactcaggaggactgcgtggccactcaccggatctgccagatcgtgtccacacgctccgccagcctgtgcgcagccaccctggccgccgtgctgcagcgcatcaaggagaacaaaggcgaggagcggctgcgctctactattggggtcgacggttccgtctacaagaaacacccccattttgccaagcgtctacataagaccgtgcggcggctggtgcccggctgcgatgtccgcttcctccgctccgaggatggcagtggcaaaggtgcagccatggtgacagcagtggcttaccggctggccgatcaacaccgtgcccgccagaagacattagagcatctgcagctgagccatgaccagctgctggaggtcaagaggaggatgaaggtagaaatggagcgaggtctgagcaaggagactcatgccagtgcccccgtcaagatgctgcccacctacgtgtgtgctaccccggacggcacagagaaaggggacttcttggccttggaccttggaggaacaaatttccgggtcctgctggtccgtgttcggaatgggaagtggggtggagtggagatgcacaacaagatctacgccatcccgcaggaggtcatgcacggcaccggggacgagctctttgaccacattgtccagtgcatcgcggacttcctcgagtacatgggcatgaagggcgtgtccctgcctctgggttttaccttctccttcccctgccagcagaacagcctggacgagagcatcctcctcaagtggacaaaaggcttcaaggcatctggctgcgagggcgaggacgtggtgaccctgctgaaggaagcgatccaccggcgagaggagtttgacctggatgtggttgctgtggtgaacgacacagtcggaactatgatgacctgtggctttgaagaccctcactgtgaagttggcctcattgttggcacgggcagcaatgcctgctacatggaggagatgcgcaacgtggaactggtggaaggagaagaggggcggatgtgtgtgaacatggaatggggggccttcggggacaatggatgcctagatgacttccgcacagaatttgatgtggctgtggatgagctttcactcaaccccggcaagcagaggttcgagaaaatgatcagtggaatgtacctgggtgagattgtccgtaacattctcatcgatttcaccaagcgtggactactcttccgaggccgcatctcagagcggctcaagacaaggggcatctttgaaaccaagttcttgtctcagattgagagtgactgcctggccctgctgcaagtccgagccatcctgcaacacttagggcttgagagcacctgtgacgacagcatcattgttaaggaggtgtgcactgtggtggcccggcgggcagcccagctctgtggcgcaggcatggccgctgtggtggacaggatacgagaaaaccgtgggctggacgctctcaaagtgacagtgggtgtggatgggaccctctacaagctacatcctcactttgccaaagtcatgcatgagacagtgaaggacctggctccgaaatgtgatgtgtctttcctgcagtcagaggatggcagcgggaagggggcggcgctcatcactgctgtggcctgccgcatccgtgaggctggacagcgatagaacccctgaaatcggaagggacttcctctttctctccttcttccctgttttaaattataagatgtcatccccttgtgtcagagacagaccccttggcttttgcttggcagagaggaccccactggactgggttttgtctctgcatctcattgtagagcttggtggctgagcttggccctattaagataaatagagttccaaataaggatttgttcacatgcatcataaccattcccattggttctcctaaaacatgaaaattatctcccttagtaatcccccttgccaaattccatgtccctgtataattctacaggatggggacactaatgaagatacggttgcttcaccttggagcctgaacatgacatttctaagtggggtgcatcccccagcactgatgttgttactgattctcctgtcagagatctgggaggtctccactgaggatgtgagcctgattatcctataggcagacgtggggagggtggaggggtgacagtggaggaaaatccatggatatccacgcagcagcccctctttaacctcatctacaagcatttgccctgtggattccagcatttgccattcctggaatcaaggaatcctgagtctgggcaatgaaaccaaagccaggagttgacgcatcctgcagttgggccagctgtcgcatctcagcggggcgcacatgttatccacaagcaatggacctttggggaagggggagtttttagtttgttttacaaatttttcctgcaaaagtggaatcactgtattttcattttaatttatatttgaaattttatttagttcttgagtagatctgcttcttcatcttgacatgtaatgaatggtcagttgtacgtaatgtatttatatgttaatttgttatgtatatagatgtgcaagtcttgtcagaattggcctcagtgtagttaaagggcagaaggggaagatactgactagtcatagaaatacctcattcgcctgtgggaagagaagggaagcctcttcagggtgagtgaatggcaaagcggttgcttctggctcctccttcccctgtggtcttggaagtgtgtggaaggcagggacagagatggaggccgagccaatagactgaagagaccacagcaattggctcctccatctagagattttcttggcagtattccatgggatgttaagcaaaggaaaccaaaggaatcgtttcaaatggactcatggcttagaaatctttattcttagggcagtcagtagtattctaaagctttctgacaagataaaggaagtcaccaaaatttctttttttaaattgtatctaatcctcaacaacaaaccaaaacagaacaattaaacagccaaataaaacctcagggacaacatttttggtgtatttgagccctcccagcaagtttcaccttgggtttgtattttaaatgttttacaagaattgtccatgtgcttccctaggctgagctggcattggtctgctgacctgtttttgtgtttttcttttttttatacacaacatttatttcaaactattgggagggatgagagtggcttaaaaacttccatccctacttttcaagagtgcagttgattctgaatctgaaagcccgcctctgtcctaaaatacaaacaagcacagacattaaacctggatactatatgataaagagggatgtaactattgaattggatacaaggatcagaatggaaagaaactcacgatgaaattgaacctggtttttgtatatttatcaaacttgtgctgagaatagtgtctgattatacgacttttaagcaaagttgggtgtaattaggtgaaaacagcccaggtcctcccgggagcacagaggggctaggggctggtccttctcgtttgctctagtcttgctttgctgtctggtgtagctcctctgctgctcccatctgcactaattgacccaaaacgtgggtatttcctgctacacaaaagccaaaaggtttcatgtagattttagttcactaaagggtgcccacaaaatagagattaattttaacttaaattttaagcttgaagattaggtactatctgtgaagttacacttttttttttttttttaaaggtagagatgtgtgtgtgtgtaggtattaaagatgtgttgttggtttccaaaaaggaacactggaaaataaattttgaatgtttatgttctcagaatcaggttgacagtcccttgctgacatggctttgctttgtgtaaatacagtggatctcaatcttcggggtgtgatgaatagcgaatcatctcaaatccttgagcactcagtctagtgaagatgttgtcattatgtacaatacataactagtttaattaactatgtgatgttaactattattaataaattttaacattttccaaaataatcaaa

SEQ ID NO: 9386 - DNA, 395 bp, Homo sapiens
  source 1..395: mol_type = unassigned DNA; mol_type = unassigned DNA
ccctcttggagatctctaagcggttccgcaaggagatggagaaagggcttggagccaccactcaccctactgcagcagtgaagatgctgcccacctttgtgaggtccactccagatgggacagaacacggagagttcctggctctggatcttggagggaccaacttccgtgtgctttgggtgaaagtaacggacaatgggctccagaaggtggagatggagaatcagatctatgccatccctgaggacatcatgcgaggcagtggcacccaggtatgacccttctctcagggcagcccctggtgacaaaaaacttccttggcatgttctttctgtactttctccagccgctcccagcgtgtggataggcagtcacccaagacactcatggatgcc

SEQ ID NO: 9387 - DNA, 948 bp, Homo sapiens
  source 1..948: mol_type = unassigned DNA; mol_type = unassigned DNA
cggtgacgcgggtggccaaagcggagcggagcgggggtgaggagagtcgagggaggtgacgcgcgctgccggggcgaggttgcgaggggcggtgttgaagaatgtgtgggcgaacatcctgtcacttacctagagatgttctcacgagagcttgcgcctaccaggatcggcggggccagcagcggctcccggagtggagggaccctgataagtactgcccctcttacaacaagagtcctcaatccaacagcccagtgcttctgtctcgactgcactttgagaaggtgcctctgggaaagggaagacgctgtgtcgttttagcagatggattctatgagtggcagcgatgtcagggaacaaaccagaggcagccatacttcatctattttcctcaaatcaagacagagaagtcaggtagcattggtgctgcagatagtcctgagaactgggagaaagtctgggacaactggaggctgctgacaatggccgggatctttgactgctgggagcccccagagggaggagatgtcctgtattcctataccatcatcacagtggattcctgcaaaggcttgagtgacatccaccacaggatgcctgccatattagatggagaggaggcagtttctaaatggcttgactttggtgaagtctcaactcaggaagctctgaaattaatccacccaacagagaacatcaccttccatgcagtctcttctgtggtgaacaactcgcgaaacaacactcctgagtgtctggctcctgtcgacttggtggtcaaaaaggagctcagggcaagtggcagtagccagaggatgttgcagtggttggccacaaagtcacccaaaaaggaagactcaaaaacacctcaaaaggaagagtcagatgttccccagtggtccagtcagttcctgcagaagagtccactccccaccaagagaggcactg

SEQ ID NO: 9388 - DNA, 2515 bp, Homo sapiens
  source 1..2515: mol_type = unassigned DNA; mol_type = unassigned DNA
tggccaaagcggagcggagcgggggtgaggagagtcgagggaggtgacgcgcgctgccggggcgaggttgcgaggggcggtgttgaagaatgtgtgggcgaacatcctgtcacttacctagagatgttctcacgagagcttgcgcctaccaggatcggcggggccagcagcggctcccggagtggagggaccctgataagtactgcccctcttacaacaagagtcctcaatccaacagcccagtgcttctgtctcgactgcactttgagaaggatgcagactcatctgagcgtatcattgctcccatgcgctggggcttggtcccttcttggttcaaagaaagtgatccttccaagctgcagttcaatactaccaactgtcgtagtgataccgtaatggagaaacggtcatttaaggtgcctctgggaaagggaagacgctgtgtcgttttagcagatggattctatgagtggcagcgatgtcagggaacaaaccagaggcagccatacttcatctattttcctcaaatcaagacagagaagtcaggtagcattggtgctgcagatagtcctgagaactgggagaaagtctgggacaactggaggctgctgacaatggccgggatctttgactgctgggagcccccagagggaggagatgtcctgtattcctataccatcatcacagtggattcctgcaaaggcttgagtgacatccaccacaggatgcctgccatattagatggagaggaggcagtttctaaatggcttgactttggtgaagtctcaactcaggaagctctgaaattaatccacccaacagagaacatcaccttccatgcagtctcttctgtggtgaacaactcgcgaaacaacactcctgagtgtctggctcctgtcgacttggtggtcaaaaaggagctcagggcaagtggcagtagccagaggatgttgcagtggttggccacaaagtcacccaaaaaggaagactcaaaaacacctcaaaaggaagagtcagatgttccccagtggtccagtcagttcctgcagaagagtccactccccaccaagagaggcactgcaggactcctagagcaatggctgaagcgggagaaggaggaggaacctgtggccaagcgtccttacagccagtgacacaggactttcagagaccaaggccagggtctgctgcactgctgttctgataataggttcttaacattgtatgtatatgtgtttgctttgggaggaggtggcactgtgttagttgacagttgtgggctcatgtagtcttttttgccatgagtaggagcccctagtggggctggtggacagctttggaagaggtgtcctgctgctgttaccagccatgtgggccccataggggcactgcgcctgctgccctttcctggcagggctggtggagtcttccctcaaagcatgccttacccagctgggaagtctctgccctgatctggtactccttgtagtaagctgttttctgctcagccactgggctctttcacttttttagttcttaaaaatttatttttaagttctaaaataaaataaaaataagttcttaaaatttatttttttcctgaataaattgtatttggtaaacttctgcctacattttggaaagtgatgctggtggggaaagttctagatcttacttggtttcttctagaatcagtcttcaggaatggattttgtcacaaatggggcatgggggctttctgaggaaataactacaagtcttggtggtgggctccttattatgtttctttttctttcattcttgatacttggaagtcgtctgaatcctttagcttcaaaccagcctgagtttgagtgcttgccgtagcagaaactatccttaccacaggtgggaaggaaaggaccagtttctagcagtgtcgggccactcctctttcgaacatccctaagggaggcattcacaaaagctgtcccaagcagctggaagaaaacagcttccgagatgaccaggaggactgggcggcgccgagcccagaacgctcctggcgcagcaccgttggcgttggccgattgctgctggtggggggcgggggtgcaggccccagtctctatgcaaatcagggatcagaagatcggaatttccaccaatcagcgggaagcctcggccctgtaactgctaatgggagacagcagcgccacgccacaggcttttcccctggtttcgggaggggtggggagccaggtggggctcccgcccagaccctttcccgaggtccgccctctccgccttttctctaaattcctcttttgagtgccctcccttccggttgagaggcgggggttggcccgtagttgtacactcagtcaccctgcactgtggaggcgggggcctcccttgtggactgatttgcgtgggatttggttgttttattaagagatttaaaaaattcagatgacttactagtatgactgttttgtcatatttgcttccaggttaataaatgacaaaaatgaaa

SEQ ID NO: 9389 - DNA, 1490 bp, Homo sapiens
  source 1..1490: mol_type = unassigned DNA
aagcggagcggagcgggggtgaggagagtcgagggaggtgacgcgcgctgccggggcgaggttgcgaggggcggtgttgaagaatgtgtgggcgaacatcctgtcacttacctagagatgttctcacgagagcttgcgcctaccaggatcggcggggccagcagcggctcccggagtggagggaccctgataagtactgcccctcttacaacaagagtcctcaatccaacagcccagtgcttctgtctcgactgcactttgagaaggatgcagactcatctgagcgtatcattgctcccatgcgctggggcttggtcccttcttggttcaaagaaagtgatccttccaagctgcagttcaatactaccaactgtcgtagtgataccgtaatggagaaacggtcatttaagtcaggtagcattggtgctgcagatagtcctgagaactgggagaaagtctgggacaactggaggctgctgacaatggccgggatctttgactgctgggagcccccagagggaggagatgtcctgtattcctataccatcatcacagtggattcctgcaaaggcttgagtgacatccaccacaggatgcctgccatattagatggagaggaggcagtttctaaatggcttgactttggtgaagtctcaactcaggaagctctgaaattaatccacccaacagagaacatcaccttccatgcagtctcttctgtggtgaacaactcgcgaaacaacactcctgagtgtctggctcctgtcgacttggtggtcaaaaaggagctcagggcaagtggcagtagccagaggatgttgcagtggttggccacaaagtcacccaaaaaggaagactcaaaaacacctcaaaaggaagagtcagatgttccccagtggtccagtcagttcctgcagaagagtccactccccaccaagagaggcactgcaggactcctagagcaatggctgaagcgggagaaggaggaggaacctgtggccaagcgtccttacagccagtgacacaggactttcagagaccaaggccagggtctgctgcactgctgttctgataataggttcttaacattgtatgtatatgtgtttgctttgggaggaggtggcactgtgttagttgacagttgtgggctcatgtagtcttttttgccatgagtaggagcccctagtggggctggtggacagctttggaagaggtgtcctgctgctgttaccagccatgtgggccccataggggcactgcgcctgctgccctttcctggcagggctggtggagtcttccctcaaagcatgccttacccagctgggaagtctctgccctgatctggtactccttgtagtaagctgttttctgctcagccactgggctctttcacttttttagttcttaaaaatttatttttaagttctaaaataaaataaaaataagttcttaaaatttatttttttcctgaataaattgtatttggtaaa

SEQ ID NO: 9390 - DNA, 599 bp, Homo sapiens
  source 1..599: mol_type = unassigned DNA
gaggtgacgcgcgctgccggggcgaggttgcgaggggcggtgttgaagaatgtgtgggcgaacatcctgtcacttacctagagatgttctcacgagagcttgcgcctaccaggatcggcggggccagcagcggctcccggagtggagggaccctgataagtactgcccctcttacaacaagagtcctcaatccaacagcccagtgcttctgtctcgactgcactttgagaagtcaggtagcattggtgctgcagatagtcctgagaactgggagaaagtctgggacaactggaggctgctgacaatggccgggatctttgactgctgggagcccccagagggaggagatgtcctgtattcctataccatcatcacagtggattcctgcaaaggcttgagtgacatccaccacaggatgcctgccatattagatggagaggaggcagtttctaaatggcttgactttggtgaagtctcaactcaggaagctctgaaattaatccacccaacagagaacatcaccttccatgcagtctcttctgtggtgaacaactcgcgaaacaacactcctgagtgtctggctcctgtcgacttggtgg

SEQ ID NO: 9391 - DNA, 1952 bp, Homo sapiens
  source 1..1952: mol_type = unassigned DNA
gaggggaaaggaagcgacgcgagctgacagaggggagcagaggcccgagcggacgcgaggcgacgcggagagggcggcctgggccgaagtgaggcgacgcggggcggcggagtctgagggccggagcggagcggaggcgacgcggggaggggcgagggatcgcggccggtggctgggggccacctgctccccgagcaccggcccccgctccggggagcagagtccggagcgggatccgcggcccacaggttgcgaggggcggtgttgaagaatgtgtgggcgaacatcctgtcacttacctagagatgttctcacgagagcttgcgcctaccaggatcggcggggccagcagcggctcccggagtggagggaccctgataagtactgcccctcttacaacaagagtcctcaatccaacagcccagtgcttctgtctcgactgcactttgagaaggatgcagactcatctgagcgtatcattgctcccatgcgctggggcttggtcccttcttggttcaaagaaagtgatccttccaagctgcagttcaatactaccaactgtcgtagtgataccgtaatggagaaacggtcatttaaggtgcctctgggaaagggaagacgctgtgtcgttttagcagatggattctatgagtggcagcgatgtcagggaacaaaccagaggcagccatacttcatctattttcctcaaatcaagacagagaagtcaggtagcattggtgctgcagatagtcctgagaactgggagaaagtctgggacaactggaggctgctgacaatggccgggatctttgactgctgggagcccccagagggaggagatgtcctgtattcctataccatcatcacagtggattcctgcaaaggcttgagtgacatccaccacaggatgcctgccatattagatggagaggaggcagtttctaaatggcttgactttggtgaagtctcaactcaggaagctctgaaattaatccacccaacagagaacatcaccttccatgcagtctcttctgtggtgaacaactcgcgaaacaacactcctgagtgtctggctcctgtcgacttggtggtcaaaaaggagctcagggcaagtggcagtagccagaggatgttgcagtggttggccacaaagtcacccaaaaaggaagactcaaaaacacctcaaaaggaagagtcagatgttccccagtggtccagtcagttcctgcagaagagtccactccccaccaagagaggcactgcaggactcctagagcaatggctgaagcgggagaaggaggaggaacctgtggccaagcgtccttacagccagtgacacaggactttcagagaccaaggccagggtctgctgcactgctgttctgataataggttcttaacattgtatgtatatgtgtttgctttgggaggaggtggcactgtgttagttgacagttgtgggctcatgtagtcttttttgccatgagtaggagcccctagtggggctggtggacagctttggaagaggtgtcctgctgctgttaccagccatgtgggccccataggggcactgcgcctgctgccctttcctggcagggctggtggagtcttccctcaaagcatgccttacccagctgggaagtctctgccctgatctggtactccttgtagtaagctgttttctgctcagccactgggctctttcacttttttagttcttaaaaatttatttttaagttctaaaataaaataaaaataagttcttaaaatttatttttttcctgaataaattgtatttggtaaacttctgcctacattttggaaagtgatgctggtggggaaagttctagatcttacttggtttcttctagaatcagtcttcaggaatggattttgtcacaaatggggcatgggggctttctgaggaaataactacaagtcttggtggtggg

SEQ ID NO: 9392 - DNA, 1763 bp, Homo sapiens
  source 1..1763: mol_type = unassigned DNA
gcgagctgacagaggggagcagaggcccgagcggacgcgaggcgacgcggagagggcggcctgggccgaagtgaggcgacgcggggcggcggagtctgagggccggagcggagcggaggcgacgcggggaggggcgagggatcgcggccggtggctgggggccacctgctccccgagcaccggcccccgctccggggagcagagtccggagcgggatccgcggcccacaggttcgcaggttgcgaggggcggtgttgaagaatgtgtgggcgaacatcctgtcacttacctagagatgttctcacgagagcttgcgcctaccaggatcggcggggccagcagcggctcccggagtggagggaccctgataagtactgcccctcttacaacaagagtcctcaatccaacagcccagtgcttctgtctcgactgcactttgagaaggatgcagactcatctgagcgtatcattgctcccatgcgctggggcttggtcccttcttggttcaaagaaagtgatccttccaagctgcagttcaatactaccaactgtcgtagtgataccgtaatggagaaacggtcatttaaggtgcctctgggaaagggaagacgctgtgtcgttttagcagatggattctatgagtggcagcgatgtcagggaacaaaccagaggcagccatacttcatctattttcctcaaatcaagacagagaagtcaggtagcattggtgctgcagatagtcctgagaactgggagaaagtctgggacaactggaggctgctgacaatggccgggatctttgactgctgggagcccccagagggaggagatgtcctgtattcctataccatcatcacagtggattcctgcaaaggcttgagtgacatccaccacaggatgcctgccatattagatggagaggaggcagtttctaaatggcttgactttggtgaagtctcaactcaggaagctctgaaattaatccacccaacagagaacatcaccttccatgcagtctcttctgtggtgaacaactcgcgaaacaacactcctgagtgtctggctcctgtcgacttggtggtcaaaaaggagctcagggcaagtggcagtagccagaggatgttgcagtggttggccacaaagtcacccaaaaaggaagactcaaaaacacctcaaaaggaagagtcagatgttccccagtggtccagtcagttcctgcagaagagtccactccccaccaagagaggcactgcaggactcctagagcaatggctgaagcgggagaaggaggaggaacctgtggccaagcgtccttacagccagtgacacaggactttcagagaccaaggccagggtctgctgcactgctgttctgataataggttcttaacattgtatgtatatgtgtttgctttgggaggaggtggcactgtgttagttgacagttgtgggctcatgtagtcttttttgccatgagtaggagcccctagtggggctggtggacagctttggaagaggtgtcctgctgctgttaccagccatgtgggccccataggggcactgcgcctgctgccctttcctggcagggctggtggagtcttccctcaaagcatgccttacccagctgggaagtctctgccctgatctggtactccttgtagtaagctgttttctgctcagccactgggctctttcacttttttagttcttaaaaatttatttttaagttctaaaataaaataaaaataagttcttaaaattta

SEQ ID NO: 9393 - DNA, 774 bp, Homo sapiens
  source 1..774: mol_type = unassigned DNA
cagaggcccgagcggacgcgaggcgacgcggagagggcggcctgggccgaagttgcgaggggcggtgttgaagaatgtgtgggcgaacatcctgtcacttacctagagatgttctcacgagagcttgcgcctaccaggatcggcggggccagcagcggctcccggagtggagggaccctgataagtactgcccctcttacaacaagagtcctcaatccaacagcccagtgcttctgtctcgactgcactttgagaaggatgcagactcatctgagcgtatcattgctcccatgcgctggggcttggtcccttcttggttcaaagaaagtgatccttccaagctgcagttcaatactaccaactgtcgtagtgataccgtaatggagaaacggtcatttaaggtgcctctgggaaagggaagacgctgtgtcgttttagcagatggattctatgagtggcagcgatgtcagggaacaaaccagaggcagccatacttcatctattttcctcaaatcaagacagagaagtcaggtagcattggtgctgcagatagtcctgagaactgggagaaagtctgggacaactggaggctgctgacaatggccgggatctttgactgctgggagcccccagagggaggagatgtcctgtattcctataccatcatcacagtggattcctgcaaaggcttgagtgacatccaccacaggatgcctgccatattagatggagaggaggcagtttctaaatggcttgactttggtgaagtctcaa

SEQ ID NO: 9394 - DNA, 643 bp, Homo sapiens
  source 1..643: mol_type = unassigned DNA
cggacgcgaggcgacgcggagagggcggcctgggccgaagtgaggcgacgcggggcggcggagtctgagggccggagcggagcggaggcgacgcggggaggggcgagggatcgcggccggtggctgggggccacctgctccccgagcaccggcccccgctccggggagcagagtccggagcgggatccgcggcccacaggttgcgaggggcggtgttgaagaatgtgtgggcgaacatcctgtcacttacctagagatgttctcacgagagcttgcgcctaccaggatcggcggggccagcagcggctcccggagtggagggaccctgataagtactgcccctcttacaacaagagtcctcaatccaacagcccagtgcttctgtctcgactgcactttgagaagtcaggtagcattggtgctgcagatagtcctgagaactgggagaaagtctgggacaactggaggctgctgacaatggccgggatctttgactgctgggagcccccagagggaggagatgtcctgtattcctataccatcatcacagtggattcctgcaaaggcttgagtgacatccaccacaggatgcctgccatattagatggagaggaggcagtttctaaatggcttgactttggtg

SEQ ID NO: 9395 - DNA, 2475 bp, Homo sapiens
  source 1..2475: mol_type = unassigned DNA
cctctcggcgccgccgcagtgcgcagaacagctctggtcctcacagccagtgcaccggaggggcgcgctcccgagctggcgcagtttcccagcgcggtgcccgcccctcatcctcctccagtctccctcccctcgccgactgccgccccaggctccgccatggggaatgtgccatccgcggtgaagcactgcctcagctaccagcagcttctccgggagcatctctggatcggggattcagtggcaggggcgctcgaccccgcgcaggaaacatcccagttatctggactccctgagtttgttaaaatagtagaagttgggcctagggatggattgcagaatgaaaaggttatagttcctacagatataaaaattgaatttatcaatcgactttcccaaactggcttgtctgtaatagaagtgactagctttgtgtcttccagatgggtaccacagatggctgatcacactgaagtaatgaaaggcattcatcaatatccaggagttcgctatcctgtccttactcctaatcttcagggttttcaccatgctgttgctgctggagctactgagatatcagtttttggagctgcatctgaatcctttagcaagaagaatattaactgttccattgaagaaagtatgggaaaatttgaggaggttgttaagtctgcaagacacatgaatattccagcacgagggtatgtgtcttgtgctctgggctgtccatatgaaggaagtattacaccgcaaaaagtgacagaagtgtctaagagattgtacggcatgggttgttatgagatctctctaggagacacaattggagtgggaactccaggaagtatgaaaagaatgttggaaagtgtgatgaaagaaatcccaccaggtgctcttgctgttcactgtcatgacacatacggacaagccttagcaaatatccttacggcccttcagatgggaattaatgtggtggactccgcagtatccggattaggtggctgcccttatgcaaaaggtgcttctgggaatgtagccactgaggatttgatatatatgcttaatggcctggggctcaatacaggtgtgaatctatacaaagtgatggaagctggtgactttatttgcaaagctgtgaataaaaccacaaactctaaagtagcacaagcctccttcaatgcttgacttgaatggatttatgacgtaccgttgagaagatcaatttcagctacaatactcatctgaaaatcattaatgccaacttgctctgatatgtgaagtaatggacaagagtgggaaaaaagagatccttttcaaaaagattataactggatagattaagtcaacaaaatgcaatatcagtcatcaggtaaattgcaagctgaggataaataataaaacttgtcataattttgaacttggaaaaaagtttcttttgctctcatagaaataactttttaatttagtagatgggaaaattgacttcgtatttccccaagtatcaaatactgtgttaatacttaatcaagcaggcttaacactgtgtacatattgtcagtagtttatgagctcctgcatagtatgcagagtgtgtggcctcaatattatacattatgcctctggatctcaactactcatttgccaagtcagttatgttatggaccaaaagccaaatctccatctgaccctacataattttagcaatagaacttttatatttcaagtatggctaacatctgttaactatttcagtgactttatctggttccaagaggctgtggccaatggcaagatgccatatcctggaaacatattacgacctcccatgtttgttacatgcatccagtttaccacactttacctgtcatcagttatagtaaaaaccagcatggtgttactcaactattgagaaattgtaagctatttttttttgtcctgatgtctaaattgcagtgataagaataggttgatacatgtatcataatctacctttataattttcagatcactttcaaattgcccaaggaaatattgtgatcctaagaatattaagataattttaggttaatgaaatacccattttccttttattcatggtgctttgcttacccacattattttttggtgtattttttagtggttattttagaagttgaagtggctgaaattttgtctattgtcttagaattgattgccagaaattgcaagatgtaatatatcaaagtcagggatgaggagcaggaggactattcaagataaacttctgtaacctatgcatattttatgggggcagtattattacaaatggatctgaaatgtcagttctagtatttagagagacttctctaataataccgggtgatattatctttgagtaaatttgaatataaattgaaacataaaaatgagtattgtgaactttctaggaaatattcattaaaaccattgaaataaaaataaattcaagaaagtaagaag

SEQ ID NO: 9396 - DNA, 2532 bp, Homo sapiens
  source 1..2532: mol_type = unassigned DNA
acagctctggtcctcacagccagtgcaccggaggggcgcgctcccgagctggcgcagtttcccagcgcggtgcccgcccctcatcctcctccagtctccctcccctcgccgactgccgccccaggctccgccatggggaatgtgccatccgcggtgaagcactgcctcagctaccagcagcttctccgggagcatctctggatcggggattcagtggcaggggcgctcgaccccgcgcagacttctcttctaacaaaccttcactgctttcagcccgatgtctctggcttctcagtctccttggcaggcacggtggcttgtatccactgggaaacatcccagttatctggactccctgagtttgttaaaatagtagaagttgggcctagggatggattgcagaatgaaaaggttatagttcctacagatataaaaattgaatttatcaatcgactttcccaaactggcttgtctgtaatagaagtgactagctttgtgtcttccagatgggtaccacagatggctgatcacactgaagtaatgaaaggcattcatcaatatccaggagttcgctatcctgtccttactcctaatcttcagggttttcaccatgctgttgctgctggagctactgagatatcagtttttggagctgcatctgaatcctttagcaagaagaatattaactgttccattgaagaaagtatgggaaaatttgaggaggttgttaagtctgcaagacacatgaatattccagcacgagggtatgtgtcttgtgctctgggctgtccatatgaaggaagtattacaccgcaaaaagtgacagaagtgtctaagagattgtacggcatgggttgttatgagatctctctaggagacacaattggagtgggaactccaggaagtatgaaaagaatgttggaaagtgtgatgaaagaaatcccaccaggtgctcttgctgttcactgtcatgacacatacggacaagccttagcaaatatccttacggcccttcagatgggaattaatgtggtggactccgcagtatccggattaggtggctgcccttatgcaaaaggtgcttctgggaatgtagccactgaggatttgatatatatgcttaatggcctggggctcaatacaggtgtgaatctatacaaagtgatggaagctggtgactttatttgcaaagctgtgaataaaaccacaaactctaaagtagcacaagcctccttcaatgcttgacttgaatggatttatgacgtaccgttgagaagatcaatttcagctacaatactcatctgaaaatcattaatgccaacttgctctgatatgtgaagtaatggacaagagtgggaaaaaagagatccttttcaaaaagattataactggatagattaagtcaacaaaatgcaatatcagtcatcaggtaaattgcaagctgaggataaataataaaacttgtcataattttgaacttggaaaaaagtttcttttgctctcatagaaataactttttaatttagtagatgggaaaattgacttcgtatttccccaagtatcaaatactgtgttaatacttaatcaagcaggcttaacactgtgtacatattgtcagtagtttatgagctcctgcatagtatgcagagtgtgtggcctcaatattatacattatgcctctggatctcaactactcatttgccaagtcagttatgttatggaccaaaagccaaatctccatctgaccctacataattttagcaatagaacttttatatttcaagtatggctaacatctgttaactatttcagtgactttatctggttccaagaggctgtggccaatggcaagatgccatatcctggaaacatattacgacctcccatgtttgttacatgcatccagtttaccacactttacctgtcatcagttatagtaaaaaccagcatggtgttactcaactattgagaaattgtaagctatttttttttgtcctgatgtctaaattgcagtgataagaataggttgatacatgtatcataatctacctttataattttcagatcactttcaaattgcccaaggaaatattgtgatcctaagaatattaagataattttaggttaatgaaatacccattttccttttattcatggtgctttgcttacccacattattttttggtgtattttttagtggttattttagaagttgaagtggctgaaattttgtctattgtcttagaattgattgccagaaattgcaagatgtaatatatcaaagtcagggatgaggagcaggaggactattcaagataaacttctgtaacctatgcatattttatgggggcagtattattacaaatggatctgaaatgtcagttctagtatttagagagacttctctaataataccgggtgatattatctttgagtaaatttgaatataaattgaaacataaaaatgagtattgtgaactttctaggaaatattcattaaaaccattgaaataaaaataaattcaagaaagt

SEQ ID NO: 9397 - DNA, 2445 bp, Homo sapiens
  source 1..2445: mol_type = unassigned DNA
ctccagtctccctcccctcgccgactgccgccccaggctccgccatggggaatgtgccatccgcggtgaagcactgcctcagctaccagcagcttctccgggagcatctctggatcggggattcagtggcaggggcgctcgaccccgcgcaggagcttcagtctgtgatgctgatgctgcaccatggacctctcaggaagccctgatccccatcatatttgagggcacctctccctcttttactaaaggaaacatcccagttatctggactccctgagtttgttaaaatagtagaagttgggcctagggatggattgcagaatgaaaaggttatagttcctacagatataaaaattgaatttatcaatcgactttcccaaactggcttgtctgtaatagaagtgactagctttgtgtcttccagatgggtaccacagatggctgatcacactgaagtaatgaaaggcattcatcaatatccaggagttcgctatcctgtccttactcctaatcttcagggttttcaccatgctgttgctgctggagctactgagatatcagtttttggagctgcatctgaatcctttagcaagaagaatattaactgttccattgaagaaagtatgggaaaatttgaggaggttgttaagtctgcaagacacatgaatattccagcacgagggtatgtgtcttgtgctctgggctgtccatatgaaggaagtattacaccgcaaaaagtgacagaagtgtctaagagattgtacggcatgggttgttatgagatctctctaggagacacaattggagtgggaactccaggaagtatgaaaagaatgttggaaagtgtgatgaaagaaatcccaccaggtgctcttgctgttcactgtcatgacacatacggacaagccttagcaaatatccttacggcccttcagatgggaattaatgtggtggactccgcagtatccggattaggtggctgcccttatgcaaaaggtgcttctgggaatgtagccactgaggatttgatatatatgcttaatggcctggggctcaatacaggtgtgaatctatacaaagtgatggaagctggtgactttatttgcaaagctgtgaataaaaccacaaactctaaagtagcacaagcctccttcaatgcttgacttgaatggatttatgacgtaccgttgagaagatcaatttcagctacaatactcatctgaaaatcattaatgccaacttgctctgatatgtgaagtaatggacaagagtgggaaaaaagagatccttttcaaaaagattataactggatagattaagtcaacaaaatgcaatatcagtcatcaggtaaattgcaagctgaggataaataataaaacttgtcataattttgaacttggaaaaaagtttcttttgctctcatagaaataactttttaatttagtagatgggaaaattgacttcgtatttccccaagtatcaaatactgtgttaatacttaatcaagcaggcttaacactgtgtacatattgtcagtagtttatgagctcctgcatagtatgcagagtgtgtggcctcaatattatacattatgcctctggatctcaactactcatttgccaagtcagttatgttatggaccaaaagccaaatctccatctgaccctacataattttagcaatagaacttttatatttcaagtatggctaacatctgttaactatttcagtgactttatctggttccaagaggctgtggccaatggcaagatgccatatcctggaaacatattacgacctcccatgtttgttacatgcatccagtttaccacactttacctgtcatcagttatagtaaaaaccagcatggtgttactcaactattgagaaattgtaagctatttttttttgtcctgatgtctaaattgcagtgataagaataggttgatacatgtatcataatctacctttataattttcagatcactttcaaattgcccaaggaaatattgtgatcctaagaatattaagataattttaggttaatgaaatacccattttccttttattcatggtgctttgcttacccacattattttttggtgtattttttagtggttattttagaagttgaagtggctgaaattttgtctattgtcttagaattgattgccagaaattgcaagatgtaatatatcaaagtcagggatgaggagcaggaggactattcaagataaacttctgtaacctatgcatattttatgggggcagtattattacaaatggatctgaaatgtcagttctagtatttagagagacttctctaataataccgggtgatattatctttgagtaaatttgaatataaattgaaacataaaaatgagtattgtgaactttctaggaaatattcattaaaaccattgaaataaaaataaattcaag

SEQ ID NO: 9398 - DNA, 1171 bp, Homo sapiens
  source 1..1171: mol_type = unassigned DNA; mol_type = unassigned DNA
agtgcaccggaggggcgcgctcccgagctggcgcagtttcccagcgcggtgcccgcccctcatcctcctccagtctccctcccctcgccgactgccgccccaggctccgccatggggaatgtgccatccgcggtgaagcactgcctcagctaccagcagcttctccgggagcatctctggatcggggattcagtggcaggggcgctcgaccccgcgcaggaaacatcccagttatctggactccctgagtttgttaaaatagtagaagttgggcctagggatggattgcagaatgaaaaggttatagttcctacagatataaaaattgaatttatcaatcgactttcccaaactggcttgtctgtaatagaagtgactagctttgtgtcttccagatgggtaccacaggtgtctaagagattgtacggcatgggttgttatgagatctctctaggagacacaattggagtgggaactccaggaagtatgaaaagaatgttggaaagtgtgatgaaagaaatcccaccaggtgctcttgctgttcactgtcatgacacatacggacaagccttagcaaatatccttacggcccttcagatgggaattaatgtggtggactccgcagtatccggattaggtggctgcccttatgcaaaaggtgcttctgggaatgtagccactgaggatttgatatatatgcttaatggcctggggctcaatacaggtgtgaatctatacaaagtgatggaagctggtgactttatttgcaaagctgtgaataaaaccacaaactctaaagtagcacaagcctccttcaatgcttgacttgaatggatttatgacgtaccgttgagaagatcaatttcagctacaatactcatctgaaaatcattaatgccaacttgctctgatatgtgaagtaatggacaagagtgggaaaaaagagatccttttcaaaaagattataactggatagattaagtcaacaaaatgcaatatcagtcatcaggtaaattgcaagctgaggataaataataaaacttgtcataattttgaacttggaaaaaagtttcttttgctctcatagaaataactttttaatttagtagatgggaaaattgacttcgtatttccccaagtatcaaatactgtgttaatacttaatcaagca

SEQ ID NO: 9399 - DNA, 884 bp, Homo sapiens
  source 1..884: mol_type = unassigned DNA
atcctcctccagtctccctcccctcgccgactgccgccccaggctccgccatggggaatgtgccatccgcggtgaagcactgcctcagctaccagcagcttctccgggagcatctctggatcggggattcagtggcaggggcgctcgaccccgcgcaggaaacatcccagttatctggactccctgagtttgttaaaatagtagaagttgggcctagggatggattgcagaatgaaaaggttatagttcctacagatataaaaattgaatttatcaatcgactttcccaaactggcttgtctgtaatagaagtgactagctttgtgtcttccagatgggtaccacagatgggaattaatgtggtggactccgcagtatccggattaggtggctgcccttatgcaaaaggtgcttctgggaatgtagccactgaggatttgatatatatgcttaatggcctggggctcaatacaggtgtgaatctatacaaagtgatggaagctggtgactttatttgcaaagctgtgaataaaaccacaaactctaaagtagcacaagcctccttcaatgcttgacttgaatggatttatgacgtaccgttgagaagatcaatttcagctacaatactcatctgaaaatcattaatgccaacttgctctgatatgtgaagtaatggacaagagtgggaaaaaagagatccttttcaaaaagattataactggatagattaagtcaacaaaatgcaatatcagtcatcaggtaaattgcaagctgaggataaataataaaacttgtcataattttgaacttggaaaaaagtttcttttgctctcatagaaataactttttaatttagtagatgggaaaattgacttcgtatttcc

SEQ ID NO: 9400 - DNA, 1314 bp, Homo sapiens
  source 1..1314: mol_type = unassigned DNA
tggtcctcacagccagtgcaccggaggggcgcgctcccgagctggcgcagtttcccagcgcggtgcccgcccctcatcctcctccagtctccctcccctcgccgactgccgccccaggctccgccatggggaatgtgccatccgcggtgaagcactgcctcagctaccagcagcttctccgggagcatctctggatcggggattcagtggcaggggcgctcgaccccgcgcaggaaacatcccagttatctggactccctgagtttgttaaaatagtagaagttgggcctagggatggattgcagaatgaaaaggttatagttcctacagatataaaaattgaatttatcaatcgactttcccaaactggcttgtctgtaatagaagtgactagctttgtgtcttccagatgggtaccacaggttgctgctggagctactgagatatcagtttttggagctgcatctgaatcctttagcaagaagaatattaactgttccattgaagaaagtatgggaaaatttgaggaggttgttaagtctgcaagacacatgaatattccagcacgagggtatgtgtcttgtgctctgggctgtccatatgaaggaagtattacaccgcaaaaagtgacagaagtgtctaagagattgtacggcatgggttgttatgagatctctctaggagacacaattggagtgggaactccaggaagtatgaaaagaatgttggaaagtgtgatgaaagaaatcccaccaggtgctcttgctgttcactgtcatgacacatacggacaagccttagcaaatatccttacggcccttcagatgggaattaatgtggtggactccgcagtatccggattaggtggctgcccttatgcaaaaggtgcttctgggaatgtagccactgaggatttgatatatatgcttaatggcctggggctcaatacaggtgtgaatctatacaaagtgatggaagctggtgactttatttgcaaagctgtgaataaaaccacaaactctaaagtagcacaagcctccttcaatgcttgacttgaatggatttatgacgtaccgttgagaagatcaatttcagctacaatactcatctgaaaatcattaatgccaacttgctctgatatgtgaagtaatggacaagagtgggaaaaaagagatccttttcaaaaagattataactggatagattaagtcaacaaaatgcaatatcagtcatcaggtaaattgcaagctgaggataaataataaaacttgtcataattttgaacttggaaaaaagtttcttttgctctcatag

SEQ ID NO: 9401 - DNA, 512 bp, Homo sapiens
  source 1..512: mol_type = unassigned DNA
aaagaaataagcaccctggggaccattctagaggccactggatgggaattaatgtggtggactccgcagtatccggattaggtggctgcccttatgcaaaaggtgcttctgggaatgtagccactgaggatttgatatatatgcttaatggcctggggctcaatacaggtgtgaatctatacaaagtgatggaagctggtgactttatttgcaaagctgtgaataaaaccacaaactctaaagtagcacaagcctccttcaatgcttgacttgaatggatttatgacgtaccgttgagaagatcaatttcagctacaatactcatctgaaaatcattaatgccaacttgctctgatatgtgaagtaatggacaagagtgggaaaaaagagatccttttcaaaaagattataactggatagattaagtcaacaaaatgcaatatcagtcatcaggtaaattgcaagctgaggataaataataaaacttgtcataattttgaacttggaaaaaa

SEQ ID NO: 9402 - DNA, 2437 bp, Homo sapiens
  source 1..2437: mol_type = unassigned DNA
gccgccccaggctccgccatggggaatgtgccatccgcggtgaagcactgcctcagctaccagcagcttctccgggagcatctctggatcggggattcagtggcaggggcgctcgaccccgcgcaggaaacatcccagttatctggactccctgagtttgttaaaatagtagaagttgggcctagggatggattgcagaatgaaaaggttatagttcctacagatataaaaattgaatttatcaatcgactttcccaaactggcttgtctgtaatagaagtgactagctttgtgtcttccagatgggtaccacaggttgctgctggagctactgagatatcagtttttggagctgcatctgaatcctttagcaagaagaatattaactgttccattgaagaaagtatgggaaaatttgaggaggttgttaagtctgcaagacacatgaatattccagcacgagggtacttatgaaatcccacaaattctgttttgttaatgtttattgttaaagcttactcaaaaattatctagagattcttatatcatttataaaaatatacatagaatatcatatttctattttgtttaatcagggtaatcactatatagttacatctcattaacatcactgctgattattagtgagtatctagcttgtggaatgtgtcatgcagttgaaatcagaggaactagcatgcaaatctggcattattaactattttattaacactctagcacccaaatgcagccctcttatctcagcctacatgtgctgataagttggtataaactcacaacagcttttggaaaagaatcacctaatgtggttttcaaattttttttaaaacatgactttttcttcaaagagtattttatgtagaacttcaatagaatacagcagatataaaattgagctgctctgggaaatcattttatccattctttctccccctcaatggctgacttttctacttcctctgggtgatcccaaatcacctccatagtatcttgcagaacactgtttaaaaatacttgataaattgcttatagaagataaatataaactttcagttctctactattttctattatatgtgatttctataaatttaggagtatcagagatatcaatccctttctcctcgccttgcctttttcttgtggaaacttatcagctgttcattctaagagatgttgattacaggacatggaaaataaaaactgacccaagatccacaaacctaattttctctctcaggagtttagaaatggtataccaaacatggttacttgtattgaaagattatgtgattttgtcactgagttcactattttggggttcctaggatggagccacatgcaaaccagtgacaggacagagtagtagaaagcagaaatggaaaaaggaggctcctagcggtgatgagaggtatgggggagggaggagagggaaaaatctgccttggtgcttgtctgcttccaggaccaatagttgcctcaagtattataaccaggcctatgggttgtgaaacctataatgcatttttgtgtgtgtttgtttcttaaggaagaatttgtttctaagacattagctactttttctattaattttataaatatggagatatgatgaacacacatcgtaacaagttaaagtgcatagcgattggtaatagaaggttgaaagctggggatggatttgggtgcaggctgtacttcccttagttgaggtgagcaaagttcatggtagcgggaaagattcaacagttaatgagaaagataagtgagtcaattgtgactgaaaatattagtgaaatgattggaatttcaatcaaggtgttttgggggaacaattagagttagactatacctagtaaaatattttgttagtttgttttctatttatatttttcctgtcctccatagtaagtctacatgagtttctaaaatttgaaattacttttgtaattaagatagatgcatatcatgtaaggactatatgagaaaaatttaaaatccaaggcaatgtacttccaaagacataaaataaaggatatttatttttcaggcaaaagttacaaaaccacaatcaaaaaggagagatatactattggtttctcaattcgaatataaataagttgtctcaattttctttaaaataaagagaaagatgaagaccctattctacttcaatatgtgtttaaagtgtggagtataagctttaaagtaattctcattggaaagttaaaaagtatgtgactataagaagtaaattgcttatgtagcttgctcttcaaataggaagggtttttttagtgttgaaagatggatgcaaatataagttgtaggaagtaaccttttattatcttagctttctgttgtaaaatggaatagttaatgtaactgggctaataaaaatcttaaaccctcttaa

SEQ ID NO: 9403 - DNA, 569 bp, Homo sapiens
  source 1..569: mol_type = unassigned DNA
agtgcaccggaggggcgcgctcccgagctggcgcagtttcccagcgcggtgcccgcccctcatcctcctccagtctccctcccctcgccgactgccgccccaggctccgccatggggaatgtgccatccgcggtgaagcactgcctcagctaccagcagcttctccgggagcatctctggatcggggattcagtggcaggggcgctcgaccccgcgcaggagaaggagtagaaacattgaaggatgtaatgatcccctcagggttaagcagcttctctgttgcaatgtctaagctatggtctccggtttaggattcagtgttcgggctcttttttccaccaatagaaacatcccagttatctggactccctgagtttgttaaaatagtagaagttgggcctagggatggattgcagaatgaaaaggttatagttcctacagatataaaaattgaatttatcaatcgactttcccaaactggcttgtctgtaatagaagtgactagctttgtgtcttccagatgggtaccacagatggctgatcacactgaagtaatgaaaggcattcat

SEQ ID NO: 9404 - DNA, 3395 bp, Homo sapiens
  source 1..3395: mol_type = unassigned DNA
ctttctttaatccagtagacaatgagaaacgctgatttgggtctatggcataataggaagtagtatgccacatactgcatgtgggagttctgcaggacagattgggaagtgcatgcgtgtaagactgggaagaccagttaggagaggctattgcactgttttaagtaagacataataaagccctgcaccaggcggagagcagaaggaacgcacagaagacgcaggagaggcacatttcagagagaatccagtatgcaatggatgtcgcacacaagagagagagacgcaggatccaaggattctgtagctacaatgttgtcaagactttttcgaatgcatggcctctttgtggcctcccatccctgggaagtcatagtggggacagtgacactgaccatctgcatgatgtccatgaacatgtttactggtaacaataagatctgtggttggaattatgaatgtccaaagtttgaagaggatgttttgagcagtgacattataattctgacaataacacgatgcatagccatcctgtatatttacttccagttccagaatttacgtcaacttggatcaaaatatattttgggtattgctggccttttcacaattttctcaagttttgtattcagtacagttgtcattcacttcttagacaaagaattgacaggcttgaatgaagctttgccctttttcctacttttgattgacctttccagagcaagcacattagcaaagtttgccctcagttccaactcacaggatgaagtaagggaaaatattgctcgtggaatggcaattttaggtcctacgtttaccctcgatgctcttgttgaatgtcttgtgattggagttggtaccatgtcaggggtacgtcagcttgaaattatgtgctgctttggctgcatgtcagttcttgccaactacttcgtgttcatgactttcttcccagcttgtgtgtccttggtattagagctttctcgggaaagccgcgagggtcgtccaatttggcagctcagccattttgcccgagttttagaagaagaagaaaataagccgaatcctgtaactcagagggtcaagatgattatgtctctaggcttggttcttgttcatgctcacagtcgctggatagctgatccttctcctcaaaacagtacagcagatacttctaaggtttcattaggactggatgaaaatgtgtccaagagaattgaaccaagtgtttccctctggcagttttatctctctaaaatgatcagcatggatattgaacaagttattaccctaagtttagctctccttctggctgtcaagtacatcttctttgaacaaacagagacagaatctacactctcattaaaaaaccctatcacatctcctgtagtgacacaaaagaaagtcccagacaattgttgtagacgtgaacctatgctggtcagaaataaccagaaatgtgattcagtagaggaagagacagggataaaccgagaaagaaaagttgaggttataaaacccttagtggctgaaacagataccccaaacagagctacatttgtggttggtaactcctccttactcgatacttcatcagtactggtgacacaggaacctgaaattgaacttcccagggaacctcggcctaatgaagaatgtctacagatacttgggaatgcagagaaaggtgcaaaattccttagtgatgctgagatcatccagttagtcaatgctaagcatatcccagcctacaagttggaaactctgatggaaactcatgagcgtggtgtatctattcgccgacagttactttccaagaagctttcagaaccttcttctctccagtacctaccttacagggattataattactccttggtgatgggagcttgttgtgagaatgttattggatatatgcccatccctgttggagtggcaggacccctttgcttagatgaaaaagaatttcaggttccaatggcaacaacagaaggttgtcttgtggccagcaccaatagaggctgcagagcaataggtcttggtggaggtgccagcagccgagtccttgcagatgggatgactcgtggcccagttgtgcgtcttccacgtgcttgtgactctgcagaagtgaaagcctggctcgaaacatctgaagggttcgcagtgataaaggaggcatttgacagcactagcagatttgcacgtctacagaaacttcatacaagtatagctggacgcaacctttatatccgtttccagtccaggtcaggggatgccatggggatgaacatgatttcaaagggtacagagaaagcactttcaaaacttcacgagtatttccctgaaatgcagattctagccgttagtggtaactattgtactgacaagaaacctgctgctataaattggatagagggaagaggaaaatctgttgtttgtgaagctgtcattccagccaaggttgtcagagaagtattaaagactaccacagaggctatgattgaggtcaacattaacaagaatttagtgggctctgccatggctgggagcataggaggctacaacgcccatgcagcaaacattgtcaccgccatctacattgcctgtggacaggatgcagcacagaatgttggtagttcaaactgtattactttaatggaagcaagtggtcccacaaatgaagatttatatatcagctgcaccatgccatctatagagataggaacggtgggtggtgggaccaacctactacctcagcaagcctgtttgcagatgctaggtgttcaaggagcatgcaaagataatcctggggaaaatgcccggcagcttgcccgaattgtgtgtgggaccgtaatggctggggaattgtcacttatggcagcattggcagcaggacatcttgtcaaaagtcacatgattcacaacaggtcgaagatcaatttacaagacctccaaggagcttgcaccaagaagacagcctgaatagcccgacagttctgaactggaacatgggcattgggttctaaaggactaacataaaatctgtgaattaaaaaagctcaatgcattgtcttgtggaggatgaatagatgtgatcactgagacagccacttggtttttggctctttcagagaggtctcaggttctttccatgcagactcctcagatctgaacacagtttagtgctttacatgctgtgctctttgaagagatttcaacaagaatattgtatgttaaagcatcagagatggtaatctacagctcacctctgaaggcaaatataagctgggaaaaaagttttgatgaaattcttgaagttcatggtgatcagtgcaattgaccttctccctcactcctgccagttgaaaatggatttttaaattatactgtagctgatg

SEQ ID NO: 9405 - DNA, 4585 bp, Homo sapiens
  source 1..4585: mol_type = unassigned DNA
ctcttattggtcgaaggctcgtccagctccgagcgtgcgtaaggtgagggctccttccgctccgcgactgcgttaactggagccaggctgagcgtcggcgccggggttcggtggcctctagtgagatctggaggatccaaggattctgtagctacaatgttgtcaagactttttcgaatgcatggcctctttgtggcctcccatccctgggaagtcatagtggggacagtgacactgaccatctgcatgatgtccatgaacatgtttactggtaacaataagatctgtggttggaattatgaatgtccaaagtttgaagaggatgttttgagcagtgacattataattctgacaataacacgatgcatagccatcctgtatatttacttccagttccagaatttacgtcaacttggatcaaaatatattttgggtattgctggccttttcacaattttctcaagttttgtattcagtacagttgtcattcacttcttagacaaagaattgacaggcttgaatgaagctttgccctttttcctacttttgattgacctttccagagcaagcacattagcaaagtttgccctcagttccaactcacaggatgaagtaagggaaaatattgctcgtggaatggcaattttaggtcctacgtttaccctcgatgctcttgttgaatgtcttgtgattggagttggtaccatgtcaggggtacgtcagcttgaaattatgtgctgctttggctgcatgtcagttcttgccaactacttcgtgttcatgactttcttcccagcttgtgtgtccttggtattagagctttctcgggaaagccgcgagggtcgtccaatttggcagctcagccattttgcccgagttttagaagaagaagaaaataagccgaatcctgtaactcagagggtcaagatgattatgtctctaggcttggttcttgttcatgctcacagtcgctggatagctgatccttctcctcaaaacagtacagcagatacttctaaggtttcattaggactggatgaaaatgtgtccaagagaattgaaccaagtgtttccctctggcagttttatctctctaaaatgatcagcatggatattgaacaagttattaccctaagtttagctctccttctggctgtcaagtacatcttctttgaacaaacagagacagaatctacactctcattaaaaaaccctatcacatctcctgtagtgacacaaaagaaagtcccagacaattgttgtagacgtgaacctatgctggtcagaaataaccagaaatgtgattcagtagaggaagagacagggataaaccgagaaagaaaagttgaggttataaaacccttagtggctgaaacagataccccaaacagagctacatttgtggttggtaactcctccttactcgatacttcatcagtactggtgacacaggaacctgaaattgaacttcccagggaacctcggcctaatgaagaatgtctacagatacttgggaatgcagagaaaggtgcaaaattccttagtgatgctgagatcatccagttagtcaatgctaagcatatcccagcctacaagttggaaactctgatggaaactcatgagcgtggtgtatctattcgccgacagttactttccaagaagctttcagaaccttcttctctccagtacctaccttacagggattataattactccttggtgatgggagcttgttgtgagaatgttattggatatatgcccatccctgttggagtggcaggacccctttgcttagatgaaaaagaatttcaggttccaatggcaacaacagaaggttgtcttgtggccagcaccaatagaggctgcagagcaataggtcttggtggaggtgccagcagccgagtccttgcagatgggatgactcgtggcccagttgtgcgtcttccacgtgcttgtgactctgcagaagtgaaagcctggctcgaaacatctgaagggttcgcagtgataaaggaggcatttgacagcactagcagatttgcacgtctacagaaacttcatacaagtatagctggacgcaacctttatatccgtttccagtccaggtcaggggatgccatggggatgaacatgatttcaaagggtacagagaaagcactttcaaaacttcacgagtatttccctgaaatgcagattctagccgttagtggtaactattgtactgacaagaaacctgctgctataaattggatagagggaagaggaaaatctgttgtttgtgaagctgtcattccagccaaggttgtcagagaagtattaaagactaccacagaggctatgattgaggtcaacattaacaagaatttagtgggctctgccatggctgggagcataggaggctacaacgcccatgcagcaaacattgtcaccgccatctacattgcctgtggacaggatgcagcacagaatgttggtagttcaaactgtattactttaatggaagcaagtggtcccacaaatgaagatttatatatcagctgcaccatgccatctatagagataggaacggtgggtggtgggaccaacctactacctcagcaagcctgtttgcagatgctaggtgttcaaggagcatgcaaagataatcctggggaaaatgcccggcagcttgcccgaattgtgtgtgggaccgtaatggctggggaattgtcacttatggcagcattggcagcaggacatcttgtcaaaagtcacatgattcacaacaggtcgaagatcaatttacaagacctccaaggagcttgcaccaagaagacagcctgaatagcccgacagttctgaactggaacatgggcattgggttctaaaggactaacataaaatctgtgaattaaaaaagctcaatgcattgtcttgtggaggatgaatagatgtgatcactgagacagccacttggtttttggctctttcagagaggtctcaggttctttccatgcagactcctcagatctgaacacagtttagtgctttacatgctgtgctctttgaagagatttcaacaagaatattgtatgttaaagcatcagagatggtaatctacagctcacctctgaaggcaaatataagctgggaaaaaagttttgatgaaattcttgaagttcatggtgatcagtgcaattgaccttctccctcactcctgccagttgaaaatggatttttaaattatactgtagctgatgaaactcctgattttgtagttaatttattaagtctgggatgtagaacttcaagaagtaagagctaagttctaagttcatgtttgtaaattaatacttcatttggtgctggtctattttgattttggggggtaatcagcattattcttcagaaggggacctgttttcttcaagggaagaaacactcttattcccaaactacagaataatgtgttaaacatgctaaatagttctatcaggaaaacaaatcactgtatttatctccgcaggctatttgttcagagaggccttttgtttaaatataaatgtttaaatataaatgtttgtctggattggctataacatgtctttcagcattaggcttttaagaaacacagggttttgtattctttactaaagatatcagagctcttaatgttgcttagatgagggtgactgtcaagtacaagcaagactgggaccttagaaatcattgtagaaacacagttttgaaagaaaaataccatgtctctaagccaactttaattgcttaaaagacatttttatttagttgaaaaatctagttttttttgtaaactgtatcaaatctgtatatgttgtaataaaacttatgctagtttattggaagtgttcaagaaataaaaatcaacttgtgtactgataaaatactctagcctgggccagagaagataatgttctttaatgttgtccaggaaaccctggcttgcttgccgagcctaatgaaagggaaagtcagctttcagagccagtgaaggagccacgtgaatggccctagaactgtgcctagttcctgtggccaggaggttggtgactgaaacattcacacagggctctttgatggacccacgaacgctcttagctttctcagggggtcagcagagttattgaatcttaattttttttaatgtacaagttttgtataaataataaagaactccttattttgtattacatctaatgcttcaagtgttgctcttggaaagctgatgatgtctcttgtagaagatggactctgaaaaacattccaggaaaccatggcagcatggagagcctcttagtgattgtgtctgcattgttattgtggaagatttaccttttctgttgtacgtaaagcttaaattgcttttgttgtgactttttagccagtgactttttctgagcttttcatggaagtggcagtgaaaaatatgttgagtgttcattttagtgactgtaattaatatcttgctggattaatgttttgtacaattactaaattgtatacattttgttatagaatacttttttctagtttcagtaaataatgaaaaggaagttaataccaataa

SEQ ID NO: 9406 - DNA, 3681 bp, Homo sapiens
  source 1..3681: mol_type = unassigned DNA
cgactgcgttaactggagccaggctgagcgtcggcgccggggttcggtggcctctagtgagatctggaggatccaaggattctgtagctacaatgttgtcaagactttttcgaatgcatggcctctttgtggcctcccatccctgggaagtcatagtggggacagtgacactgaccatctgcatgatgtccatgaacatgtttactggtaacaataagatctgtggttggaattatgaatgtccaaagtttgaagaggatgttttgagcagtgacattataattctgacaataacacgatgcatagccatcctgtatatttacttccagttccagaatttacgtcaacttggatcaaaatatattttgggtattgctggccttttcacaattttctcaagttttgtattcagtacagttgtcattcacttcttagacaaagaattgacaggcttgaatgaagctttgccctttttcctacttttgattgacctttccagagcaagcacattagcaaagtttgccctcagttccaactcacaggatgaagtaagggaaaatattgctcgtggaatggcaattttaggtcctacgtttaccctcgatgctcttgttgaatgtcttgtgattggagttggtaccatgtcaggggtacgtcagcttgaaattatgtgctgctttggctgcatgtcagttcttgccaactacttcgtgttcatgactttcttcccagcttgtgtgtccttggtattagagctttctcgggaaagccgcgagggtcgtccaatttggcagctcagccattttgcccgagttttagaagaagaagaaaataagccgaatcctgtaactcagagggtcaagatgattatgtctctaggcttggttcttgttcatgctcacagtcgctggatagctgatccttctcctcaaaacagtacagcagatacttctaaggtttcattaggactggatgaaaatgtgtccaagagaattgaaccaagtgtttccctctggcagttttatctctctaaaatgatcagcatggatattgaacaagttattaccctaagtttagctctccttctggctgtcaagtacatcttctttgaacaaacagagacagaatctacactctcattaaaaaaccctatcacatctcctgtagtgacacaaaagaaagtcccagacaattgttgtagacgtgaacctatgctggtcagaaataaccagaaatgtgattcagtagaggaagagacagggataaaccgagaaagaaaagttgaggttataaaacccttagtggctgaaacagataccccaaacagagctacatttgtggttggtaactcctccttactcgatacttcatcagtactggtgacacaggaacctgaaattgaacttcccagggaacctcggcctaatgaagaatgtctacagatacttgggaatgcagagaaaggtgcaaaattccttagtgatgctgagatcatccagttagtcaatgctaagcatatcccagcctacaagttggaaactctgatggaaactcatgagcgtggtgtatctattcgccgacagttactttccaagaagctttcagaaccttcttctctccagtacctaccttacagggattataattactccttgcttggtggaggtgccagcagccgagtccttgcagatgggatgactcgtggcccagttgtgcgtcttccacgtgcttgtgactctgcagaagtgaaagcctggctcgaaacatctgaagggttcgcagtgataaaggaggcatttgacagcactagcagatttgcacgtctacagaaacttcatacaagtatagctggacgcaacctttatatccgtttccagtccaggtcaggggatgccatggggatgaacatgatttcaaagggtacagagaaagcactttcaaaacttcacgagtatttccctgaaatgcagattctagccgttagtggtaactattgtactgacaagaaacctgctgctataaattggatagagggaagaggaaaatctgttgtttgtgaagctgtcattccagccaaggttgtcagagaagtattaaagactaccacagaggctatgattgaggtcaacattaacaagaatttagtgggctctgccatggctgggagcataggaggctacaacgcccatgcagcaaacattgtcaccgccatctacattgcctgtggacaggatgcagcacagaatgttggtagttcaaactgtattactttaatggaagcaagtggtcccacaaatgaagatttatatatcagctgcaccatgccatctatagagataggaacggtgggtggtgggaccaacctactacctcagcaagcctgtttgcagatgctaggtgttcaaggagcatgcaaagataatcctggggaaaatgcccggcagcttgcccgaattgtgtgtgggaccgtaatggctggggaattgtcacttatggcagcattggcagcaggacatcttgtcaaaagtcacatgattcacaacaggtcgaagatcaatttacaagacctccaaggagcttgcaccaagaagacagcctgaatagcccgacagttctgaactggaacatgggcattgggttctaaaggactaacataaaatctgtgaattaaaaaagctcaatgcattgtcttgtggaggatgaatagatgtgatcactgagacagccacttggtttttggctctttcagagaggtctcaggttctttccatgcagactcctcagatctgaacacagtttagtgctttacatgctgtgctctttgaagagatttcaacaagaatattgtatgttaaagcatcagagatggtaatctacagctcacctctgaaggcaaatataagctgggaaaaaagttttgatgaaattcttgaagttcatggtgatcagtgcaattgaccttctccctcactcctgccagttgaaaatggatttttaaattatactgtagctgatgaaactcctgattttgtagttaatttattaagtctgggatgtagaacttcaagaagtaagagctaagttctaagttcatgtttgtaaattaatacttcatttggtgctggtctattttgattttggggggtaatcagcattattcttcagaaggggacctgttttcttcaagggaagaaacactcttattcccaaactacagaataatgtgttaaacatgctaaatagttctatcaggaaaacaaatcactgtatttatctccgcaggctatttgttcagagaggccttttgtttaaatataaatgtttaaatataaatgtttgtctggattggctataacatgtctttcagcattaggcttttaagaaacacagggttttgtattctttactaaagatatcagagctcttaatgttgcttagatgagggtgactgtcaagtacaagcaagactgggaccttagaaatcattgtagaaacacagttttgaaagaaaaataccatgtctctaagccaactttaattgcttaaaagacatttttatttagttgaaaaatctagttttttttgtaaactgtatcaaatctgtatatgttgtaataaaacttatgctagtttattggaagtgttcaagaaataaaaatcaacttgtgtactgataaaata

SEQ ID NO: 9407 - DNA, 421 bp, Homo sapiens
  source 1..421: mol_type = unassigned DNA
ggagccaggctgagcgtcggcgccggggttcggtggcctctagtgagatctggaggatccaaggattctgtagctacaatgttgtcaagactttttcgaatgcatggcctctttgtggcctcccatccctgggaagtcatagtggggacagtgacactgaccatctgcatgatgtccatgaacatgtttactggtaacaataagatctgtggttggaattatgaatgtccaaagtttgaagaggatgttttgagcagtgacattataattctgacaataacacgatgcatagccatcctgtatatttacttccagttccagaatttacgtcaacttggatcaaaatatattttgggtaatagttttacatatttaacttctggtgtcatcagatttttgatttgctgtggaaataaacctg

SEQ ID NO: 9408 - DNA, 527 bp, Homo sapiens
  source 1..527: mol_type = unassigned DNA
agaacagttaatttctgcagtaggaggaggtcgatgtactccattcttaagtagtcgtttgaaatatttcaggatttgaggatattccttcttagacatggtcctgcagagtcgtaggaagcatttgtttctgggctatactaaatgtgcatgatttcggcgtcccacaaggatccaaggattctgtagctacaatgttgtcaagactttttcgaatgcatggcctctttgtggcctcccatccctgggaagtcatagtggggacagtgacactgaccatctgcatgatgtccatgaacatgtttactggtaacaataagatctgtggttggaattatgaatgtccaaagtttgaagaggatgttttgagcagtgacattataattctgacaataacacgatgcatagccatcctgtatatttacttccagttccagaatttacgtcaacttggatcaaaatatattttgggtattgctggccttttcacaattttctcaagttttgtattcagtacagttgtcatt

SEQ ID NO: 9409 - DNA, 268 bp, Homo sapiens
  source 1..268: mol_type = unassigned DNA
gagatcccgccactgcactccagcctgggcgacagagcgagactccgtctcaaaaaaaaaaaaaaaaaaaaattaatttttattgcagcattgcataaatactgtcaacttaatttgcaggagctatcctgtagcctgcttgtgacatttgcaactgctgatgaaggtggacgattgaattctatggcatgatccaaggattctgtagctacaatgttgtcaagactttttcgaatgcatggcctctttgtggcctcccatccctggg

SEQ ID NO: 9410 - DNA, 1107 bp, Homo sapiens
  source 1..1107: mol_type = unassigned DNA
aaggcttggcatcacctctaagttgctaattctatttccagtaagtggcaaggagcttaatgtactaatattttcatgttttgtccacctgcaggaagacaaatatatccttgtgatatatgcagcataaaaaataacgtagactttactagttgtatctttaatttttctctaaccaggggtacgtcagcttgaaattatgtgctgctttggctgcatgtcagttcttgccaactacttcgtgttcatgactttcttcccagcttgtgtgtccttggtattagagctttctcgggaaagccgcgagggtcgtccaatttggcagctcagccattttgcccgagttttagaagaagaagaaaataagccgaatcctgtaactcagagggtcaagatgattatgtctctaggcttggttcttgttcatgctcacagtcgctggatagctgatccttctcctcaaaacagtacagcagatacttctaaggtttcattaggactggatgaaaatgtgtccaagagaattgaaccaagtgtttccctctggcagttttatctctctaaaatgatcagcatggatattgaacaagttattaccctaagtttagctctccttctggctgtcaagtacatcttctttgaacaaacagagacagaatctacactctcattaaaaaaccctatcacatctcctgtagtgacacaaaagaaagtcccagacaattgttgtagacgtgaacctatgctggtcagaaataaccagaaatgtgattcagtagaggaagagacagggataaaccgagaaagaaaaggtaacttgttattctcttcgctttcaatccttcattgctttgtcaaaaagtagtctgttttcaaaattatgtgccgtgttgtgagatttcttttgatttcttgaacagttgaggttataaaacccttagtggctgaaacagataccccaaacagagctacatttgtggttggtaactcctccttactcgatacttcatcagtactggtgacacaggaacctgaaattgaacttcccagggaacctcggcctaatgaagaatgtctacagatacttgggaatgcagaggtgaggat

SEQ ID NO: 9411 - DNA, 501 bp, Homo sapiens
  source 1..501: mol_type = unassigned DNA
ttttttgcattaaatgaattattttgcagaggtatcttttaattaaaaactacagtgatttaatttaaaaattacattattttagcttagcattgtttgtattaaatggtttataacatgaaatacagtccttcaagtcttctgtttcatctctctctctgaccacaatttcattttttttctccatttctttagaaaggtgcaaaattccttagtgatgctgagatcatccagttagtcaatgctaagcatatcccagcctacaagttggaaactctgatggaaactcatgagcgtggtgtatctattcgccgacagttactttccaagaagctttcagaaccttcttctctccagtacctaccttacagggattataattactccttggtgatgggagcttgttgtgagaatgttattggatatatgcccatccctgttggagtggcaggacccctttgcttagatgaaaaagaatttcaggttccaatggcaacaaca

SEQ ID NO: 9412 - DNA, 450 bp, Homo sapiens
  source 1..450: mol_type = unassigned DNA
tggccagcaccaatagaggctgcagagcaataggtgtaagttggcatttatatatttgccagtttaaaaatacatcataagtaaggcaatgagaagagttttaaggacaattagtgataccttttgggtcaagcatgagcatttttgggtaacatgtgcttgcttctctaacatatactgtgtagcttggtggaggtgccagcagccgagtccttgcagatgggatgactcgtggcccagttgtgcgtcttccacgtgcttgtgactctgcagaagtgaaagcctggctcgaaacatctgaagggttcgcagtgataaaggaggcatttgacagcactagcagatttgcacgtctacagaaacttcatacaagtatagctggacgcaacctttatatccgtttccagtccaggtcaggggatgccatggggatgaacatgatttcaaagg

SEQ ID NO: 9413 - DNA, 637 bp, Homo sapiens
  source 1..637: mol_type = unassigned DNA
ttcacgagtatttccctgaaatgcagattctagccgttagtggtaactattgtactgacaagaaacctgctgctataaattggatagagggaagaggaaaatctgttgtttgtgaagctgtcattccagccaaggttgtcagagaagtattaaagactaccacagaggctatgattgaggtcaacattaacaagaatttagtgggctctgccatggctgggagcataggaggctacaacgcccatgcagcaaacattgtcaccgccatctacattgcctgtggacagatgctaggtgttcaaggagcatgcaaagataatcctggggaaaatgcccggcagcttgcccgaattgtgtgtgggaccgtaatggctggggaattgtcacttatggcagcattggcagcaggacatcttgtcaaaagtcacatgattcacaacaggtcgaagatcaatttacaagacctccaaggagcttgcaccaagaagacagcctgaatagcccgacagttctgaactggaacatgggcattgggttctaaaggactaacataaaatctgtgaattaaaaaagctcaatgcattgtcttgtggaggatgaatagatgtgatcactgagacagccacttggtttttgg

SEQ ID NO: 9414 - DNA, 487 bp, Homo sapiens
  source 1..487: mol_type = unassigned DNA
tatttccctgaaatgcagattctagccgttagtggtaactattgtactgacaagaaacctgctgctataaattggatagagggaagaggaaaatctgttgtttgtgaagctgtcattccagccaaggttgtcagagaaatgctaggtgttcaaggagcatgcaaagataatcctggggaaaatgcccggcagcttgcccgaattgtgtgtgggaccgtaatggctggggaattgtcacttatggcagcattggcagcaggacatcttgtcaaaagtcacatgattcacaacaggtcgaagatcaatttacaagacctccaaggagcttgcaccaagaagacagcctgaatagcccgacagttctgaactggaacatgggcattgggttctaaaggactaacataaaatctgtgaattaaaaaagctcaatgcattgtcttgtggaggatgaatagatgtgatcactgagacagccacttggtttttg

SEQ ID NO: 9415 - DNA, 603 bp, Homo sapiens
  source 1..603: mol_type = unassigned DNA
attgtactgacaagaaacctgctgctataaattggatagagggaagaggaaaatctgttgtttgtgaagctgtcattccagccaaggttgtcagagaagtattaaagactaccacagaggctatgattgaggtcaacattaacaagaatttagtgggctctgccatggctgggagcataggaggctacaacgcccatgcagcaaacattgtcaccgccatctacattgcctgtggacaggatgcagcacagaatgttggtagttcaaactgtattactttaatggaagcaagtggtcccacaaatgaagatttatatatcagctgcaccatgccatctatagagataggaacggtgggtggtgggaccaacctactacctcagcaagcctgtttgcaggtatgatgtatcaggcatagagtccacaagcctagttctgactctctgggtttctctttctatctgagactatgtatcactcacctctattttaattggtcttttccaaactcttttgtcatatcagcctaatccattgtgtccaaataagcatgtttaagcttatgcttagataagaaagtagatgaagagagcaaatgaatgt

SEQ ID NO: 9416 - DNA, 465 bp, Homo sapiens
  source 1..465: mol_type = unassigned DNA
agttgatttagtaagaaattggtcatgattttaagggtgaatcttgttgtgtctctccctggctacagatgctaggtgttcaaggagcatgcaaagataatcctggggaaaatgcccggcagcttgcccgaattgtgtgtgggaccgtaatggctggggaattgtcacttatggcagcattggcagcaggacatcttgtcaaaagtcacatgattcacaacaggtcgaagatcaatttacaagacctccaaggagcttgcaccaagaagacagcctgaatagcccgacagttctgaactggaacatgggcattgggttctaaaggactaacataaaatctgtgaattaaaaaagctcaatgcattgtcttgtggaggatgaatagatgtgatcactgagacagccacttggtttttggctctttcagagaggtctcaggttctttccatgcagactcctcagatc

SEQ ID NO: 9417 - DNA, 3506 bp, Homo sapiens
  source 1..3506: mol_type = unassigned DNA
gtcccgcctcccagcgactctcggcggtgccggagtcgggtgggttggcggctataaagctggtggcgaaggggaggcgccgcggactgtcctttcgtggctcactccctttcctctgctgccgctcggtcacgcttgtgcccgaaggaggaaacagtgacagacctggagactgcagttctctatccttcacacagctctttcaccatgcctggatcacttcctttgaatgcagaagcttgctggccaaaagatgtgggaattgttgcccttgagatctattttccttctcaatatgttgatcaagcagagttggaaaaatatgatggtgtagatgctggaaagtataccattggcttgggccaggccaagatgggcttctgcacagatagagaagatattaactctctttgcatgactgtggttcagaatcttatggagagaaataacctttcctatgattgcattgggcggctggaagttggaacagagacaatcatcgacaaatcaaagtctgtgaagactaatttgatgcagctgtttgaagagtctgggaatacagatatagaaggaatcgacacaactaatgcatgctatggaggcacagctgctgtcttcaatgctgttaactggattgagtccagctcttgggatggacggtatgccctggtagttgcaggagatattgctgtatatgccacaggaaatgctagacctacaggtggagttggagcagtagctctgctaattgggccaaatgctcctttaatttttgaacgagggcttcgtgggacacatatgcaacatgcctatgatttttacaagcctgatatgctatctgaatatcctatagtagatggaaaactctccatacagtgctacctcagtgcattagaccgctgctattctgtctactgcaaaaagatccatgcccagtggcagaaagagggaaatgataaagattttaccttgaatgattttggcttcatgatctttcactcaccatattgtaaactggttcagaaatctctagctcggatgttgctgaatgacttccttaatgaccagaatagagataaaaatagtatctatagtggcctggaagcctttggggatgttaaattagaagacacctactttgatagagatgtggagaaggcatttatgaaggctagctctgaactcttcagtcagaaaacaaaggcatctttacttgtatcaaatcaaaatggaaatatgtacacatcttcagtatatggttcccttgcatctgttctagcacagtactcacctcagcaattagcagggaagagaattggagtgttttcttatggttctggtttggctgccactctgtactctcttaaagtcacacaagatgctacaccggggtctgctcttgataaaataacagcaagtttatgtgatcttaaatcaaggcttgattcaagaactggtgtggcaccagatgtcttcgctgaaaacatgaagctcagagaggacacccatcatttggtcaactatattccccagggttcaatagattcactctttgaaggaacgtggtacttagttagggtggatgaaaagcacagaagaacttacgctcggcgtcccactccaaatgatgacactttggatgaaggagtaggacttgtgcattcaaacatagcaactgagcatattccaagccctgccaagaaagtaccaagactccctgccacagcagcagaacctgaagcagctgtcattagtaatggggaacattaagatactctgtgaggtgcaagacttcagggtggggtgggcatggggtgggggtatgggaacagttggaggaatgggatatctggggataattttaaaggattacatgttatgtaaatttttatgtgactgacatggagcctggatgactatcgtgtacttgggaaagtctctttgctctatttgctgacatgcttcctgttgtggtctggccaatgccaaatgtactcgaatgatgttaagggctctgtaaaacttcatacctctttggccatttgtatgcatgatgtttggtttttaaacatggtataatgaattgtgtacttctgtcagaagaaagcagaggtactaatctccaattaaaaaattttttaacatgtaagaattttgtactttgaacaacaagattacagaaagtacctgtggtttttggaaaacatttctagcttggggaatgtgacaacattccccagtgtggtaaaattggggtaaaatgtggtaaaatgtgatacgcacaaaccctttgaaaatagcaaaacaaacatgccctttttctaaaattgataaatcctaaagaggaagaaaagagctgggacaataaaacactggctctggaatctggaatgttaagtccaggccagcagtgacaaaagttattgtaatgacctctgaacagagaaacactgccattgaagaggcttctggtatagaaaacatggtacattcaggagctgtgaatatagctctaggtgtgctcctgaatcagttcatggtagattatgctgaacaacagtgagatgttattggaggtgtggatgagggagtttgttgttgcagtccttctttgcaccttattttaaagaataaatgaaacatttttctggttacttttttaaaaatttaaaatggaagggaagaataggggcagggcattattaggctatttctgatgcttcagtgttataaattcaacatagaggctgacaacctaaattcatggtgtaacacagctcttttccttttccttttttttttttttttggtatctgttcaatgaaaataaggtatgacccaagtttttacctagtctgactagaagtattccacttcaaggtctgaagtaggacttttaccttaaaaaacaacaacaaacaaaactatcacacaggatagataagaagattggttaaacagttttgtgtagatctttttggtgctgaactatgacatgagccttatagattgtaaaatagggatagttggaactaatgtacagaactaaattttttaaactttatttgctgttaaattctgtgaagtttcagttatctaaaataaatatacacaaatatgaaatataatgtttcagattgcaaggtaatatgtaatagtagtgtttgtaagatactcttgtctaatattaactagtagtattttgatttgtacagtcataatttgttaaaatgacttcatttaacattcactgatgtagattaataatgtaagttctgatttaaagaatggtggcaaaatggtgcatgtaatacttttgcaagtgttggggagatcggtatgttttgaaaagagtaatttaacttttgggtgccaggaaatgggttttctcaaagtccattgccggcaatgggcaggcctgcaaatactggcacagagcattaatcatacaccttattaacggtgaggtgaataactttgaaataaagttttagagaaatgtttca

SEQ ID NO: 9418 - DNA, 3466 bp, Homo sapiens
  source 1..3466: mol_type = unassigned DNA
attggctgtgggagccaccgtcccgcctcccagcgactctcggcggtgccggagtcgggtgggttggcggctataaagctggtggcgaaggggaggcgccgcggactgtcctttcgtggctcactccctttcctctgctgccgctcggtcacgcttgctctttcaccatgcctggatcacttcctttgaatgcagaagcttgctggccaaaagatgtgggaattgttgcccttgagatctattttccttctcaatatgttgatcaagcagagttggaaaaatatgatggtgtagatgctggaaagtataccattggcttgggccaggccaagatgggcttctgcacagatagagaagatattaactctctttgcatgactgtggttcagaatcttatggagagaaataacctttcctatgattgcattgggcggctggaagttggaacagagacaatcatcgacaaatcaaagtctgtgaagactaatttgatgcagctgtttgaagagtctgggaatacagatatagaaggaatcgacacaactaatgcatgctatggaggcacagctgctgtcttcaatgctgttaactggattgagtccagctcttgggatggacggtatgccctggtagttgcaggagatattgctgtatatgccacaggaaatgctagacctacaggtggagttggagcagtagctctgctaattgggccaaatgctcctttaatttttgaacgagggcttcgtgggacacatatgcaacatgcctatgatttttacaagcctgatatgctatctgaatatcctatagtagatggaaaactctccatacagtgctacctcagtgcattagaccgctgctattctgtctactgcaaaaagatccatgcccagtggcagaaagagggaaatgataaagattttaccttgaatgattttggcttcatgatctttcactcaccatattgtaaactggttcagaaatctctagctcggatgttgctgaatgacttccttaatgaccagaatagagataaaaatagtatctatagtggcctggaagcctttggggatgttaaattagaagacacctactttgatagagatgtggagaaggcatttatgaaggctagctctgaactcttcagtcagaaaacaaaggcatctttacttgtatcaaatcaaaatggaaatatgtacacatcttcagtatatggttcccttgcatctgttctagcacagtactcacctcagcaattagcagggaagagaattggagtgttttcttatggttctggtttggctgccactctgtactctcttaaagtcacacaagatgctacaccggggtctgctcttgataaaataacagcaagtttatgtgatcttaaatcaaggcttgattcaagaactggtgtggcaccagatgtcttcgctgaaaacatgaagctcagagaggacacccatcatttggtcaactatattccccagggttcaatagattcactctttgaaggaacgtggtacttagttagggtggatgaaaagcacagaagaacttacgctcggcgtcccactccaaatgatgacactttggatgaaggagtaggacttgtgcattcaaacatagcaactgagcatattccaagccctgccaagaaagtaccaagactccctgccacagcagcagaacctgaagcagctgtcattagtaatggggaacattaagatactctgtgaggtgcaagacttcagggtggggtgggcatggggtgggggtatgggaacagttggaggaatgggatatctggggataattttaaaggattacatgttatgtaaatttttatgtgactgacatggagcctggatgactatcgtgtacttgggaaagtctctttgctctatttgctgacatgcttcctgttgtggtctggccaatgccaaatgtactcgaatgatgttaagggctctgtaaaacttcatacctctttggccatttgtatgcatgatgtttggtttttaaacatggtataatgaattgtgtacttctgtcagaagaaagcagaggtactaatctccaattaaaaaattttttaacatgtaagaattttgtactttgaacaacaagattacagaaagtacctgtggtttttggaaaacatttctagcttggggaatgtgacaacattccccagtgtggtaaaattggggtaaaatgtggtaaaatgtgatacgcacaaaccctttgaaaatagcaaaacaaacatgccctttttctaaaattgataaatcctaaagaggaagaaaagagctgggacaataaaacactggctctggaatctggaatgttaagtccaggccagcagtgacaaaagttattgtaatgacctctgaacagagaaacactgccattgaagaggcttctggtatagaaaacatggtacattcaggagctgtgaatatagctctaggtgtgctcctgaatcagttcatggtagattatgctgaacaacagtgagatgttattggaggtgtggatgagggagtttgttgttgcagtccttctttgcaccttattttaaagaataaatgaaacatttttctggttacttttttaaaaatttaaaatggaagggaagaataggggcagggcattattaggctatttctgatgcttcagtgttataaattcaacatagaggctgacaacctaaattcatggtgtaacacagctcttttccttttccttttttttttttttttggtatctgttcaatgaaaataaggtatgacccaagtttttacctagtctgactagaagtattccacttcaaggtctgaagtaggacttttaccttaaaaaacaacaacaaacaaaactatcacacaggatagataagaagattggttaaacagttttgtgtagatctttttggtgctgaactatgacatgagccttatagattgtaaaatagggatagttggaactaatgtacagaactaaattttttaaactttatttgctgttaaattctgtgaagtttcagttatctaaaataaatatacacaaatatgaaatataatgtttcagattgcaaggtaatatgtaatagtagtgtttgtaagatactcttgtctaatattaactagtagtattttgatttgtacagtcataatttgttaaaatgacttcatttaacattcactgatgtagattaataatgtaagttctgatttaaagaatggtggcaaaatggtgcatgtaatacttttgcaagtgttggggagatcggtatgttttgaaaagagtaatttaacttttgggtgccaggaaatgggttttctcaaagtccattgccggcaatgggcaggcctgcaaatactggcacagagcattaatcatacaccttattaacggtgaggtgaataactttgaaataaagttttagagaaatgtttca

SEQ ID NO: 9419 - DNA, 591 bp, Homo sapiens
  source 1..591: mol_type = unassigned DNA
attagaagacacctactttgatagagatgtggagaaggcatttatgaaggctagctctgaactcttcagtcagaaaacaaaggcatctttacttgtatcaaatcaaaatggaaatatgtacacatcttcagtatatggttcccttgcatctgttctagcacagtactcacctcagcaattagcagggaagagaattggagtgttttcttatggttctggtttggctgccactctgtactctcttaaagtcacacaagatgctacaccgggtaagtgctgaatctttcaacaagaatgtattgagaactgagtccaggcacagtggctcacacccgtaatcccagcagtttgggaggccgaggcgggcagatcacctgaggtcaggagttcgagaccagtctggctaacatggctgaaaccccatctctactaaaaatacaaaaattagccaggtgaggtggtgcatgcctgtagtcctagctacttgggaggctgaagtaggagaatcacttgaatccaggagagggaggttgtggtgagccaagatcacaccactgtgctccagcctgggtgacagagcgagactctgtc

SEQ ID NO: 9420 - DNA, 555 bp, Homo sapiens
  source 1..555: mol_type = unassigned DNA
attgtaaactggttcagaaatctctagctcggatgttgctgaatgacttccttaatgaccagaatagagataaaaatagtatctatagtggcctggaagcctttggggatgttaaattagaagacacctactttgatagagatgtggagaaggcatttatgaaggctagctctgaactcttcagtcagaaaacaaaggcatctttacttgtatcaaatcaaaatggaaatatgtacacatcttcagtatatggttcccttgcatctgttctagcacagtaagtataaatttcacctactacttaactccccttatttgggagatgttagatttctaagaccaaatctagtgtcaagcatgttggtggtagatcacagaaaattttatcttgaggctctctaatctgctattgtccattgacttgaaagatgtatgggttgaggctacagttcttccagaagtatttgttaatttcatactggctttcctggcttctgttttcatggttttttaattcttgacctacagttgaaccataaatacctggttgatgaa

SEQ ID NO: 9421 - DNA, 950 bp, Homo sapiens
  source 1..950: mol_type = unassigned DNA
tcggcggtgccggagtcgggtgggttggcggctataaagctggtggcgaaggggaggcgccgcggactgtcctttcgtggctcactccctttcctctgctgccgctcggtcacgcttgctctttcaccatgcctggatcacttcctttgaatgcagaagcttgctggccaaaagatgtgggaattgttgcccttgagatctattttccttctcaatatgttgatcaagcagagttggaaaaatatgatggtgtagatgctggaaagtataccattggcttgggccaggccaagatgggcttctgcacagatagagaagatattaactctctttgcatgactgtggttcagaatcttatggagagaaataacctttcctatgattgcattgggcggctggaagttggaacagagacaatcatcgacaaatcaaagtctgtgaagactaatttgatgcagctgtttgaagagtctgggaatacagatatagaaggaatcgacacaactaatgcatgctatggaggcacagctgctgtcttcaatgctgttaactggattgagtccagctcttgggatggtatgttacatgcctattccccgccgtcccccaaaatttttttctaaggttcaatagacccagatgacactttaattaatgcaatacgcaaacttttgtaatttgtccttgtttggatatattaagaaagatattttacctgtctgtcattatccgaattgtgaattggttatcttatcttgtaggacaaatggtctattcaaaatttagtcagatggatgacagagccttggcagatgaattttaaaaaaaaattagagcattttctttctttatcaaagaagggaaaagcatattctggggaaaatataacagacttcagtttccatgtttggttatagtgttgaattccttcttgtgaaataacaaaaaat

SEQ ID NO: 9422 - DNA, 708 bp, Homo sapiens
  source 1..708: mol_type = unassigned DNA
ctcggcggtgccggagtcgggtgggttggcggctataaagctggtggcgaaggggaggcgccgcggactgtcctttcgtggctcactccctttcctctgctgccgctcggtcacgcttgtgcccgaaggaggaaacagtgacagacctggagactgcagttctctatccttcacacagctctttcaccatgcctggatcacttcctttgaatgcagaagcttgctggccaaaagatgtgggaattgttgcccttgagatctattttccttctcaatatgttgatcaagcagagttggaaaaatatgatggtgtagatgctggaaagtataccattggcttgggccaggccaagatgggcttctgcacagatagagaagatattaactctctttgcatgactgtggttcagaatcttatggagagaaataacctttcctatgattgcattgggcggctggaagttggaacagagacaatcatcgacaaatcaaagtctgtgaagactaatttgatgcagctgtttgaagagtctgggaatacagatatagaaggaatcgacacaactaatgcatgctatggaggcacagctgctgtcttcaatgctgttaactggattgagtccagctcttgggatggtatgttacatgcctattccccgccgtcccccaaaatttttttctaaggttcaatagacccagatgacactt

SEQ ID NO: 9423 - DNA, 500 bp, Homo sapiens
  source 1..500: mol_type = unassigned DNA
tttgcccgggaggatggggcaccgtgagcggggccgggcgggggttccctcgtgagggacctgaggccgaccgtagcggatctgagaagatccgagaacacaggcgagtcgcggaggggagaacgcgagagggcgttgaggtctaggtattctaacgacagaggagttggaggtgccagagaggcagctgtgaccgcctagagctctttcaccatgcctggatcacttcctttgaatgcagaagcttgctggccaaaagatgtgggaattgttgcccttgagatctattttccttctcaatatgttgatcaagcagagttggaaaaatatgatggtgtagatgctggaaagtataccattggcttgggccaggccaagatgggcttctgcacagatagagaagatattaactctctttgcatgactgtggttcagaatcttatggagagaaataacctttcctatgattgcattgggcggctggaagttggaacagagac

SEQ ID NO: 9424 - DNA, 1303 bp, Homo sapiens
  source 1..1303: mol_type = unassigned DNA
cgcgccgcggcccgcaggcacccggcacgcgccttccccgcaggcacccggcacgcgccttccccgccgccacgatgcccaagaggaaggtcagctccgccgaaggcgccgccaaggaagagcccaagaggagatcggcgcggttgtcagctaaacctcctgcaaaagtggaagcgaagccgaaaaaggcagcagcgaagattcttcaaacacctaaatgaaagtgataaattcaaaactgatccttttagttcctcattatatgatatgaagggattaactgtagcaggatagtcaacctgaccgtacggcatggtgctttttttcaggataaatcttcagacaaaaaagtgcaaacaaaagggaaaaggggagcaaagggaaaacaggccgaagtggctaaccaagaaactaaagaagacttacctgcggaaaacggggaaacgaagactgaggagagtccagcctctgatgaagcaggagagaaagaagccaagtctgattaataaccatataccatgtcttatcagtggtccctgtctcccttcttgtacaatccagaggaatatttttatcaactattttgtaaatgcaagttttttagtagctctagaaacatttttaagaaggagggaatcccacctcatcccattttttaagtgtaaatgcttttttttaagaggtgaaatcatttgctggttgtttattttttggtacaaccagaaaatagtgtgggatattgaattatgggaggctctgactgtctcgggtgtcagcttaacattccacagatggggggttagtttttatatcctataatacaaagcatattaaatggcaatatggagtcagtcctgcatttaatgtcttgaacattttaaattacttctattaccatgttgttttttagtagaattgtttcctaaagaaaaccactctttgatcatggctctctctgccagaattgtgtgcactctgtaacatctttgtggtagtcctgttttcctaataactttgttactgtgctgtgaaagattacagatttgaacatgtagtgtacgtgctgttgagttgtgaactggtgggccgtatgtaacagctgaccaacgtgaagatactggtacttgatagcctcttaaggaaaatttgcttccaaattttaagctggaaagtcactggaataactttaaaaaagaattacaatacatggctttttagaatttcgttacgtatgttaagatttgtgtacaaattgaaatgtctgtactgatcctcaaccaataaaatctcagttatgaaaata

SEQ ID NO: 9425 - DNA, 4299 bp, Homo sapiens
  source 1..4299: mol_type = unassigned DNA
aatccggttccatccggttctcccaccgcccccgctgtgggtctcagcagctcgggcggcgggaggagtggcagcggcaaggcagcccagtttcgcgaaggctgtcggcgcgccgcggcccgcaggcacccggcacgcgccttccccgcaggcacccggcacgcgccttccccgccgccacgatgcccaagaggaaggtcagctccgccgaaggcgccgccaaggaagagcccaagaggagatcggcgcggttgtcagctaaacctcctgcaaaagtggaagcgaagccgaaaaaggcagcagcgaaggtaagcctcgaaacgcgcattgggatgcagcggggccttaggctacactgcttcttaatgcggggcttccattttgattagctattggagctttatttatactttaataattacggtaaataatttttctagtggtcgaggcaaaaatgtaatggatatattcatcctggtttatagaactatatcacactaatgctgctgcagatgttaggagacttaggacgacaaaaaatattaaatattaagtctacaaaggaaatttattctttgcgttgcgtacattgtggctggtgcttggcttttaattcgtgcttgtacttccttttttgacaataaaagagtcaagatagcaccgaggccaggagaaagggaacgtgtaagtttttatatatacagtttccaagccaacttcgggaagccttaacctttttacggggtgggggtggggaggtaaaaagttgtgatctctgagaaaataaccgccactactctggaagtgttcatcagcagttatacaaaaccgtgattttggctgctccctaacaaattcgtgattgcatgattcgaattgcaggtctgtagaatgaagttggctttgggtgtacgtgtgtttgataacttgcagggtggaaaagcagaacatgtgtaaaacaagtataagctttgtgtttggatatagcattgaaacctgtaaagctctacatgttcttcgcggggtgattaatttttatccaaaacttaggtgagagtttgctatttgaagtctcaaaaaaaatttttgttaatgccttcacctctttcctaaaagtgtaggtagaagtttagcactgcagtcatcagaagaggcaagattaatttccttgacattgaggagttgttggataattactaaatttgtccttgttaaataaaggtataaaacaaagatgttttttcttttttaatttaaattttttacagagctgagtgtaaaaatgttaactatgttttctttaacagaaagttctgtttttgtgatccttttaaaaataaagcttcacggaaggtatgagaatagtatttttcaactttaaatttctcattaccagaagaccatgtggtaattctctgtatacagttagaacagcacggaaacttgaaggcctaaaaaattagctgaccttgttaaaaatgttggcgtgagcagtatattattacctatctttttttattgtgtgtgtgtgtgtgtgtgtgttttaaactaattggctgaaatatctgcctgtttccctctttacatttttcttgtttctttccttatttatctttgtccatcttgagatctactgtaaagtgaattttttaatgaaaacagttccaagttttactctcagtgggtttgggacatcagatgtaattgagaggccaacaggtaagtcttcatgtcagtgtttgttgaggaacgagcctatgaggtcagttttcccaaaaggaaaaagggcagaagggatttgttcatttttacatctcgtttctgtaatacacctttgacttcatggttgatcagactttgaagtctaaacagaacgtaagcacttggtgtatcgattatcatactacacagtagacatgttttcaaggcatatcttgtcactgtgtgtgcttctgacttgtatctttccctagaactaaatattttgaaggtccaaacattatactttgggaaacttgattgatttttttttaatctagcttttcagctgataatggttacacgtggtattatttcaagtccaagatattatgtattctattttaactgtttcccagttttgtattttttgtattggaatgattatgaaattaatgagaaatctttagaaacagactacaaaagagtagttcttaaatacagaagtgattgtgaaactttgtgatagcaatgtgtgtagtagcagttttgtctcaaatacatttatcatttgttactcaaaggatgttgaagtattaaaagtcattatgctgtctgtggaatcctactattagtacagaacaccctgcagtgatttttccgcccgtgttagcattgaagttgtgagctctacttgcttgtctttatggccctttaattcaagtaattggtcagtatccgtatgggtcttttataccacccgctgggggctaaactaatttagctgctgctgtatacttactaacaaggaataaatgttaagctttcttctcagtattgatggatggtatctaaaagtatttttatgtttctttaacatggcttaaattttgaacttaatgtatcaagttagtatggtcatattaatacctgtgcttttcagattcttcaaacacctaaatgaaagtgataaattcaaaactgatccttttagttcctcattatatgatatgaagggattaactgtagcaggatagtcaacctgaccgtacggcatggtgctttttttcaggtgattggtcttaatgtgagggttaaggtcttgtgaggacagtattgttgaagttcacaacaaatttggggatgggtgggaatacggtcgacgagactcctccggtattcaacttcatgacattgtcctgtcatgtggaactgtagggaatagtggatgatggcgacagtggtgaaatatagctcgggctttaggatttgtcatatgtctaatgaggcttgacatgcaagtactattaaaatctccttagcatacattgttttcctgattactgggggggaccttaagttgtctcatgtaataggtgtatcaactgatgtgtgatagacattaatatgacagctgttatggatacagtctatacaaaatgagatcctttcataagcttgaagattggggtttcacgctcatgtgtgagatgtccctctctcaaaccttactatgaagtcagcaccactgggcacattacttgtctgacatgaaggggaaaaagtaaaacaaaatgtaaataaggagtaaagcatgtacttaaaatatattcttattctatcataggataaatcttcagacaaaaaagtgcaaacaaaagggaaaaggggagcaaagggaaaacaggccgaagtggctaaccaagaaactaaagaagacttacctgcggaaaacggggaaacgaagactgaggagagtccagcctctgatgaagcaggagagaaagaagccaagtctgattaataaccatataccatgtcttatcagtggtccctgtctcccttcttgtacaatccagaggaatatttttatcaactattttgtaaatgcaagttttttagtagctctagaaacatttttaagaaggagggaatcccacctcatcccattttttaagtgtaaatgcttttttttaagaggtgaaatcatttgctggttgtttattttttggtacaaccagaaaatagtgtgggatattgaattatgggaggctctgactgtctcgggtgtcagcttaacattccacagatggggggttagtttttatatcctataatacaaagcatattaaatggcaatatggagtcagtcctgcatttaatgtcttgaacattttaaattacttctattaccatgttgttttttagtagaattgtttcctaaagaaaaccactctttgatcatggctctctctgccagaattgtgtgcactctgtaacatctttgtggtagtcctgttttcctaataactttgttactgtgctgtgaaagattacagatttgaacatgtagtgtacgtgctgttgagttgtgaactggtgggccgtatgtaacagctgaccaacgtgaagatactggtacttgatagcctcttaaggaaaatttgcttccaaattttaagctggaaagtcactggaataactttaaaaaagaattacaatacatggctttttagaatttcgttacgtatgttaagatttgtgtacaaattgaaatgtctgtactgatcctcaaccaataaaatctcagttatgaaaata

SEQ ID NO: 9426 - DNA, 1552 bp, Homo sapiens
  source 1..1552: mol_type = unassigned DNA
cccgcggccggggacgcggggggaggaggaggcgggctcccaatccggttccatccggttctcccaccgcccccgctgtgggtctcagcagctcgggcggcgggaggagtggcagcggcaaggcagcccagtttcgcgaaggctgtcggcgcgccgcggcccgcaggcacccggcacgcgccttccccgcaggcacccggcacgcgccttccccgccgccacgatgcccaagaggaaggtcagctccgccgaaggcgccgccaaggaagagcccaagaggagatcggcgcggttgtcagctaaacctcctgcaaaagtggaagcgaagccgaaaaaggcagcagcgaaggtagaagtttagcactgcagtcatcagaagaggcaagattaatttccttgacattgaggagttgttggataattactaaatttgtccttgttaaataaagattcttcaaacacctaaatgaaagtgataaattcaaaactgatccttttagttcctcattatatgatatgaagggattaactgtagcaggatagtcaacctgaccgtacggcatggtgctttttttcaggataaatcttcagacaaaaaagtgcaaacaaaagggaaaaggggagcaaagggaaaacaggccgaagtggctaaccaagaaactaaagaagacttacctgcggaaaacggggaaacgaagactgaggagagtccagcctctgatgaagcaggagagaaagaagccaagtctgattaataaccatataccatgtcttatcagtggtccctgtctcccttcttgtacaatccagaggaatatttttatcaactattttgtaaatgcaagttttttagtagctctagaaacatttttaagaaggagggaatcccacctcatcccattttttaagtgtaaatgcttttttttaagaggtgaaatcatttgctggttgtttattttttggtacaaccagaaaatagtgtgggatattgaattatgggaggctctgactgtctcgggtgtcagcttaacattccacagatggggggttagtttttatatcctataatacaaagcatattaaatggcaatatggagtcagtcctgcatttaatgtcttgaacattttaaattacttctattaccatgttgttttttagtagaattgtttcctaaagaaaaccactctttgatcatggctctctctgccagaattgtgtgcactctgtaacatctttgtggtagtcctgttttcctaataactttgttactgtgctgtgaaagattacagatttgaacatgtagtgtacgtgctgttgagttgtgaactggtgggccgtatgtaacagctgaccaacgtgaagatactggtacttgatagcctcttaaggaaaatttgcttccaaattttaagctggaaagtcactggaataactttaaaaaagaattacaatacatggctttttagaatttcgttacgtatgttaagatttgtgtacaaattgaaatgtctgtactgatcctcaaccaataaaatctcagttatgaaaata

SEQ ID NO: 9427 - DNA, 1383 bp, Homo sapiens
  source 1..1383: mol_type = unassigned DNA
gctgagtcccgtagccaatgggcgggggtggggggcggcccggccggcggggagggggagcccgcggccggggacgcggggggaggaggaggcgggctcccaatccggttccatccggttctcccaccgcccccgctgtgggtctcagcagctcgggcggcgggaggagtggcagcggcaaggcagcccagtttcgcgaaggctgtcggcgcgccgcggcccgcaggcacccggcacgcgccttccccgcaggcacccggcacgcgccttccccgccgccacgatgcccaagaggaaggtcagctccgccgaaggcgccgccaaggaagagcccaagaggagatcggcgcggttgtcagctaaacctcctgcaaaagtggaagcgaagccgaaaaaggcagcagcgaaggataaatcttcagacaaaaaagtgcaaacaaaagggaaaaggggagcaaagggaaaacaggccgaagtggctaaccaagaaactaaagaagacttacctgcggaaaacggggaaacgaagactgaggagagtccagcctctgatgaagcaggagagaaagaagccaagtctgattaataaccatataccatgtcttatcagtggtccctgtctcccttcttgtacaatccagaggaatatttttatcaactattttgtaaatgcaagttttttagtagctctagaaacatttttaagaaggagggaatcccacctcatcccattttttaagtgtaaatgcttttttttaagaggtgaaatcatttgctggttgtttattttttggtacaaccagaaaatagtgtgggatattgaattatgggaggctctgactgtctcgggtgtcagcttaacattccacagatggggggttagtttttatatcctataatacaaagcatattaaatggcaatatggagtcagtcctgcatttaatgtcttgaacattttaaattacttctattaccatgttgttttttagtagaattgtttcctaaagaaaaccactctttgatcatggctctctctgccagaattgtgtgcactctgtaacatctttgtggtagtcctgttttcctaataactttgttactgtgctgtgaaagattacagatttgaacatgtagtgtacgtgctgttgagttgtgaactggtgggccgtatgtaacagctgaccaacgtgaagatactggtacttgatagcctcttaaggaaaatttgcttccaaattttaagctggaaagtcactggaataactttaaaaaagaattacaatacatggctttttagaatttcgttacgtatgttaagatttgtgtacaaattgaaatgtctgtactgatcctcaaccaataaaatctcagttatgaaaata

SEQ ID NO: 9428 - DNA, 2707 bp, Homo sapiens
  source 1..2707: mol_type = unassigned DNA
tgggaccccgcccccttcgcctgggtctggggccccgcgagacggcggaaaggggtcagctccgccgaaggcgccgccaaggaagagcccaagaggagatcggcgcggttgtcagctaaacctcctgcaaaagtggaagcgaagccgaaaaaggcagcagcgaagtgtaggtagaagtttagcactgcagtcatcagaagaggcaagattaatttccttgacattgaggagttgttggataattactaaatttgtccttgttaaataaagaaagttctgtttttgtgatccttttaaaaataaagcttcacggaaggtatgagaatagtatttttcaactttaaatttctcattaccagaagaccatgtggtaattctctgtatacagttagaacagcacggaaacttgaaggcctaaaaaattagctgaccttgttaaaaatgttggcgtgagcagtatattattacctatctttttttattgtgtgtgtgtgtgtgtgtgtgttttaaactaattggctgaaatatctgcctgtttccctctttacatttttcttgtttctttccttatttatctttgtccatcttgagatctactgtaaagtgaattttttaatgaaaacagttccaagttttactctcagtgggtttgggacatcagatgtaattgagaggccaacaggtaagtcttcatgtcagtgtttgttgaggaacgagcctatgaggtcagttttcccaaaaggaaaaagggcagaagggatttgttcatttttacatctcgtttctgtaatacacctttgacttcatggttgatcagactttgaagtctaaacagaacgtaagcacttggtgtatcgattatcatactacacagtagacatgttttcaaggcatatcttgtcactgtgtgtgcttctgacttgtatctttccctagaactaaatattttgaaggtccaaacattatactttgggaaacttgattgatttttttttaatctagcttttcagctgataatggttacacgtggtattatttcaagtccaagatattatgtattctattttaactgtttcccagttttgtattttttgtattggaatgattatgaaattaatgagaaatctttagaaacagactacaaaagagtagttcttaaatacagaagtgattgtgaaactttgtgatagcaatgtgtgtagtagcagttttgtctcaaatacatttatcatttgttactcaaaggatgttgaagtattaaaagtcattatgctgtctgtggaatcctactattagtacagaacaccctgcagtgatttttccgcccgtgttagcattgaagttgtgagctctacttgcttgtctttatggccctttaattcaagtaattggtcagtatccgtatgggtcttttataccacccgctgggggctaaactaatttagctgctgctgtatacttactaacaaggaataaatgttaagctttcttctcagtattgatggatggtatctaaaagtatttttatgtttctttaacatggcttaaattttgaacttaatgtatcaagttagtatggtcatattaatacctgtgcttttcagattcttcaaacacctaaatgaaagtgataaattcaaaactgatccttttagttcctcattatatgatatgaagggattaactgtagcaggatagtcaacctgaccgtacggcatggtgctttttttcaggataaatcttcagacaaaaaagtgcaaacaaaagggaaaaggggagcaaagggaaaacaggccgaagtggctaaccaagaaactaaagaagacttacctgcggaaaacggggaaacgaagactgaggagagtccagcctctgatgaagcaggagagaaagaagccaagtctgattaataaccatataccatgtcttatcagtggtccctgtctcccttcttgtacaatccagaggaatatttttatcaactattttgtaaatgcaagttttttagtagctctagaaacatttttaagaaggagggaatcccacctcatcccattttttaagtgtaaatgcttttttttaagaggtgaaatcatttgctggttgtttattttttggtacaaccagaaaatagtgtgggatattgaattatgggaggctctgactgtctcgggtgtcagcttaacattccacagatggggggttagtttttatatcctataatacaaagcatattaaatggcaatatggagtcagtcctgcatttaatgtcttgaacattttaaattacttctattaccatgttgttttttagtagaattgtttcctaaagaaaaccactctttgatcatggctctctctgccagaattgtgtgcactctgtaacatctttgtggtagtcctgttttcctaataactttgttactgtgctgtgaaagattacagatttgaacatgtagtgtacgtgctgttgagttgtgaactggtgggccgtatgtaacagctgaccaacgtgaagatactggtacttgatagcctcttaaggaaaatttgcttccaaattttaagctggaaagtcactggaataactttaaaaaagaattacaatacatggctttttagaatttcgttacgtatgttaagatttgtgtacaaattgaaatgtctgtactgatcctcaaccaataaaatctcagttatgaaaata

SEQ ID NO: 9429 - DNA, 1045 bp, Homo sapiens
  source 1..1045: mol_type = unassigned DNA
atccggttctcccaccgcccccgctgtgggtctcagcagctcgggcggcgggaggagtggcagcggcaaggcagcccagtttcgcgaaggctgtcggcgcgccgcggcccgcaggcacccggcacgcgccttccccgcaggcacccggcacgcgccttccccgccgccacgatgcccaagaggaaggtcagctccgccgaaggcgccgccaaggaagagcccaagaggagatcggcgcggttgtcagctaaacctcctgcaaaagtggaagcgaagccgaaaaaggcagcagcgaagtgtaggtagaagtttagcactgcagtcatcagaagaggcaagattaatttccttgacattgaggagttgttggataattactaaatttgtccttgttaaataaaggataaatcttcagacaaaaaagtgcaaacaaaagggaaaaggggagcaaagggaaaacaggccgaagtggctaaccaagaaactaaagaagacttacctgcggaaaacggggaaacgaagactgaggagagtccagcctctgatgaagcaggagagaaagaagccaagtctgattaataaccatataccatgtcttatcagtggtccctgtctcccttcttgtacaatccagaggaatatttttatcaactattttgtaaatgcaagttttttagtagctctagaaacatttttaagaaggagggaatcccacctcatcccattttttaagtgtaaatgcttttttttaagaggtgaaatcatttgctggttgtttattttttggtacaaccagaaaatagtgtgggatattgaattatgggaggctctgactgtctcgggtgtcagcttaacattccacagatggggggttagtttttatatcctataatacaaagcatattaaatggcaatatggagtcagtcctgcatttaatgtcttgaacattttaaattacttctattaccatgttgttttttagtagaattgtttcctaaagaaaaccactctttgatcatggctctctctgccagaattgtgtgc

SEQ ID NO: 9430 - DNA, 829 bp, Homo sapiens
  source 1..829: mol_type = unassigned DNA
gcagctcgggcggcgggaggagtggcagcggcaaggcagcccagtttcgcgaaggctgtcggcgcgccgcggcccgcaggcacccggcacgcgccttccccgcaggcacccggcacgcgccttccccgccgccacgatgcccaagaggaaggtcagctccgccgaaggcgccgccaaggaagagaaacctcctgcaaaagtggaagcgaagccgaaaaaggcagcagcgaaggataaatcttcagacaaaaaagtgcaaacaaaagggaaaaggggagcaaagggaaaacaggccgaagtggctaaccaagaaactaaagaagacttacctgcggaaaacggggaaacgaagactgaggagagtccagcctctgatgaagcaggagagaaagaagccaagtctgattaataaccatataccatgtcttatcagtggtccctgtctcccttcttgtacaatccagaggaatatttttatcaactattttgtaaatgcaagttttttagtagctctagaaacatttttaagaaggagggaatcccacctcatcccattttttaagtgtaaatgcttttttttaagaggtgaaatcatttgctggttgtttattttttggtacaaccagaaaatagtgtgggatattgaattatgggaggctctgactgtctcgggtgtcagcttaacattccacagatggggggttagtttttatatcctataatacaaagcatattaaatggcaatatggagtcagtcctgcatttaatgtcttgaacattttaaattacttctattaccatgttgttttttagtagaattgtttcctaa

SEQ ID NO: 9431 - DNA, 850 bp, Homo sapiens
  source 1..850: mol_type = unassigned DNA
cgggaggagtggcagcggcaaggcagcccagtttcgcgaaggctgtcggcgcgccgcggcccgcaggcacccggcacgcgccttccccgcaggcacccggcacgcgccttccccgccgccacgatgcccaagaggaaggtcagctccgccgaaggcgccgccaaggaagagcccaagaggagatcggcgcggttgtcagctaaacctcctgcaaaagtggaagcgaagccgaaaaaggcagcagcgaaggtagaagtttagcactgcagtcatcagaagaggcaagattaatttccttgacattgaggagttgttggataattactaaatttgtccttgttaaataaaggataaatcttcagacaaaaaagtgcaaacaaaagggaaaaggggagcaaagggaaaacaggccgaagtggctaaccaagaaactaaagaagacttacctgcggaaaacggggaaacgaagactgaggagagtccagcctctgatgaagcaggagagaaagaagccaagtctgattaataaccatataccatgtcttatcagtggtccctgtctcccttcttgtacaatccagaggaatatttttatcaactattttgtaaatgcaagttttttagtagctctagaaacatttttaagaaggagggaatcccacctcatcccattttttaagtgtaaatgcttttttttaagaggtgaaatcatttgctggttgtttattttttggtacaaccagaaaatagtgtgggatattgaattatgggaggctctgactgtctcgggtgtcagcttaacattccacagatggggggttagtttttatatcctataatacaaagcata

SEQ ID NO: 9432 - DNA, 1014 bp, Homo sapiens
  source 1..1014: mol_type = unassigned DNA; mol_type = unassigned DNA
ccgccggcgccccgccgggccccgcgaggcccaggccccgttgcacccacggtggcgacgggcccgggaggcgcttggagaccggcgggcgggcaggcgagcgctcggcggccgcgggggcgggcgttctggaacgtttggcggccgggggagctgagggggctattcgaacggggcggcgggaagccgtgacgtcacgcggccgggcattgttctcggggccgggcgggcccgcgagtcctgggactgcggcccgcctctattcgtgcgtctccgtctccgcaggtcagctccgccgaaggcgccgccaaggaagagcccaagaggagatcggcgcggttgtcagctaaacctcctgcaaaagtggaagcgaagccgaaaaaggcagcagcgaagattcttcaaacacctaaatgaaagtgataaattcaaaactgatccttttagttcctcattatatgatatgaagggattaactgtagcaggatagtcaacctgaccgtacggcatggtgctttttttcaggataaatcttcagacaaaaaagtgcaaacaaaagggaaaaggggagcaaagggaaaacaggccgaagtggctaaccaagaaactaaagaagacttacctgcggaaaacggggaaacgaagactgaggagagtccagcctctgatgaagcaggagagaaagaagccaagtctgattaataaccatataccatgtcttatcagtggtccctgtctcccttcttgtacaatccagaggaatatttttatcaactattttgtaaatgcaagttttttagtagctctagaaacatttttaagaaggagggaatcccacctcatcccattttttaagtgtaaatgcttttttttaagaggtgaaatcatttgctggttgtttattttttggtacaaccagaaaatagtgtgggatattgaattatgggaggctctgactgtctcgggtgtcagcttaacattccacagatggggggttagtttttatatcctata

SEQ ID NO: 9433 - DNA, 793 bp, Homo sapiens
  source 1..793: mol_type = unassigned DNA
cctgggactgcggcccgcctctattcgtgcgtctccgtctccgcaggtcagctccgccgaaggcgccgccaaggaagagcccaagaggagatcggcgcggttgtcagctaaacctcctgcaaaagtggaagcgaagccgaaaaaggcagcagcgaagtgtaggtagaagtttagcactgcagtcatcagaagaggcaagattaatttccttgacattgaggagttgttggataattactaaatttgtccttgttaaataaagaaagttctgtttttgtgatccttttaaaaataaagcttcacggaaggataaatcttcagacaaaaaagtgcaaacaaaagggaaaaggggagcaaagggaaaacaggccgaagtggctaaccaagaaactaaagaagacttacctgcggaaaacggggaaacgaagactgaggagagtccagcctctgatgaagcaggagagaaagaagccaagtctgattaataaccatataccatgtcttatcagtggtccctgtctcccttcttgtacaatccagaggaatatttttatcaactattttgtaaatgcaagttttttagtagctctagaaacatttttaagaaggagggaatcccacctcatcccattttttaagtgtaaatgcttttttttaagaggtgaaatcatttgctggttgtttattttttggtacaaccagaaaatagtgtgggatattgaattatgggaggctctgactgtctcgggtgtcagcttaacattccacagatggggggttagtttttatatcc

SEQ ID NO: 9434 - DNA, 709 bp, Homo sapiens
  source 1..709: mol_type = unassigned DNA
gcttcacgcaggcctgcgaagctggagcccctggatagcctttcttgccgacagaggcgggagaaatttgctacttcctgtataccttatccttctcccttcccagtctaagatacgaactataaatgttcgaacccaattcaccccggaggggaggggccagataccagtggcctgaaggcgcccaggtcagctccgccgaaggcgccgccaaggaagagcccaagaggagatcggcgcggttgtcagctaaacctcctgcaaaagtggaagcgaagccgaaaaaggcagcagcgaaggataaatcttcagacaaaaaagtgcaaacaaaagggaaaaggggagcaaagggaaaacaggccgaagtggctaaccaagaaactaaagaagacttacctgcggaaaacggggaaacgaagactgaggagagtccagcctctgatgaagcaggagagaaagaagccaagtctgattaataaccatataccatgtcttatcagtggtccctgtctcccttcttgtacaatccagaggaatatttttatcaactattttgtaaatgcaagttttttagtagctctagaaacatttttaagaaggagggaatcccacctcatcccattttttaagtgtaaatgcttttttttaagaggtgaaatcatttgctggttgtttattttttggtacaaccagaaaatagtgtgggata

SEQ ID NO: 9435 - DNA, 745 bp, Homo sapiens
  source 1..745: mol_type = unassigned DNA
gtgcgtctccgtctccgcaggtcagctccgccgaaggcgccgccaaggaagagcccaagaggagatcggcgcggttgtcagctaaacctcctgcaaaagtggaagcgaagccgaaaaaggcagcagcgaagtgtaggtagaagtttagcactgcagtcatcagaagaggcaagattaatttccttgacattgaggagttgttggataattactaaatttgtccttgttaaataaagattcttcaaacacctaaatgaaagtgataaattcaaaactgatccttttagttcctcattatatgatatgaagggattaactgtagcaggatagtcaacctgaccgtacggcatggtgctttttttcaggataaatcttcagacaaaaaagtgcaaacaaaagggaaaaggggagcaaagggaaaacaggccgaagtggctaaccaagaaactaaagaagacttacctgcggaaaacggggaaacgaagactgaggagagtccagcctctgatgaagcaggagagaaagaagccaagtctgattaataaccatataccatgtcttatcagtggtccctgtctcccttcttgtacaatccagaggaatatttttatcaactattttgtaaatgcaagttttttagtagctctagaaacatttttaagaaggagggaatcccacctcatcccattttttaagtgtaaatgcttttttttaagaggtgaaatcatttgctggttgtttattt

SEQ ID NO: 9436 - DNA, 405 bp, Homo sapiens
  source 1..405: mol_type = unassigned DNA
aaacctcctgcaaaagtggaagcgaagccgaaaaaggcagcagcgaagaaagttctgtttttgtgatccttttaaaaataaagcttcacggaaggataaatcttcagacaaaaaagtgcaaacaaaagggaaaaggggagcaaagggaaaacaggccgaagtggctaaccaagaaactaaagaagacttacctgcggaaaacggggaaacgaagactgaggagagtccagcctctgatgaagcaggagagaaagaagccaagtctgattaataaccatataccatgtcttatcagtggtccctgtctcccttcttgtacaatccagaggaatatttttatcaactattttgtaaatgcaagttttttagtagctctagaaacatttttaagaaggagggaatccc

SEQ ID NO: 9437 - DNA, 823 bp, Homo sapiens
  source 1..823: mol_type = unassigned DNA
agcagctcgggcggcgggaggagtggcagcggcaaggcagcccagtttcgcgaaggctgtcggcgcgccgcggcccgcaggcacccggcacgcgccttccccgcaggcacccggcacgcgccttccccgccgccacgatgcccaagaggaaggtcagctccgccgaaggcgccgccaaggaagagcccaagaggagatcggcgcggttgtcagctaaacctcctgcaaaagtggaagcgaagccgaaaaaggcagcagcgaagtgtaggtagaagtttagcactgcagtcatcagaagaggcaagattaatttccttgacattgaggagttgttggataattactaaatttgtccttgttaaataaagaaagttctgtttttgtgatccttttaaaaataaagcttcacggaagattcttcaaacacctaaatgaaagtgataaattcaaaactgatccttttagttcctcattatatgatatgaagggattaactgtagcaggatagtcaacctgaccgtacggcatggtgctttttttcaggataaatcttcagacaaaaaagtgcaaacaaaagggaaaaggggagcaaagggaaaacaggccgaagtggctaaccaagaaactaaagaagacttacctgcggaaaacggggaaacgaagactgaggagagtccagcctctgatgaagcaggagagaaagaagccaagtctgattaataaccatataccatgtcttatcagtggtccctgtctcccttcttgtacaatccagaggaatatttttatcaactattttgtaaatgcaagttttttagtagct

SEQ ID NO: 9438 - DNA, 508 bp, Homo sapiens
  source 1..508: mol_type = unassigned DNA
agcagctcgggcggcgggaggagtggcagcggcaaggcagcccagtttcgcgaaggctgtcggcgcgccgcggcccgcaggcacccggcacgcgccttccccgcaggcacccggcacgcgccttccccgccgccacgatgcccaagaggaaggtcagctccgccgaaggcgccgccaaggaagaggtgagtgcgggccttctgcggggggtggtgggtttcccgtgagccgctggcctgccttctcttctcgctgactctcctttttctttctccaagcccaagaggagatcggcgcggttgtcagctaaacctcctgcaaaagtggaagcgaagccgaaaaaggcagcagcgaaggataaatcttcagacaaaaaagtgcaaacaaaagggaaaaggggagcaaagggaaaacaggccgaagtggctaaccaagaaactaaagaagacttacctgcggaaaacggggaaacgaagactgaggagagtccagcctctgatgaagcagg

SEQ ID NO: 9439 - DNA, 527 bp, Homo sapiens
  source 1..527: mol_type = unassigned DNA; mol_type = unassigned DNA
cgctgtgggtctcagcagctcgggcggcgggaggagtggcagcggcaaggcagcccagtttcgcgaaggctgtcggcgcgccgcggcccgcaggcacccggcacgcgccttccccgcaggcacccggcacgcgccttccccgccgccacgatgcccaagaggaaggtcagctccgccgaaggcgccgccaaggaagagcccaagaggagatcggcgcggttgtcagctaaacctcctgcaaaagtggaagcgaagccgaaaaaggcagcagcgaagtgtaggtagaagtttagcactgcagtcatcagaagaggcaagattaatttccttgacattgaggagttgttggataattactaaatttgtccttgttaaataaagaaagttctgtttttgtgatccttttaaaaataaagcttcacggaaggtatgagaatagtatttttcaactttaaatttctcattaccagaagaccatgtggtaattctctgtatacagttagaacagcacggaaacttgaaggcct

SEQ ID NO: 9440 - DNA, 841 bp, Homo sapiens
  source 1..841: mol_type = unassigned DNA; mol_type = unassigned DNA
gcccagtttcgcgaaggctgtcggcgcgccgcggcccgcaggcacccggcacgcgccttccccgcaggcacccggcacgcgccttccccgccgccacgatgcccaagaggaaggtcagctccgccgaaggcgccgccaaggaagagcccaagaggagatcggcgcggttgtcagctaaacctcctgcaaaagtggaagcgaagccgaaaaaggcagcagcgaagagtcaagatagcaccgaggccaggagaaagggaacgtgtaagtttttatatatacagtttccaagccaacttcgggaagccttaacctttttacggggtgggggtggggaggtaaaaagttgtgatctctgagaaaataaccgccactactctggaagtgttcatcagcagttatacaaaaccgtgattttggctgctccctaacaaattcgtgattgcatgattcgaattgcaggtctgtagaatgaagttggctttgggtgtacgtgtgtttgataacttgcagggtggaaaagcagaacatgtgtaaaacaagtataagctttgtgtttggatatagcattgaaacctgtaaagctctacatgttcttcgcggggtgattaatttttatccaaaacttaggtgagagtttgctatttgaagtctcaaaaaaaatttttgttaatgccttcacctctttcctaaaagtgtaggtagaagtttagcactgcagtcatcagaagaggcaagattaatttccttgacattgaggagttgttggataattactaaatttgtccttgttaaataaaggtataaaacaaagatgttttttcttttttaatttaaatttttt

SEQ ID NO: 9441 - DNA, 615 bp, Homo sapiens
  source 1..615: mol_type = unassigned DNA; mol_type = unassigned DNA
gggactgcggcccgcctctattcgtgcgtctccgtctccgcaggtcagctccgccgaaggcgccgccaaggaagagcccaagaggagatcggcgcggttgtcagctaaacctcctgcaaaagtggaagcgaagccgaaaaaggcagcagcgaagagtcaagatagcaccgaggccaggagaaagggaacgtgtaagtttttatatatacagtttccaagccaacttcgggaagccttaacctttttacggggtgggggtggggaggtaaaaagttgtgatctctgagaaaataaccgccactactctggaagtgttcatcagcagttatacaaaaccgtgattttggctgctccctaacaaattcgtgattgcatgattcgaattgcaggtctgtagaatgaagttggctttgggtgtacgtgtgtttgataacttgcagggtggaaaagcagaacatgtgtaaaacaagtataagctttgtgtttggatatagcattgaaacctgtaaagctctacatgttcttcgcggggtgattaatttttatccaaaacttaggtgagagtttgctatttgaagtctcaaaaaaaatttttgttaatgccttcacctcttt

SEQ ID NO: 9442 - DNA, 701 bp, Homo sapiens
  source 1..701: mol_type = unassigned DNA; mol_type = unassigned DNA
aggcagcccagtttcgcgaaggctgtcggcgcgccgcggcccgcaggcacccggcacgcgccttccccgcaggcacccggcacgcgccttccccgccgccacgatgcccaagaggaaggtcagctccgccgaaggcgccgccaaggaagaggtgagtgcgggccttctgcggggggtggtgggtttcccgtgagccgctggcctgccttctcttctcgctgactctcctttttctttctccaagcccaagaggagatcggcgcggttgtcagctgtaagtaaagcgagccccgtaaccgttcgttttccgcgggtcgtcccgggtgaggacgctcagtgctgcttttgcctttcagaaacctcctgcaaaagtggaagcgaagccgaaaaaggcagcagcgaaggtaagcctcgaaacgcgcattgggatgcagcggggccttaggctacactgcttcttaatgcggggcttccattttgattagctattggagctttatttatactttaataattacggtaaataatttttctagtggtcgaggcaaaaatgtaatggatatattcatcctggtttatagaactatatcacactaatgctgctgcagatgttaggagacttaggacgacaaaaaatattaaatattaagtctacaaaggaaatttattctttgcgttgcgtacattgtggctggtgcttg

SEQ ID NO: 9443 - DNA, 583 bp, Homo sapiens
  source 1..583: mol_type = unassigned DNA; mol_type = unassigned DNA
agcagctcgggcggcgggaggagtggcagcggcaaggcagcccagtttcgcgaaggctgtcggcgcgccgcggcccgcaggcacccggcacgcgccttccccgcaggcacccggcacgcgccttccccgccgccacgatgcccaagaggaaggtcagctccgccgaaggcgccgccaaggaagaggtgagtgcgggccttctgcggggggtggtgggtttcccgtgagccgctggcctgccttctcttctcgctgactctcctttttctttctccaagcccaagaggagatcggcgcggttgtcagctaaacctcctgcaaaagtggaagcgaagccgaaaaaggcagcagcgaaggtaagcctcgaaacgcgcattgggatgcagcggggccttaggctacactgcttcttaatgcggggcttccattttgattagctattggagctttatttatactttaataattacggtaaataatttttctagtggtcgaggcaaaaatgtaatggatatattcatcctggtttatagaactatatcacactaatgctgctgcagatgttaggagacttaggacgaca

SEQ ID NO: 9444 - DNA, 5881 bp, Homo sapiens
  source 1..5881: mol_type = unassigned DNA; mol_type = unassigned DNA
gcctcccgtcccttcccgcgagcagagggagggaccgccctcgctccccgttctctccgcccccttcccgccccccgcagcccactctgccgccgcgctagcttcacgccggcggcgctgaccgggaaagcagcaccctcttctctgccagccggccggccggcggaggcggaggcagcggcaggcttcaggccgccggggctggcgctgctctgcccggcggtagccggaggcgggcgctgatggaagtgtgaagaggcggcggcggggcccggggaatgtgaggcggcgcgtggcggcggcgcggagcgtgagagacgaggagtaggggtgggggcgctggagcggcggctgcgcttcggcttcgagcccagctctcctggccccaacgcgggcttagcctcccgccttggctcgggcaggcgcccgtcgacccttcggcccctttcgcccgccctggagctgggggcagggtgccagtggaagcgtggggcttggctctgtgattcattcattctccgccgacgggagcctcagacccgctgtgctctgaagagaggagggaagagggggcagccgcgaatgaagggccgggcaccagccgggctccattgtgctcggcggcggggggcgggaaggggctgagggaggtgggatcgggtcccctcctccagctctccggcgtgcgctgcgcccccagcctgctgccagcctggaaatggctccgtttattctcttcgggagaatgaatcgatcctgcctagccttctcttcgtcctccccacctcttctctgctccgagtcttaggaggagaaacatttaaaaagacagattccaatgtggagtgccgtgcaggttgcgagctgccgggtttgcacttcgaggagattttcctgtgtagtttttttcctaatgtgagcgcagggaagccgtggcattactgcttttgggatttttattcacgtgcacgtcgcgtttggttgctcgctccacccccggagacctggtgtggtggagaaatttgaacccgcagccttagctccgaaaaggccgagttacctggctctccctgagtgtcgaggaggacatgagtgaaatgaccagcgaactcattttttataggactcggtgaagccggattctgcatttccctacttgtagactcattttgtggaatagagttgatcgctgtctcctccgcaaagcattttaactcgaataagcaaatgccgcctctgtttgaacgttttggtatttacaagagagaaatcattttacctaagagaactaattgaattggcagcatccttgaaatacctccggacaaggatctgggggtgggggtggaaaagcaactgcgaaatagcagacggagaaattcctttggaagttattccgtagcataagagctgaaacttcagagcaagttttcattgggcaaaatgggggaacaacctatcttcagcactcgagctcatgtcttccaaattgacccaaacacaaagaagaactgggtacccaccagcaagcatgcagttactgtgtcttatttctatgacagcacaagaaatgtgtataggataatcagtttagatggctcaaaggcaataataaatagtaccatcaccccaaacatgacatttactaaaacatctcagaagtttggccagtgggctgatagccgggcaaacaccgtttatggattgggattctcctctgagcatcatctttcgaaatttgcagaaaagtttcaggaatttaaagaagctgctcgactagcaaaggaaaaatcacaagagaagatggaacttaccagtacaccttcacaggaatccgcaggcggggatcttcagtctcctttaacaccggaaagtatcaacgggacagatgatgaaagaacacctgatgtgacacagaactcagagccaagggctgaaccaactcagaatgcattgccattttcacatagttcagcaatcagcaaacattgggaggctgaactggctaccctcaaaggaaataatgccaaactcactgcagccctgctggagtccactgccaatgtgaaacaatggaaacagcaacttgctgcctatcaagaggaagcagaacgtctgcacaagcgggtgactgaacttgaatgtgttagtagccaagcaaatgcagtacatactcataagacagaattaaatcagacaatacaagaactggaagagacactgaaactgaaggaagaggaaatagaaaggttaaaacaagaaattgataatgccagagaactacaagaacagagggattctttgactcagaaactacaggaagtagaaattcggaacaaagacctggagggacaactgtctgacttagagcaacgtctggagaaaagtcagaatgaacaagaagcttttcgcaataacctgaagacactcttagaaattctggatggaaagatatttgaactaacagaattacgagataacttggccaagctactagaatgcagctaaggaaagtgaaatttcagtgccaattaattaaaagatacactgtctctcttcataggactgtttaggctctgcatcaagattgcacaaaaaaaaaaaaaaaaaaattgaatatcactcctccaggaggaggatcttttgaaattggaattgtatatttcactgtaaattttagaatccagcttgtagctagttggggaaaaaagatgaaaaacttgaactacaaattacctccatgtatattattggccatagttaactagaaagttataaatagacacttaatgcaatcttttttcctgatattagccaatgggagaattaacaatgtctaggtcacatcccctttttgtgttcaacacagtgaagattatctgctttttaaattaatttatttacgatatctagagctgtgttttgtgcaaaaacttagtgatgaaagcctgtcttttgttgtaatctgaataatttctcaggatatttttgcactgctgagaagcagtgccattaccaattaattcttgccaggagtgagagagagctgtatctttaattgaaatatactataactgggtgtatagagttcttcccttttttgtgctggaagatatttcactctggtgactactctggtacactctggtgttctctaatcttgtctgttgtatagtttacttttccatattgattccatgtatttatgagaagatattgtctcccattttattacacattttaaagccaactaacgaaggcagctgagtccctcagaaatttttctttttaagtttctaataaatttgacacacagtactgaaatacagcagcccgtcattgacaggctggtctagcaatgttaagtatatttacagaatatgcagttacatttatttatatattttgcaagaaatcttttctgaatgatcaatgcatttcaatttacgaataataatggttattggggaactgtttattatagataattttaaggtgtatagctattttaaagggggtccatttacatcaaacagctgatcagaggactctatctaaattgtgatcgtggcagatagagatggagtcatgtactctatctggctctacacatcaatcacatcttgattcaaacctcacaaggcaatattctgaattgttaactaggtatttcaaaacaggaattaaattcaataggctcttctcagtgaacaggttttaatgttgttttgatgtaattttaaaagacttttagcaaacatgcatttctttatatgatatatttcttttacgaagctattttaaaagtaagccaagtgctgtctagtctgcttataaagtaggaattgcatcagagtacatatattcttgctgtacaatgcctgtgatgttgaggagggttcttttttaaagtgtatgcttgagtaactgactctatggagtctataaatgcactgacttcttgtttgtaccccaaaatgatcgaattgttaagtacaaaattaagctaattaaccaatttgtaaccattttttcactcataaacagctactcaatactagacaattttgttttttatgtatgtgtatgtacgtaaatacatacatattaatttacattagagtgaaaaataaatggtttgtttctgaagttagtttcttaagtgagttttcaggtgtctctgaaaaatttataacaatcatgtattatatgtgctgtaacatcatgtacgttacctccatctattttaggatattttcctcacctatatattatagggagaataatttagatacacatgctcagagctgagatatttctctgataaatcaggtaacaaaatgtatttgattgatggaattttgaagtaaatgtgtttttatccatcagtttctgagtaacaaagagcaccaagttttaatttaaataggagatttaacactagggatcagggagtttagtatgaagagttaaaaaaatttaaaaaacagtgtaagctgttgaaatggcaagtgaattattttaatgatgtaataaaatatttttaaattttgacatagtgatcatttaatgaaaaaactcaccaaaatgtctccatttgaattgtattgataatgtgggacatatgtgtgattcaatatatacatatacccatatgtatatacagaaaattatttttaatactttcctactgataatgaaatttaaaattggaaattttgtgagtgtttttcttgtccaatagagcctaattgtttccttttttagtgatttaacaatctcttgagggctgcacctttaaattcccagattgtcaatagacatgtacagtatatgggataaggtggacacaagtgcacatataaataaaatcttcttaagacttttaactattcatttacagtaggagagtatgtagaaatcatcatccacaagtcataattaggttgtgtgcctactgtagttttttccatttctgtattatataaacatttgcatattaaaatttgatttttcccagagacaagtattatatactgtatctatatttaaatcaaactgtggtaatatatttctcagaaaataatgttggggactatagcctgaacatgtggacttgaagcgacatggaggaggaggttgatcccattgtgtataagttaatatgtgataactattgaatcttgtacaaaaacaaaaattgaaaaaaaaaaagaaaagcaaaaatacagtttttattttgaaatacatttgttctctggagaatgtactttatctttttttcctccagtcttttacagatatttaaaagcatttaaatgatgacagcatttacttaaatctttcaggtgctactggattttgcattagtgtgttatgttgtgaaatcctaactttgacataaaaggttttataagtattcccctgcctggaaaattagtttttgttctcctctctctctctttctcttttccactttctttctgcagactaaaacatgctcacgaagttgcatctctccttgtctctatagaagatctccagcaccatcatagatttgatgttctgctgtcattgaactgttgggaagcagttagaggaaaagctcactttttttttcaggtggaaataaaaggaacactcaaaattaagccaacaccaccactacctttaaaaactagtttatttgccctgttaaaattaaatgtattctttaacatgtgggctacagtctcccatgtttttatttaactgaagcatatacacttcggtcatttatctccttgtggtcctgattttgtcagtactggaatgggaggcaggtcggggaaagtttgtttgatggcagtggattcttattgttgttttaaccattgcattt

SEQ ID NO: 9445 - DNA, 755 bp, Homo sapiens
  source 1..755: mol_type = unassigned DNA; mol_type = unassigned DNA
tcattatagggattctctactgtcattaatcacttaatttaagttatcctaacctttctatgactaagccatgtaaatgattatttttcccttttcctagttttatatctttgaagaatctattcactctaccttgagtgtcttaatatttctcaaaattaatttttatatatttattcagaatatactattcacttatttggggctatgtatttagcaagaaactctttaaagttgaaatttaagttaatctgtgttctcatttaattttaggtgactgaacttgaatgtgttagtagccaagcaaatgcagtacatactcataagacagaattaaatcagacaatacaagaactggaagagacactgaaactgaaggaagaggaaatagaaaggttaaaacaagaaattgataatgccagagaactacaagaacagagggattctttgactcagaaactacaggaagtagaaattcggaacaaagacctggagggacaactgtctgacttagagcaacgtctggagaaaagtcagaatgaacaagaagcttttcgcaataacctgaagacactcttagaaattctggatggaaagatatttgaactaacagaattacgagataacttggccaagctactagaatgcagctaaggaaagtgaaatttcagtgccaattaattaaaagatacactgtctctcttcataggactgtttaggctctgcatcaagattgcacaaaaaaaaaaaaaaaa

SEQ ID NO: 9446 - DNA, 774 bp, Homo sapiens
  source 1..774: mol_type = unassigned DNA; mol_type = unassigned DNA
gcaagttttcattgggcaaaatgggggaacaacctatcttcagcactcgagctcatgtcttccaaattgacccaaacacaaagaagaactgggtacccaccagcaagcatgcagttactgtgtcttatttctatgacagcacaagaaatgtgtataggataatcagtttagatggctcaaaggcaataataaatagtaccatcaccccaaacatgacatttactaaaacatctcagaagtttggccagtgggctgatagccgggcaaacaccgtttatggattgggattctcctctgagcatcatctttcgaaagtgactgaacttgaatgtgttagtagccaagcaaatgcagtacatactcataagacagaattaaatcagacaatacaagaactggaagagacactgaaactgaaggaagaggaaatagaaaggttaaaacaagaaattgataatgccagagaactacaagaacagagggattctttgactcagaaactacaggaagtagaaattcggaacaaagacctggagggacaactgtctgacttagagcaacgtctggagaaaagtcagaatgaacaagaagcttttcgcaataacctgaagacactcttagaaattctggatggaaagatatttgaactaacagaattacgagataacttggccaagctactagaatgcagctaaggaaagtgaaatttcagtgccaattaattaaaagatacactgtctctcttcataggactgtttaggctctgcatcaaga

SEQ ID NO: 9447 - DNA, 815 bp, Homo sapiens
  source 1..815: mol_type = unassigned DNA; mol_type = unassigned DNA
gcaagttttcattgggcaaaatgggggaacaacctatcttcagcactcgagctcatgtcttccaaattgacccaaacacaaagaagaactgggtacccaccagcaagcatgcagttactgtgtcttatttctatgacagcacaagaaatgtgtataggataatcagtttagatggctcaaaggcaataataaatagtaccatcaccccaaacatgacatttactaaaacatctcagaagtttggccagtgggctgatagccgggcaaacaccgtttatggattgggattctcctctgagcatcatctttcgaaatttgcagaaaagtttcaggaatttaaagaagctgctcgactagcaaaggaaaaatcacaagagaagatggaacttaccagtacaccttcacaggaatccgcaggcggggatcttcagtctcctttaacaccggaaagtatcaacgggacagatgatgaaagaacacctgatgtgacacagaactcagagccaagggctgaaccaactcagaatgcattgccattttcacataggaagtagaaattcggaacaaagacctggagggacaactgtctgacttagagcaacgtctggagaaaagtcagaatgaacaagaagcttttcgcaataacctgaagacactcttagaaattctggatggaaagatatttgaactaacagaattacgagataacttggccaagctactagaatgcagctaaggaaagtgaaatttcagtgccaattaattaaaagatacactgtctctcttcataggactgtttaggctctgcatcaaga

SEQ ID NO: 9448 - DNA, 642 bp, Homo sapiens
  source 1..642: mol_type = unassigned DNA; mol_type = unassigned DNA
gcaagttttcattgggcaaaatgggttcagcaatcagcaaacattgggaggctgaactggctaccctcaaaggaaataatgccaaactcactgcagccctgctggagtccactgccaatgtgaaacaatggaaacagcaacttgctgcctatcaagaggaagcagaacgtctgcacaagcgggtgactgaacttgaatgtgttagtagccaagcaaatgcagtacatactcataagacagaattaaatcagacaatacaagaactggaagagacactgaaactgaaggaagaggaaatagaaaggttaaaacaagaaattgataatgccagagaactacaagaacagagggattctttgactcagaaactacaggaagtagaaattcggaacaaagacctggagggacaactgtctgacttagagcaacgtctggagaaaagtcagaatgaacaagaagcttttcgcaataacctgaagacactcttagaaattctggatggaaagatatttgaactaacagaattacgagataacttggccaagctactagaatgcagctaaggaaagtgaaatttcagtgccaattaattaaaagatacactgtctctcttcataggactgtttaggctctgcatcaaga

SEQ ID NO: 9449 - DNA, 1384 bp, Homo sapiens
  source 1..1384: mol_type = unassigned DNA; mol_type = unassigned DNA
gggccaaaccagtgctcctgccacctctctggctgccccctagagcctgcccatcccagcctgaccaatgtccacagccagggagcagccaatcttcagcacacgggcgcacgtgttccaaattgacccagccaccaagcgaaactggatcccagcgggcaagcacgcactcactgtctcctatttctacgatgccacccgcaatgtgtaccgcatcatcagcatcggaggcgccaaggccatcatcaacagcactgtcactcccaacatgaccttcaccaaaacttcccagaagttcgggcagtgggccgacagtcgcgccaacacagtctacggcctgggctttgcctctgaacagcatctgacacagtttgccgagaagttccaggaagtgaaggaagcagccaggctggccagggagaaatctcaggatggcggggagctcaccagtccagccctggggctcgcctcccaccaggtgcccccgagccctctcgtcagtgccaacggccccggcgaggaaaaactgttccgcagccagagcgctgatgcccccggccccacagagcgcgagcggctaaagaagatgttgtctgagggctccgtgggcgaggtacagtgggaggccgagtttttcgcactgcaggacagcaacaacaagctggcaggcgccctgcgagaggccaacgccgccgcagcccagtggaggcagcagctggaggctcagcgtgcagaggccgagcggctgcggcagcgggtggctgagctggaggctcaggcagcttcagaggtgacccccaccggtgagaaggaggggctgggccagggccagtcgctggaacagctggaagctctggtgcaaaccaaggaccaggagattcagaccctgaagagtcagactggggggccccgcgaggccctggaggctgccgagcgtgaggagactcagcagaaggtgcagacccgcaatgcggagttggagcaccagctgcgggcgatggagcgcagcctggaggaggcacgggcagagcgggagcgggcgcgggctgaggtgggccgggcagcgcagctgctggacgtcagcctgtttgagctgagtgagctgcgtgagggcctggcccgcctggctgaggctgcgccctgagccggggctggttttctatgaacgattccggcctgggatgcgggccaggctgcaggcggcatagttgggcccattcgtcctggaaagggactggggggtcccaacttagccctgggtgggccgggccgggctgggctggggtgggccccagtcggctctggttgttggcagctttggggctgtttttgagcttctcattgtgtagaatttctagatcccccgattacatttctaagcgtg

SEQ ID NO: 9450 - DNA, 1979 bp, Homo sapiens
  source 1..1979: mol_type = unassigned DNA; mol_type = unassigned DNA
caataaccaggacaatgagaaatttacatctggatgtcagcggccaccaggctcctctcagagggccatctcctgtacagggtgttgtgggggcttcccctagacaaagaaagatggggtctgcttgctctgagttatctataataattatcttacctttttgtttctttttataatttctttcttttttgagacagggtctcactctcttgtccaggctggagtgcagtggcctgaccatagctcactgcactgcagccttgacctcctgggctcaagtgatcctcccacctcagcctccccagtagctgggacggcaggcacatgccaccacacccagctaattgtttaaatttttggtagagatggggtctcgccatgttgctcaggatggtctcgaactcctgggctcaaaggatcctcctgactcagcctcccaaagcaccaggtgtactttgggcctctcctgcctttttgattgaaagttccatgacgggcacacctggtgatgggtcctgagatggaacctgcttggcctccctcagcctggcctgagggacactcatagtccctcctctctccctaggggccaaaccagtgctcctgccacctctctggctgccccctagagcctgcccatcccagcctgaccaatgtccacagccagggagcagccaatcttcagcacacgggcgcacgtgttccaaattgacccagccaccaagcgaaactggatcccagcgggcaagcacgcactcactgtctcctatttctacgatgccacccgcaatgtgtaccgcatcatcagcatcggaggcgccaaggccatcatcaacagcactgtcactcccaacatgaccttcaccaaaacttcccagaagttcgggcagtgggccgacagtcgcgccaacacagtctacggcctgggctttgcctctgaacagcatctgacacagtttgccgagaagttccaggaagtgaaggaagcagccaggctggccagggagaaatctcaggatggcggggagctcaccagtccagccctggggctcgcctcccaccaggtgcccccgagccctctcgtcagtgccaacggccccggcgaggaaaaactgttccgcagccagagcgctgatgcccccggccccacagagcgcgagcggctaaagaagatgttgtctgagggctccgtgggcgaggtacagtgggaggccgagtttttcgcactgcaggacagcaacaacaagctggcaggcgccctgcgagaggccaacgccgccgcagcccagtggaggcagcagctggaggctcagcgtgcagaggccgagcggctgcggcagcgggtggctgagctggaggctcaggcagcttcagaggtgacccccaccggtgagaaggaggggctgggccagggccagtcgctggaacagctggaagctctggtgcaaaccaaggaccaggagattcagaccctgaagagtcagactggggggccccgcgaggccctggaggctgccgagcgtgaggagactcagcagaaggtgcaggacctggagacccgcaatgcggagttggagcaccagctgcgggcgatggagcgcagcctggaggaggcacgggcagagcgggagcgggcgcgggctgaggtgggccgggcagcgcagctgctggacgtcagcctgtttgagctgagtgagctgcgtgagggcctggcccgcctggctgaggctgcgccctgagccggggctggttttctatgaacgattccggcctgggatgcgggccaggctgcaggcggcatagttgggcccattcgtcctggaaagggactggggggtcccaacttagccctgggtgggccgggccgggctgggctggggtgggccccagtcggctctggttgttggcagctttggggctgtttttgagcttctcattgtgtagaatttctagatcccccgattacatttctaagcgtg

SEQ ID NO: 9451 - DNA, 1557 bp, Homo sapiens
  source 1..1557: mol_type = unassigned DNA; mol_type = unassigned DNA
ggcggcggcggcgcagacaaaggcacgggcggcgtggagggcggcgcggagggcgcgggcccgggagccagggagcgagcggggcgcccggcagcgcggagtcagcgccgcgggggccgcacccgactcgcgcctggacactcgcggggcgccgacctggcagggggccaaaccagtgctcctgccacctctctggctgccccctagagcctgcccatcccagcctgaccaatgtccacagccagggagcagccaatcttcagcacacgggcgcacgtgttccaaattgacccagccaccaagcgaaactggatcccagcgggcaagcacgcactcactgtctcctatttctacgatgccacccgcaatgtgtaccgcatcatcagcatcggaggcgccaaggccatcatcaacagcactgtcactcccaacatgaccttcaccaaaacttcccagaagttcgggcagtgggccgacagtcgcgccaacacagtctacggcctgggctttgcctctgaacagcatctgacacagtttgccgagaagttccaggaagtgaaggaagcagccaggctggccagggagaaatctcaggatggcggggagctcaccagtccagccctggggctcgcctcccaccaggtgcccccgagccctctcgtcagtgccaacggccccggcgaggaaaaactgttccgcagccagagcgctgatgcccccggccccacagagcgcgagcggctaaagaagatgttgtctgagggctccgtgggcgaggtacagtgggaggccgagtttttcgcactgcaggacagcaacaacaagctggcaggcgccctgcgagaggccaacgccgccgcagcccagtggaggcagcagctggaggctcagcgtgcagaggccgagcggctgcggcagcgggtggctgagctggaggctcaggcagcttcagaggtgacccccaccggtgagaaggaggggctgggccagggccagtcgctggaacagctggaagctctggtgcaaaccaaggaccaggagattcagaccctgaagagtcagactggggggccccgcgaggccctggaggctgccgagcgtgaggagactcagcagaaggtgcaggacctggagacccgcaatgcggagttggagcaccagctgcgggcgatggagcgcagcctggaggaggcacgggcagagcgggagcgggcgcgggctgaggtgggccgggcagcgcagctgctggacgtcagcctgtttgagctgagtgagctgcgtgagggcctggcccgcctggctgaggctgcgccctgagccggggctggttttctatgaacgattccggcctgggatgcgggccaggctgcaggcggcatagttgggcccattcgtcctggaaagggactggggggtcccaacttagccctgggtgggccgggccgggctgggctggggtgggccccagtcggctctggttgttggcagctttggggctgtttttgagcttctcattgtgtagaatttctagatcccccgattacatttctaagcgtg

SEQ ID NO: 9452 - DNA, 903 bp, Homo sapiens
  source 1..903: mol_type = unassigned DNA
acgggcggcgtggagggcggcgcggagggcgcgggcccgggagccagggagcgagcggggcgcccggcagcgcggagtcagcgccgcgggggccgcacccgactcgcgcctggacactcgcggggcgccgacctggcagggggccaaaccagtgctcctgccacctctctggctgccccctagagcctgcccatcccagcctgaccaatgtccacagccaggcagcagctggaggctcagcgtgcagaggccgagcggctgcggcagcgggtggctgagctggaggctcaggcagcttcagaggtgacccccaccggtgagaaggaggggctgggccagggccagtcgctggaacagctggaagctctggtgcaaaccaaggaccaggagattcagaccctgaagagtcagactggggggccccgcgaggccctggaggctgccgagcgtgaggagactcagcagaaggtgcaggacctggagacccgcaatgcggagttggagcaccagctgcgggcgatggagcgcagcctggaggaggcacgggcagagcgggagcgggcgcgggctgaggtgggccgggcagcgcagctgctggacgtcagcctgtttgagctgagtgagctgcgtgagggcctggcccgcctggctgaggctgcgccctgagccggggctggttttctatgaacgattccggcctgggatgcgggccaggctgcaggcggcatagttgggcccattcgtcctggaaagggactggggggtcccaacttagccctgggtgggccgggccgggctgggctggggtgggccccagtcggctctggttgttggcagctttggggctgtttttgagcttctcattgtgtagaatttctagatcccccgattacatttctaagc

SEQ ID NO: 9453 - DNA, 982 bp, Homo sapiens
  source 1..982: mol_type = unassigned DNA
atgtccacagccagggagcagccaatcttcagcacacgggcgcacgtgttccaaattgacccagccaccaagcgaaactggatcccagcgggcaagcacgcactcactgtctcctatttctacgatgccacccgcaatgtgtaccgcatcatcagcatcggaggcgccaaggccatcatcaacagcactgtcactcccaacatgaccttcaccaaaacttcccagaagttcgggcagtgggccgacagtcgcgccaacacagtctacggcctgggctttgcctctgaacagcatctgacacaggtgcccccgagccctctcgtcagtgccaacggccccggcgaggaaaaactgttccgcagccagagcgctgatgcccccggccccacagagcgcgagcggctaaagaagatgttgtctgagggctccgtgggcgaggtacagtgggaggccgagtttttcgcactgcaggacagcaacaacaagctggcaggcgccctgcgagaggccaacgccgccgcagcccagtggaggcagcagctggaggctcagcgtgcagaggccgagcggctgcggcagcgggtggctgagctggaggctcaggcagcttcagaggtgacccccaccggtgagaaggaggggctgggccagggccagtcgctggaacagctggaagctctggtgcaaaccaaggaccaggagattcagaccctgaagagtcagactggggggccccgcgaggccctggaggctgccgagcgtgaggagactcagcagaaggtgcaggacctggagacccgcaatgcggagttggagcaccagctgcgggcgatggagcgcagcctggaggaggcacgggcagagcgggagcgggcgcgggctgaggtgggccgggcagcgcagctgctggacgtcagcctgtttgagctgagtgagctgcgtgagggcctggcccgcctggctgaggctgcgccctgagccg

SEQ ID NO: 9454 - DNA, 1607 bp, Homo sapiens
  source 1..1607: mol_type = unassigned DNA; mol_type = unassigned DNA
aaacgctgcaagtcgcagcaggagctgccggaccggaagggcctgggttccggggacccctgtgttccccaactcccacccggcgcaggacccgcccccagtccaggccagagctgccgccccacccccactcaggggctccggtttcagaccctgtgaccaggacagcagctgcccaggacaggatagggggggcatcccccctttgaccacagaggccgctgggccagggcctcccctcccccacctgtcttccccctcctccaaactcctccttggtcccctgcagattcggggttgctgaatggcccaatggggaggttggggagccctggtctcccagtgtggattctgctctgccctcatggtgggcattgggattggctgtttgtctacatcttgtctttttaacttggctgggggctccctggggatttggactctggacttcaaggggccaaaccagtgctcctgccacctctctggctgccccctagagcctgcccatcccagcctgaccaatgtccacagccagggagcagccaatcttcagcacacgggcgcacgtgttccaaattgacccagccaccaagcgaaactggatcccagcgggcaagcacgcactcactgtctcctatttctacgatgccacccgcaatgtgtaccgcatcatcagcatcggaggcgccaaggccatcatcaacagcactgtcactcccaacatgaccttcaccaaaacttcccagaagttcgggcagtgggccgacagtcgcgccaacacagtctacggcctgggctttgcctctgaacagcatctgacacagtttgccgagaagttccaggaagtgaaggaagcagccaggctggccagggagaaatctcaggatggcggggagctcaccagtccagccctggggctcgcctcccaccaggtgcccccgagccctctcgtcagtgccaacggccccggcgaggaaaaactgttccgcagccagagcgctgatgcccccggccccacagagcgcgagcggctaaagaagatgttgtctgagggctccgtgggcgaggtacagtgggaggccgagtttttcgcactgcaggacagcaacaacaagctggcaggcgccctgcgagaggccaacgccgccgcagcccagtggaggcagcagctggaggctcagcgtgcagaggccgagcggctgcggcagcgggtggctgagctggaggctcaggcagcttcagaggtgacccccaccggtgagaaggaggggctgggccagggccagtcgctggaacagctggaagctctggtgcaaaccaaggaccaggagattcagaccctgaagagtcagactggggggccccgcgaggccctggaggctgccgagcgtgaggagactcagcagaaggtgcaggacctggagacccgcaatgcggagttggagcaccagctgcgggcgatggagcgcagcctggaggaggcacgggcagagcgggagcgggcgcgggctgaggtgggccgggcagcgcagctgctggacgtcagcctgtttgagctgagtgagctgcgtgagggcctggcccgcctggctgaggctgcgccctga

SEQ ID NO: 9455 - DNA, 570 bp, Homo sapiens
  source 1..570: mol_type = unassigned DNA; mol_type = unassigned DNA
aggtgcccccgagccctctcgtcagtgccaacggccccggcgaggaaaaactgttccgcagccagagcgctgatgcccccggccccacagagcgcgagcggctaaagaagatgttgtctgagggctccgtgggcgaggtacagtgggaggccgagtttttcgcactgcaggacagcaacaacaagctggcaggcgccctgcgagaggccaacgccgccgcagcccagtggaggcagcagctggaggctcagcgtgcagaggccgagcggctgcggcagcgggtggctgagctggaggctcaggcagcttcagaggtgacccccaccggtgagaaggaggggctgggccagggccagtcgctggaacagctggaagctctggtgcaaaccaaggaccaggagattcagaccctgaagagtcagactggggggccccgcgaggccctggaggctgccgagcgtgaggagactcagcagaaggtgcaggtgtgtgtgggcacaaggaggtggggtgacggtgggtgacagtcacctcaacagacactcaggacaatatctacctaagatgata

SEQ ID NO: 9456 - DNA, 866 bp, Homo sapiens
  source 1..866: mol_type = unassigned DNA; mol_type = unassigned DNA
gcggcggccgcgtcgggaccggccgcgatgggaccggaggcggcgcgggcggcggcggcgcagacaaaggggccaaaccagtgctcctgccacctctctggctgccccctagagcctgcccatcccagcctgaccaatgtccacagccagggagcagccaatcttcagcacacgggcgcacgtgttccaaattgacccagccaccaagcgaaactggatcccagcgggcaagcacgcactcactgtctcctatttctacgatgccacccgcaatgtgtaccgcatcatcagcatcggaggcgccaaggccatcatcaacagcactgtcactcccaacatgaccttcaccaaaacttcccagaagttcgggcagtgggccgacagtcgcgccaacacagtctacggcctgggctttgcctctgaacagcatctgacacagtttgccgagaagttccaggaagtgaaggaagcagccaggctggccagggagaaatctcaggatggcggggagctcaccagtccagccctggggctcgcctcccaccaggtgcccccgagccctctcgtcagtgccaacggccccggcgaggaaaaactgttccgcagccagagcgctgatgcccccggccccacagagcgcgagcggctaaagaagatgttgtctgagggctccgtgggcgaggtacagtgggaggccgagtttttcgcactgcaggacagcaacaacaagctggcaggcgccctgcgagaggccaacgccgccgcagcccagtggaggcagcagctggaggctcagcgtgcagaggccgagcggctgcggcagcgggtggctgagctggaggctcaggcagcttcagaggtgaccc

SEQ ID NO: 9457 - DNA, 675 bp, Homo sapiens
  source 1..675: mol_type = unassigned DNA; mol_type = unassigned DNA
agcgcggagtcagcgccgcgggggccgcacccgactcgcgcctggacactcgcggggcgccgacctggcaggattggggatcccgggcaccgggcggtgtcggacccccctccgggagccccgtggccggcggcatccgaggcgcatgactagttggggccaaaccagtgctcctgccacctctctggctgccccctagagcctgcccatcccagcctgaccaatgtccacagccagggagcagccaatcttcagcacacgggcgcacgtgttccaaattgacccagccaccaagcgaaactggatcccagcgggcaagcacgcactcactgtctcctatttctacgatgccacccgcaatgtgtaccgcatcatcagcatcggaggcgccaaggccatcatcaacagcactgtcactcccaacatgaccttcaccaaaacttcccagaagttcgggcagtgggccgacagtcgcgccaacacagtctacggcctgggctttgcctctgaacagcatctgacacagtttgccgagaagttccaggaagtgaaggaagcagccaggctggccagggagaaatctcaggatggcggggagctcaccagtccagccctggggctcgcctcccaccaggtgcccccgagccctctcgtcagtgccaacggccccggcga

SEQ ID NO: 9458 - DNA, 555 bp, Homo sapiens
  source 1..555: mol_type = unassigned DNA; mol_type = unassigned DNA
acctctctggctgccccctagagcctgcccatcccagcctgaccaatgtccacagccagggagcagccaatcttcagcacacgggcgcacgtgttccaaattgacccagccaccaagcgaaactggatcccagcgggcaagcacgcactcactgtctcctatttctacgatgccacccgcaatgtgtaccgcatcatcagcatcggaggcgccaaggtcagggtggggtctgggtggggcagaggcaccaggagtcctggtgacaaccttgggtctggtggctggcttgctgtgtgcccaagggacaggaaaccctaagccttcccaggccctagtctctatctcctgaaagggttcagagtaaagaccttcaagaccctaatacaaggtaatacctggggggtttcatgtttgttagtatctgtcccatctaccttgaactttgttccccgaccctaggccatcatcaacagcactgtcactcccaacatgaccttcaccaaaacttcccagaagttcgggcagtgggccgacagtcgcgccaacacagtctac

SEQ ID NO: 9459 - DNA, 770 bp, Homo sapiens
  source 1..770: mol_type = unassigned DNA; mol_type = unassigned DNA
aggggtccggacgtcccggacccagggactggaggggtggcagggggtcctcgaagtttaggagtctaggacaacgcggaggaccggggtcccggacccagttagaggaggagtcacgaagggagtccccggagttaccgacctggggttggaggaggcagaagaggtgtcccccgaagttctggacccagagacagggggcgtcgcgggaatctcggaagttccagggtcagagcccgcgtcccggagttggggcgtgcactgggtgtcctgcctcgggtggggatgggatcctgaattaatattaacccccccgtcccccgcactcgggtgcatgggatggggcctcatccaccggccagattggggatcccgggcaccgggcggtgtcggacccccctccgggagccccgtggccggcggcatccgaggcgcatgactagttggggccaaaccagtgctcctgccacctctctggctgccccctagagcctgcccatcccagcctgaccaatgtccacagccagggagcagccaatcttcagcacacgggcgcacgtgttccaaattgacccagccaccaagcgaaactggatcccagcgggcaagcacgcactcactgtctcctatttctacgatgccacccgcaatgtgtaccgcatcatcagcatcggaggcgccaaggccatcatcaacagcactgtcactcccaacatgaccttcaccaaaacttcccagaagttcgggcagtgggccgacagtcgcgccaa

SEQ ID NO: 9460 - DNA, 1418 bp, Homo sapiens
  source 1..1418: mol_type = unassigned DNA; mol_type = unassigned DNA
ggccggcggcatccgaggcgcatgactagttggggccaaaccagtgctcctgccacctctctggctgccccctagagcctgcccatcccagcctgaccaatgtccacagccagggagcagccaatcttcagcacacgggcgcacgtgttccaaattgacccagccaccaagcgaaactggatcccagcgggcaagcacgcactcactgtctcctatttctacgatgccacccgcaatgtgtaccgcatcatcagcatcggaggcgccaaggccatcatcaacagcactgtcactcccaacatgaccttcaccaaaacttcccagaagttcgggcagtgggccgacagtcgcgccaacacagtctacggcctgggctttgcctctgaacagcatctgacacagtttgccgagaagttccaggaagtgaaggaagcagccaggctggccagggagaaatctcaggatggcggggagctcaccagtccagccctggggctcgcctcccaccaggtgcccccgagccctctcgtcagtgccaacggccccggcgaggaaaaactgttccgcagccagagcgctgatgcccccggccccacagagcgcgagcggctaaagaagatgttgtctgagggctccgtgggcgaggtacagtgggaggccgagtttttcgcactgcaggacagcaacaacaagctggcaggcgccctgcgagaggccaacgccgccgcagcccagtggaggcagcagctggaggctcagcgtgcagaggccgagcggctgcggcagcgggtggctgagctggaggctcaggcagcttcagaggtgacccccaccggtgagaaggaggggctgggccagggccagtcgctggaacagctggaagctctggtgcaaaccaaggaccaggagattcagaccctgaagagtcagactggggggccccgcgaggccctggaggctgccgagcgtgaggagactcagcagaaggtgcagacccgcaatgcggagttggagcaccagctgcgggcgatggagcgcagcctggaggaggcacgggcagagcgggagcgggcgcgggctgaggtgggccgggcagcgcagctgctggacgtcagcctgtttgagctgagtgagctgcgtgagggcctggcccgcctggctgaggctgcgccctgagccggggctggttttctatgaacgattccggcctgggatgcgggccaggctgcaggcggcatagttgggcccattcgtcctggaaagggactggggggtcccaacttagccctgggtgggccgggccgggctgggctggggtgggccccagtcggctctggttgttggcagctttggggctgtttttgagcttctcattgtgtagaatttctagatcccccgattacatttctaagcgtggc

SEQ ID NO: 9461 - DNA, 1975 bp, Homo sapiens
  source 1..1975: mol_type = unassigned DNA; mol_type = unassigned DNA
gccgagcggagaggccgcccattggccggccagcgccacgtggccgcccccgccggtatattaggccactatttacctccggctcactcgccatgggttggagagggcagctcgggtagagagggctggcggagcggcgcagacggcggcagtcctgctcagcctctgcccggctccgtactccggccccggcctgcgccctcagaaaggtggggcccgaaccatgagctcctacctggagtacgtgtcatgcagcagcagcggcggggtcggcggcgacgtgctcagcttggcacccaagttctgccgctccgacgcccggcccgtggctctgcagcccgccttccctctgggcaacggcgacggcgccttcgtcagctgtctgcccctggccgccgcccgaccctcgccttcgcccccggccgcccccgcgcggccgtccgtaccgcctccggccgcgccccagtacgcgcagtgcaccctggagggggcctacgaacctggtgccgcacctgccgcggcagctgggggcgcggactacggcttcctggggtccgggccggcgtacgacttcccgggcgtgctggggcgggcggccgacgacggcgggtctcacgtccactacgccacctcggccgtcttctcgggcggcggctctttcctcctcagcggccaggtggattacgcggccttcggcgaacccggcccttttccggcttgtctcaaagcgtcagccgacggccaccctggtgctttccagaccgcatccccggccccaggcacctaccccaagtccgtctctcccgcctccggcctccctgccgccttcagcacgttcgagtggatgaaagtgaagaggaatgcctctaagaaaggcaaactcgccgagtatggggccgctagcccctccagcgcgatccgcacgaatttcagcaccaagcaactgacagaactggaaaaagagtttcatttcaataagtacttaactcgagcccggcgcatcgagatagccaactgcttgcacctgaatgacacgcaagtcaaaatctggttccagaaccgcaggatgaaacagaagaaaagggaacgagaagggcttctggccacggccattcctgtggctcccctccaacttcccctctctggaacaacccccactaagtttatcaagaaccccggcagcccttctcagtcccaagagccttcgtgaggccggtacttggggccgaaaaactgtggcctgcagaagtcccaggcgacccccatccctatctagacttaggagctcagtttgggatggaggtgggagaacaaaaatgaatagggatttcacttgggaaatgaagtactttagttggcttccgagttccagactatatgtccagatattaattgactgtcttgtaagccacttgtttggttatgatttgtgtcttatcagggaaaaggtgcccagctgccagcccagctccgctgctatctttgcctcacttagtcatgtgcaattcgcgttgcagagtggcagaccattagttgctgagttctgtcagcactctgatgtgctcagaagagcacctgcccaaagtttttctggttttaatttaaaggacaaggctacatatattcagctttttgagatgaccaaagctagttagggtctccttgatgtagctaagctgcttcagtgatcttcacatttgcactccagtttttttttctttaaaaaagcggtttctacctctctatgtgcctgagtgatgatacaatcgctgtttagttactagatgaacaaatccacagaatgggtaaagagtagaatctgaactatatcttgacaaatattattcaaacttgaatgtaaatatatacagtatgtatattttttaaaaagatttgcttgcaatgaccttataagtgacatttaatgtcatagcatgtaaagggttttttttgtaataaaaattatagaatctgc

SEQ ID NO: 9462 - DNA, 586 bp, Homo sapiens
  source 1..586: mol_type = unassigned DNA; mol_type = unassigned DNA
cttcccggagctggcaggcgggccgcggcggcggcgggcagcggacgggcggactgacgggcgcctccaccttgctccctccctggctgccggcttccttttgtctttctgggcggcgatgagcgcagggccggcgcagcagctgcgggcgcacggaggcccgcgctgctagtcactcctcccggcctcggcgcgcttgtcccgggcagcggcccgggcccgctgcagccgccgccggcgccgaacttgggctcgggaagccggcggaccgcgtcctgcgccggagcaggggcatggtctagtggcccagtcaggacgcggaaacactccctggaggttctgacccactccctctcagcctccgcctggtctctgctggagaactcctggaacctttaagccctggctcagccctcagctctgtcccatcccagctgacctctgtgctctgcgcccgagctcctgagcccacgtgtagtcgccgccgccagccgccatgggcaaacagaacagcaagctgcggcccgaggtgctgcaggacctgcgggagaacacggagttcaccgaccacgagctgcaggagtgg

SEQ ID NO: 9463 - DNA, 1751 bp, Homo sapiens
  source 1..1751: mol_type = unassigned DNA; mol_type = unassigned DNA
cgggccgcggcggcggcgggcagcggacgggcggactgacgggcgcctccaccttgctccctccctggctgccggcttccttttgtctttctgggcggcgatgagcgcagggccggcgcagcagctgcgggcgcacggaggcccgcgctgctagtcactcctcccggcctcggcgcgcttgtcccgggcagcggcccgggcccgctgcagccgccgccggcgccgaacttgggctcgggaagccggcggaccgcgtcctgcgccggagcaggggcatggtctagtggcccagtcaggacgcggaaacactccctggaggttctgacccactccctctcagcctccgcctggtctctggtgtagtcgccgccgccagccgccatgggcaaacagaacagcaagctgcggcccgaggtgctgcaggacctgcgggagaacacggagttcaccgaccacgagctgcaggagtggtacaagggcttcctcaaggactgccccaccggccacctgaccgtggacgagttcaagaagatctacgccaacttcttcccctacggcgacgcttccaagttcgccgagcacgtcttccgcaccttcgacaccaacggcgacggcaccatcgacttccgggagttcatcattgcgctgagcgtgacctcgcggggcaagctggagcagaagctcaagtgggccttcagcatgtacgacctggacggcaacggctacatcagccgcagcgagatgctggagatcgtgcaggccatctacaagatggtgtcgtctgtgatgaagatgccggaggatgagtccaccccggagaagcgcacagacaagatcttcaggcagatggacaccaacaatgacggcaaactgtccttggaagaattcatcagaggtgccaagagcgacccctccatcgtccgcctgctgcagtgcgaccccagcagtgccagtcagttctgagcgagcggcccctggacagttgcagagaaacacaggcttgtcgtgccgtttaagctttgcttgcaagagtggatgccccgcaatcgttcctgctctcccgggccccgggcctggggcatgcgttgcacctgcccagcccggtggctgcgcctccctcctccacctgaccaacgcgacattcctcccctcacgcctggcccggtcccttccagggcaactcccagggatgtggtgacatgcagggttcaagtgttcttggttccaggcacctcccggctcacggggagctcagaggtccatgccgaggagaccaggcaggacctcccgaggctgcgccccggccggcccatgcgttttgtgatcccaagtgactctgtgggaagggtggggacgaggcgtcgggagggtatacagggagcccctcccgtgcatggctgcccccccgttcattttctccaccacagccgcttgcacgtatagatactgtggtcccctttcttttaatatataaattatgtatggtgaagtggagtgtattgtgtaggtcccgtatttaatgcctctgactgcctttgaagcgcagccctctgtggcccgcagccccctgagcctggctgttgtgtggtatttatgctctctttgtctgcctgtttctaaggaaatgcatgtgtgccctgagccgtgatgatcctcccatccgtgttgtgagcacaggcatttgtgtctggtctgtcctccctgttgattggtctggcatttccggtattaaaatgataaaataaatggca

SEQ ID NO: 9464 - DNA, 1904 bp, Homo sapiens
  source 1..1904: mol_type = unassigned DNA; mol_type = unassigned DNA
agcttctgccaagggtgggggcccacgcggaggcgatccgctcgttcctcccagggccatggggcgacgaggagagccctggcctccccgcgacccgcactgcgacctgggccagacgcgccaccttccccggtcgcggtttgcttctctttaaaatgaggacagctcctcccttgggggctgtggtgacaggtgaaatgagaacgcactgaagacagctcttggtccaaagccccgcacacagggcatggtctagtggcccagtcaggacgcggaaacactccctggaggttctgacccactccctctcagcctccgcctggtctctgggttggctgttccagctccaaagagaaggaggaaccttttccttctgcagcccctccccaccagcctcattccttagctggggtcagacctggggtcctcactgcagctggcctctggcagcgttctcaggctagccctccctgctgaaaagagaaccgtgtgggactcacaggtgtagtcgccgccgccagccgccatgggcaaacagaacagcaagctgcggcccgaggtgctgcaggacctgcgggagaacacggagttcaccgaccacgagctgcaggagtggtacaagggcttcctcaaggactgccccaccggccacctgaccgtggacgagttcaagaagatctacgccaacttcttcccctacggcgacgcttccaagttcgccgagcacgtcttccgcaccttcgacaccaacggcgacggcaccatcgacttccgggagttcatcattgcgctgagcgtgacctcgcggggcaagctggagcagaagctcaagtgggccttcagcatgtacgacctggacggcaacggctacatcagccgcagcgagatgctggagatcgtgcaggccatctacaagatggtgtcgtctgtgatgaagatgccggaggatgagtccaccccggagaagcgcacagacaagatcttcaggcagatggacaccaacaatgacggcaaactgtccttggaagaattcatcagaggtgccaagagcgacccctccatcgtccgcctgctgcagtgcgaccccagcagtgccagtcagttctgagcgagcggcccctggacagttgcagagaaacacaggcttgtcgtgccgtttaagctttgcttgcaagagtggatgccccgcaatcgttcctgctctcccgggccccgggcctggggcatgcgttgcacctgcccagcccggtggctgcgcctccctcctccacctgaccaacgcgacattcctcccctcacgcctggcccggtcccttccagggcaactcccagggatgtggtgacatgcagggttcaagtgttcttggttccaggcacctcccggctcacggggagctcagaggtccatgccgaggagaccaggcaggacctcccgaggctgcgccccggccggcccatgcgttttgtgatcccaagtgactctgtgggaagggtggggacgaggcgtcgggagggtatacagggagcccctcccgtgcatggctgcccccccgttcattttctccaccacagccgcttgcacgtatagatactgtggtcccctttcttttaatatataaattatgtatggtgaagtggagtgtattgtgtaggtcccgtatttaatgcctctgactgcctttgaagcgcagccctctgtggcccgcagccccctgagcctggctgttgtgtggtatttatgctctctttgtctgcctgtttctaaggaaatgcatgtgtgccctgagccgtgatgatcctcccatccgtgttgtgagcacaggcatttgtgtctggtctgtcctccctgttgattggtctggcatttccggtattaaaatgataaaataaatggcattttctga

SEQ ID NO: 9465 - DNA, 4781 bp, Homo sapiens
  source 1..4781: mol_type = unassigned DNA; mol_type = unassigned DNA
agggaaggggacggagttctctggagtcaggtctggggccaggagacctggcccagcagaagtcctctctgtcttctccaggcgcagcccttcagccatgcaatcctgcgtgtcctcgttcttcattccacaaatacgttctaagggcctcctgcatttcaggcacttcagaggaccttctggaagcttcccagggcctgctatcttccctgtactgggcatggtctagtggcccagtcaggacgcggaaacactccctggaggttctgacccactccctctcagcctccgcctggtctctgggttggctgttccagctccaaagagaaggaggaaccttttccttctgcagcccctccccaccagcctcattccttagctggggtcagacctggggtcctcactgcagctggcctctggcagcgttctcaggctagccctccctgctgaaaagagaaccgtgtgggactcacaggtgtagtcgccgccgccagccgccatgggcaaacagaacagcaagctgcggcccgaggtgctgcaggacctgcgggagaacacggagttcaccgaccacgagctgcaggagtggtacaagggcttcctcaaggactgccccaccggccacctgaccgtggacgagttcaagaagatctacgccaacttcttcccctacggcgacgcttccaagttcgccgagcacgtcttccgcaccttcgacaccaacggcgacggcaccatcgacttccgggagttcatcattgcgctgagcgtgacctcgcggggcaagctggagcagaagctcaagtgggccttcagcatgtacgacctggacggcaacggctacatcagccgcagcgagatgctggagatcgtgcaggccatctacaagatggtgtcgtctgtgatgaagatgccggaggatgagtccaccccggagaagcgcacagacaagatcttcaggcagatggacaccaacaatgacggtagtgcggggtgggggcggggctgcatgtgtacgccacggtaggggcaaaaccatgtggtttggggcaccccctcccctctgcagcttcttggtctcctgagggccacccccgcccgccacctgcctggcgcctgccatgcccagggaagagcgggatgcagtcagggacacccgtgctgtatcctggctcctctgtgcagctttgtgatgctgggcatgttgtggcctctctgagccactgtctccccacttatagaatcgggcatacccatattcccgtgggtacaatgtttaggggcagggaggcaagcatgctggtggccctgaacctggaggggttgagatcaaaggatcccagatgttggggtcctggggtgctggccatgcctctcttgctgccatcctgagagaagaagctgcccagatggccccagtgtccaaggggaactgtcaggatgtacgctgccaccttgtccacctacagcagctctgtggagactcagccccactgcagaagtgcaagtctcacgatggtgggtggcagcagtggtgacagggctgtgcctcgagtgccctcctctgcattggctgtgaggtgagggcggctgtgcggccctcccattctgctcttcttgccggctttgtcaagagcagccacagcaccaggtttgctttgcttttgagcaataaagaaacacgaccttaagaagagaaaatacaggctgggcgcagtggctcacgcctgtaatcccagcactttgggaggccgaggtgggcagatcacgaggtcaggagatcgagaccatcctggctaacacggtgaaaccccgtctctgctaaaaatacaaaaaaattagccaggcgtggtggcgggcgcctgtagtcccagctactcgggaggctgaggcaggagaatggtgtgaacccgggaggcagagcttgcagtgagccgagatcgcaccactgcactccagcctgggcgatagagtgagactccatctcaaaaaaataaagaggaaatactccctgggttgtgctggggattaaacgataagctaatgcccaagaagctgctctgcgaagtctggagtgcagccctcgggtgagttaagcatggccccagcgggagacgggatgtgggggagctgtaagcagcaaagagcattccaggcagccaggtcacagtttcaaaacacacacacacagaaaacaaggctgcctggtgcctggcgttgcctttgggctgatgggaaatgtgtgttccaccctccagcctagcagggcacctgctgccgctctcctgaggctgtccgctcctcgtggggatggtgaatccggtcccatggggttgtgaggtttcagcgagatgatgccttaaagcttttagcagggcttgcactccacaaataatggctgttgttcccaacttcacagtgtccctggggaagccacccatggtcactcgctgcccgaatctgcctcctggcttggccctgcccacctcttcagagggcatcttctaggttggttgggaatttggatggcatggtcgttgctaatgtgcctgctgggatggagcacttcctcctgtgagcccaggggacccgcctgtccctggagcttggggcaaggagggaagagtgataccaggaaggtggggctgcagccaggggccagagtcagttcagggagtggtcctcggccctcaaagctcctccggggactgctcaggagtgatggtgccctggagtttgccccaacttccctggccaccctggaaggtgcctggctgctccaggcctctaggctgggctgatgggtttctccaggacacaagtatcattaaagccaccctctcctcagcttgtcaggccgcacatgtgggacaggctgtgctcagcaaccccctcgcctgccctgccctccatcaggaggagccagtggaaccttcggaagctcccagcatctcagcagccctcagagtcgtcctggggcagctctggttctcctgactggaggtccatctgggctggcctgctctctctcggcctgagacaggagggcctggggtcaggaactggaagtggggaggctggggccgtggactctgaggccccacacctagccaaggagatgaccacacagctggctgccctgagtggtcagaggtggagggtggggagccactctctccattggcagaggttcctggggactgtctgctgagggcctggctgtccctccctctccctacccaccccttagcccgggcattgtttgggctctcttggggccagcaggctgcccaggccccagaggcatcaagttcgtgccctggaagaagccagcctgcccaagcctgggccagagtcccatgaggacaggtgtccctgcctgccagtgggctggaggggctgaattcccagcagggccctactgtgcaggggcatcctccgtcctggtgctggtctgagtcctcaaatgcatcctcccaggtgcctttgagatgggtgttcccattatcccaccttcgagacgaagatcctgagacctggaaacgttggtggcttgccatgcgccagagccgagagcccctcctgcatgccttcccctgtgctgggcctggctgcatgcgtctgtgttgcctgcacagacattttgcagggtgccctagtgattccagctgacagcacagagcctcaaacagacacatggaggggctgccccaggaccaggccgccaggacgcagccaacctcaaacctcatccttccccaccagctggagccagagggaccgcctcctgcccttgaggccatgtctgaacgggcagaatccttacagcctatcctgcttgtggactagcagagccagggctatagtgaccacagtgttttcctctcaccgcatggggccaaaacagtacagagcatgagtttggtaccccaagcctgagcagcgggtctacgctgatgccagggaggatccggaccgtgcttccgggggcccccaaccagcatggccttctcagcctggattctgtatgggttagaggcaaatgcttcatttttctgcacagtgtacacgttccttaataagcgaagtgtggggtgatttctaaaaggatttaaatggccctcatcagccacgtcctgctgagcttgctgggcaaactgtccttggaagaattcatcagaggtgccaagagcgacccctccatcgtccgcctgctgcagtgcgaccccagcagtgccagtcagttctgagcgagcggcccctggacagttgcagagaaacacaggcttgtcgtgccgtttaagctttgcttgcaagagtggatgccccgcaatcgttcctgctctcccgggccccgggcctggggcatgcgttgcacctgcccagcccggtggctgcgcctccctcctccacctgaccaacgcgacattcctcccctcacgcctggcccggtcccttccagggcaactcccagggatgtggtgacatgcagggttcaagtgttcttggttccaggcacctcccggctcacggggagctcagaggtccatgccgaggagaccaggcaggacctcccgaggctgcgccccggccggcccatgcgttttgtgatcccaagtgactctgtgggaagggtggggacgaggcgtcgggagggtatacagggagcccctcccgtgcatggctgcccccccgttcattttctccaccacagccgcttgcacgtatagatactgtggtcccctttcttttaatatataaattatgtatggtgaagtgga

SEQ ID NO: 9466 - DNA, 587 bp, Homo sapiens
  source 1..587: mol_type = unassigned DNA; mol_type = unassigned DNA
gctgagcgtgacctcgcggggcaagctggagcagaagctcaagtgggccttcagcatgtacgacctggacggcaacggctacatcagccgcagcgagatgctggagatcgtgcaggccatctacaagatggtgtcgtctgtgatgaagatgccggaggatgagtccaccccggagaagcgcacagacaagatcttcaggcagatggacaccaacaatgacgtgtccctggggaagccacccatggtcactcgctgcccgaatctgcctcctggcttggccctgcccacctcttcagagggcatcttctaggcaaactgtccttggaagaattcatcagaggtgccaagagcgacccctccatcgtccgcctgctgcagtgcgaccccagcagtgccagtcagttctgagcgagcggcccctggacagttgcagagaaacacaggcttgtcgtgccgtttaagctttgcttgcaagagtggatgccccgcaatcgttcctgctctcccgggccccgggcctggggcatgcgttgcacctgcccagcccggtggctgcgcctccctcctccacctgaccaacgcgacat

SEQ ID NO: 9467 - DNA, 1535 bp, Homo sapiens
  source 1..1535: mol_type = unassigned DNA; mol_type = unassigned DNA
tatgctgtgttcggggctgtctgtcggcgccacagggaatgggggctggggcatggtctagtggcccagtcaggacgcggaaacactccctggaggttctgacccactccctctcagcctccgcctggtctctggtgtagtcgccgccgccagccgccatgggcaaacagaacagcaagctgcggcccgaggtgctgcaggacctgcgggagaacacggagttcaccgaccacgagctgcaggagtggtacaagggcttcctcaaggactgccccaccggccacctgaccgtggacgagttcaagaagatctacgccaacttcttcccctacggcgacgcttccaagttcgccgagcacgtcttccgcaccttcgacaccaacggcgacggcaccatcgacttccgggagttcatcattgcgctgagcgtgacctcgcggggcaagctggagcagaagctcaagtgggccttcagcatgtacgacctggacggcaacggctacatcagccgcagcgagatgctggagatcgtgcaggccatctacaagatggtgtcgtctgtgatgaagatgccggaggatgagtccaccccggagaagcgcacagacaagatcttcaggcagatggacaccaacaatgacggcaaactgtccttggaagaattcatcagaggtgccaagagcgacccctccatcgtccgcctgctgcagtgcgaccccagcagtgccagtcagttctgagcgagcggcccctggacagttgcagagaaacacaggcttgtcgtgccgtttaagctttgcttgcaagagtggatgccccgcaatcgttcctgctctcccgggccccgggcctggggcatgcgttgcacctgcccagcccggtggctgcgcctccctcctccacctgaccaacgcgacattcctcccctcacgcctggcccggtcccttccagggcaactcccagggatgtggtgacatgcagggttcaagtgttcttggttccaggcacctcccggctcacggggagctcagaggtccatgccgaggagaccaggcaggacctcccgaggctgcgccccggccggcccatgcgttttgtgatcccaagtgactctgtgggaagggtggggacgaggcgtcgggagggtatacagggagcccctcccgtgcatggctgcccccccgttcattttctccaccacagccgcttgcacgtatagatactgtggtcccctttcttttaatatataaattatgtatggtgaagtggagtgtattgtgtaggtcccgtatttaatgcctctgactgcctttgaagcgcagccctctgtggcccgcagccccctgagcctggctgttgtgtggtatttatgctctctttgtctgcctgtttctaaggaaatgcatgtgtgccctgagccgtgatgatcctcccatccgtgttgtgagcacaggcatttgtgtctggtctgtcctccctgttgattggtctggcatttccggtattaaaatgataaaataaatggcattttctg

SEQ ID NO: 9468 - DNA, 1941 bp, Homo sapiens
  source 1..1941: mol_type = unassigned DNA; mol_type = unassigned DNA
actgatgtgtgtgtttactgagctttctccgcagcctgctccggcagctccaaaatggcatttcaggaattgaattaccgacatttcagtacttgcggaatccaggaatagattatttgattgtatctgttggaagtcattgccgtaactggcttcgttttcttcaccaacatctaaaccgagtggggagggaccgcaggagaatgctgtggtgacttgattttcccaaaagcacatctcccaagctggcggcagccgatggcgttgccctgtgactgggggaagcctgaggactcacggtcgcctcaggctggccaccttcgcactggaacctgcccatcacatcaaggagccctctcaggctgaaaaccctgtgccggggtggctgcagcaacacaaggattcccctccagctctgtgatgtggggagcagagggccactgagtcctgccatgggcatggtctagtggcccagtcaggacgcggaaacactccctggaggttctgacccactccctctcagcctccgcctggtctctggtgtagtcgccgccgccagccgccatgggcaaacagaacagcaagctgcggcccgaggtgctgcaggacctgcgggagaacacggagttcaccgaccacgagctgcaggagtggtacaagggcttcctcaaggactgccccaccggccacctgaccgtggacgagttcaagaagatctacgccaacttcttcccctacggcgacgcttccaagttcgccgagcacgtcttccgcaccttcgacaccaacggcgacggcaccatcgacttccgggagttcatcattgcgctgagcgtgacctcgcggggcaagctggagcagaagctcaagtgggccttcagcatgtacgacctggacggcaacggctacatcagccgcagcgagatgctggagatcgtgcaggccatctacaagatggtgtcgtctgtgatgaagatgccggaggatgagtccaccccggagaagcgcacagacaagatcttcaggcagatggacaccaacaatgacggcaaactgtccttggaagaattcatcagaggtgccaagagcgacccctccatcgtccgcctgctgcagtgcgaccccagcagtgccagtcagttctgagcgagcggcccctggacagttgcagagaaacacaggcttgtcgtgccgtttaagctttgcttgcaagagtggatgccccgcaatcgttcctgctctcccgggccccgggcctggggcatgcgttgcacctgcccagcccggtggctgcgcctccctcctccacctgaccaacgcgacattcctcccctcacgcctggcccggtcccttccagggcaactcccagggatgtggtgacatgcagggttcaagtgttcttggttccaggcacctcccggctcacggggagctcagaggtccatgccgaggagaccaggcaggacctcccgaggctgcgccccggccggcccatgcgttttgtgatcccaagtgactctgtgggaagggtggggacgaggcgtcgggagggtatacagggagcccctcccgtgcatggctgcccccccgttcattttctccaccacagccgcttgcacgtatagatactgtggtcccctttcttttaatatataaattatgtatggtgaagtggagtgtattgtgtaggtcccgtatttaatgcctctgactgcctttgaagcgcagccctctgtggcccgcagccccctgagcctggctgttgtgtggtatttatgctctctttgtctgcctgtttctaaggaaatgcatgtgtgccctgagccgtgatgatcctcccatccgtgttgtgagcacaggcatttgtgtctggtctgtcctccctgttgattggtctggcatttccggtattaaaatgataaaataaatggcattttctg

SEQ ID NO: 9469 - DNA, 1547 bp, Homo sapiens
  source 1..1547: mol_type = unassigned DNA; mol_type = unassigned DNA
ggtggtggccgcccttggggagctggcctctcagcacagcgccgggcaccggggctcaaggggcatggtctagtggcccagtcaggacgcggaaacactccctggaggttctgacccactccctctcagcctccgcctggtctctggtgtagtcgccgccgccagccgccatgggcaaacagaacagcaagctgcggcccgaggtgctgcaggacctgcgggagaacacggagttcaccgaccacgagctgcaggagtggtacaagggcttcctcaaggactgccccaccggccacctgaccgtggacgagttcaagaagatctacgccaacttcttcccctacggcgacgcttccaagttcgccgagcacgtcttccgcaccttcgacaccaacggcgacggcaccatcgacttccgggagttcatcattgcgctgagcgtgacctcgcggggcaagctggagcagaagctcaagtgggccttcagcatgtacgacctggacggcaacggctacatcagccgcagcgagatgctggagatcgtgcaggccatctacaagatggtgtcgtctgtgatgaagatgccggaggatgagtccaccccggagaagcgcacagacaagatcttcaggcagatggacaccaacaatgacggcaaactgtccttggaagaattcatcagaggtgccaagagcgacccctccatcgtccgcctgctgcagtgcgaccccagcagtgccagtcagttctgagcgagcggcccctggacagttgcagagaaacacaggcttgtcgtgccgtttaagctttgcttgcaagagtggatgccccgcaatcgttcctgctctcccgggccccgggcctggggcatgcgttgcacctgcccagcccggtggctgcgcctccctcctccacctgaccaacgcgacattcctcccctcacgcctggcccggtcccttccagggcaactcccagggatgtggtgacatgcagggttcaagtgttcttggttccaggcacctcccggctcacggggagctcagaggtccatgccgaggagaccaggcaggacctcccgaggctgcgccccggccggcccatgcgttttgtgatcccaagtgactctgtgggaagggtggggacgaggcgtcgggagggtatacagggagcccctcccgtgcatggctgcccccccgttcattttctccaccacagccgcttgcacgtatagatactgtggtcccctttcttttaatatataaattatgtatggtgaagtggagtgtattgtgtaggtcccgtatttaatgcctctgactgcctttgaagcgcagccctctgtggcccgcagccccctgagcctggctgttgtgtggtatttatgctctctttgtctgcctgtttctaaggaaatgcatgtgtgccctgagccgtgatgatcctcccatccgtgttgtgagcacaggcatttgtgtctggtctgtcctccctgttgattggtctggcatttccggtattaaaatgataaaataaatggcattttctg

SEQ ID NO: 9470 - DNA, 4856 bp, Homo sapiens
  source 1..4856: mol_type = unassigned DNA; mol_type = unassigned DNA
ccccagacttgtaagccgggggctgagcctcagggcaggggtgcagatgggggtgcagccctcccgcttcccggcgactccgggaaggtcagcgcgggcaggcggggcgcgctcctgcggccgggcctcgccggccacccggtccccacctgaaaccccgcctgccactccgctccagaggagccaatagccgtgcaacctgcccgggatggggcggggcttatgcaaatagtgtcgccttcgggaggcacatagtgatacaagagctggaaggcggctccggcgcagaccttggagagcacagctgccggcccgcgagccagcctcggttcccgcggcccgccgaggctcggagccatccagcgacccggcgaccggcctcaggccccgccatggggaagaccaacagcaagctggcccccgaggtgctggaggaccttgttcagaacactgagttcagcgagcaggagctgaagcagtggtacaagggcttcctgaaggactgccccagcggcatcctcaacctggaggagtttcagcagctctacatcaagttcttcccctacggcgacgcctccaagttcgcgcagcacgctttccgcaccttcgacaagaacggcgacggcaccatcgacttccgggagttcatctgcgccctgtcggtcacctcccgcggcagcttcgagcagaagctcaactgggcctttgagatgtacgacctggacggcgacgggcgcatcacgcgcctggagatgctggagatcatcgaggcaatctacaagatggtgggcaccgtgatcatgatgcgcatgaaccaggacgggctcacgccccagcagcgtgtggacaagatcttcaagaagatggaccaggataaggacgaccagattacattggaggagttcaaggaggcagccaagagtgacccatccattgtgttgctgctgcagtgtgacatgcagaagtagaagctggtgaggggcagggtccctggccagaaggggcatggccacctcccaacctgatgacctctctggctggcctcccaggaggagggacactccagcccccctctctggcccacccagtcctctgcccaagcccttcctcccctccatcaagatctttgagggaccacctcaccctgcaaaagagacaggtcctccagtaccctgtcttctagccccacctcccacttggccagaaccaatgtccattgggcataggggagttggcttttgccccaggaggtgaggttaaggagttgggggcctggggttctggttaggaattctcttgatcctgggattatgctttataggatgtggtcccacaggcctgtcacagggccaaattgggtctgtccattcctgaggctccagatcccataaagggggtctcttccccatcccttctactctacctggcccttccagccccagcctttggagcgttcattcagtcctttcttcagctaatgattactgagcacctgtttggtgctaaggatatggtcatttacaagacacatcttgtgccctctggaagctcatagggttgtgaggcaaacttccagccgtcagggtctcagctaagcagaaggtgctggaaggctggttagtctgggaggagctatttcatcttccagctcagctccacacaaagctgcagaaggacgaaatgaaaagcatttggaagtttaggagccacgtgagtgaaagttttaagaaaaatgaaatttatgtcatacttatttttttagtaccctttaaaggagctacagtcattttattatttcaggaggttaaaatatactctatattacttggtttcttataaaatgattaaatgaatagagaaaatattaattttcaaggggaaaaaacctgagaagaaagggagaaaagaccatgaaatttaccagataacactttttaagactaagtcctgagctgccactctcagcagtttttgctgcttcagctcttcctttttattacctttttcaattcaacaagcaactttctgctacatacttactccggttgggtgctgacttcagggacaggaaaaagcaaggtttgcaaagagtgaaactagtgtatattccgtatcttggtagttcgtttctggattgggtttagtttcagaactggacttgttccttcactgccacagaatcagaaagagctagaagaaaaggctcacctggccactgtttaggcacccagacataatttatggacgaaatgcctaaaaatgtgccaggcatgctctgtttgagaggctttttctaaccccaaatcttagatctgccaggtagttcaacatcttccaagtgtgctggttctgctttccaatgcctgcttcccaattttggatccatgagctatacagctgcatgctttgactgccggaaaaattaatcttgcttcttcatcaggtctttctcctgtacttgtgatcagaaattacctttgacgtgcagtgacagttgatttcctcttgaactgccggtgaaaacagtctagtacacaggtgctgtcagcccagggtgggagcaggaaatgattgctgagcccggggcaggggaattgcatctgcaggaaagagatgcagcatgctcctcactcctgagtgcccacctgtcctgcttctctgcaggtgaaaactctgggggatgctgatcaatagagcttggtcccaagctctactgggcccttggaggtagcaaggccactgggttgctatcctcttgctggggatagcaaccactggtttgcaaccactgggttgctatccttttgctatcctcttgctcatgaccagccatatggtgaggctggggagttcacatcctcaggcaggaactagcagttgtttatccagcaatgcctcaaggatgttgcattgctcccaggaactggctattaggtatgtcttgtgcggtcagtcagcatcacagacacatagatgctcaccagcctggcttagctgggacctaaatcttctggtgaaaagcttttcactaagtgaggttccttccctgcaaatgctgaatctagcctaattcgcaaccacacagaatttcatggctttcaaaggcttgccatgtgccccatctcattctatactcacatcccatggaggtgaggattttcacttcttttctctagacttggaagctgagattcagagaggaagcatcccttgtgcaagatcacatagtcaggaggtgacacagggctaagacttgaaccaaggctctaagaggatttcttcttttcagagtctcttccctgtccatttctgtgactaagctgtgcagaggttgacagcagggcaagttacattgatattcatcctttataggcttcctgctaaaaagcttctgagattgtggtcttccaaaaaaaataggagcttggttgaagtccccacattttcaagcactcagtgttctgcctctggcagctgtgctaacagctcagtgctgtcctgggagtcctctgactcagaaccctcgaagcatcctgcattgtctttacccaccatcatcttcactaagagaaacatgcctacccatgaaggcgtgtttgattactccaggcttctggacacacatacccatgggtgatttttgctcctcaggcccaatattctcagacagcccagcagtgtgaacacacaatgccaggccaggaactgggaccaccatcttgctgatggaaggaacaacaggtggcccaggacatgctcctgcatactcctgggtgtcccagggactgtgtgctcaggagcactgtggtagagcactggccctgccttgagaagagacacaggtctcccgtccctgcaccagctgagagagacttgccgcaaagcacaaggctggcagagatttatgtatgacttgcacagacacaaaaatatacagacaatcaaaacattgatatattcaaactctcctttaaattccaatcttattgcaacaactctgtgaattgcaaggtcccagaatctgccttctcacatactctaccctcattcatccttttgggctaattgatgagcatcttatttcttatctctaaaaattatcagcaaaggctacttcagatggccactttagtcctttcagctgtagtcaggattatttaacttacctgtatatcaaaagtgaagaaaaagttagttcataagtaaaggcactaaatcctttcctgacaatggcagagtctctagaggtagaaatttgccttgctgcagagagagaaggaatggcgtgggatgggggaaagaaaagaaagagaagaagctggggtctccaggcagggtagtaagctgacactaaatattttttacacaaaaatgtattgaagcaacaaatatttcctgaagatccaccctgggtgaggctttgagctgactttagagatcactgtggggtcaagaatgtcttacatgttttattcatcattcttgaaaaaagaaataattcaaaccttggaattaaaaagtcagaaaaatatgggattttctttctggaattttcgaggttttctttttacctttgccagagtgtgggggcaggactgggcctgccagggtgtatagcccttcctgcttggtggaggccagtcaggcccagggccttctaagcagcagtagaaaggaggcttggggaagtggggggtctgggtagcaggggaaggaggccagttccagtgtagccccctatcccctccagatgtgctgcttctggctgtgcactcagtgactgccctcactgctcaaccctgtgctgtgtggtgtgtttctttccccactgacagtgaataaaaggtgcaactgtg

SEQ ID NO: 9471 - DNA, 4436 bp, Homo sapiens
  source 1..4436: mol_type = unassigned DNA; mol_type = unassigned DNA
cgggatggggcggggcttatgcaaatagtgtcgccttcgggaggcacatagtgatacaagagctggaaggcggctccggcgcagaccttggagagcacagctgccggcccgcgagccagcctcggttcccgcggcccgccgaggctcggagccatccagcgacccggcgaccggcctcaggccccgccatggggaagaccaacagcaagctggcccccgaggtgctggaggaccttgttcagaacactgagttcagcgagcaggagctgaagcagtggtacaagggcttcctgaaggactgccccagcggcatcctcaacctggaggagtttcagcagctctacatcaaggcaatctacaagatggtgggcaccgtgatcatgatgcgcatgaaccaggacgggctcacgccccagcagcgtgtggacaagatcttcaagaagatggaccaggataaggacgaccagattacattggaggagttcaaggaggcagccaagagtgacccatccattgtgttgctgctgcagtgtgacatgcagaagtagaagctggtgaggggcagggtccctggccagaaggggcatggccacctcccaacctgatgacctctctggctggcctcccaggaggagggacactccagcccccctctctggcccacccagtcctctgcccaagcccttcctcccctccatcaagatctttgagggaccacctcaccctgcaaaagagacaggtcctccagtaccctgtcttctagccccacctcccacttggccagaaccaatgtccattgggcataggggagttggcttttgccccaggaggtgaggttaaggagttgggggcctggggttctggttaggaattctcttgatcctgggattatgctttataggatgtggtcccacaggcctgtcacagggccaaattgggtctgtccattcctgaggctccagatcccataaagggggtctcttccccatcccttctactctacctggcccttccagccccagcctttggagcgttcattcagtcctttcttcagctaatgattactgagcacctgtttggtgctaaggatatggtcatttacaagacacatcttgtgccctctggaagctcatagggttgtgaggcaaacttccagccgtcagggtctcagctaagcagaaggtgctggaaggctggttagtctgggaggagctatttcatcttccagctcagctccacacaaagctgcagaaggacgaaatgaaaagcatttggaagtttaggagccacgtgagtgaaagttttaagaaaaatgaaatttatgtcatacttatttttttagtaccctttaaaggagctacagtcattttattatttcaggaggttaaaatatactctatattacttggtttcttataaaatgattaaatgaatagagaaaatattaattttcaaggggaaaaaacctgagaagaaagggagaaaagaccatgaaatttaccagataacactttttaagactaagtcctgagctgccactctcagcagtttttgctgcttcagctcttcctttttattacctttttcaattcaacaagcaactttctgctacatacttactccggttgggtgctgacttcagggacaggaaaaagcaaggtttgcaaagagtgaaactagtgtatattccgtatcttggtagttcgtttctggattgggtttagtttcagaactggacttgttccttcactgccacagaatcagaaagagctagaagaaaaggctcacctggccactgtttaggcacccagacataatttatggacgaaatgcctaaaaatgtgccaggcatgctctgtttgagaggctttttctaaccccaaatcttagatctgccaggtagttcaacatcttccaagtgtgctggttctgctttccaatgcctgcttcccaattttggatccatgagctatacagctgcatgctttgactgccggaaaaattaatcttgcttcttcatcaggtctttctcctgtacttgtgatcagaaattacctttgacgtgcagtgacagttgatttcctcttgaactgccggtgaaaacagtctagtacacaggtgctgtcagcccagggtgggagcaggaaatgattgctgagcccggggcaggggaattgcatctgcaggaaagagatgcagcatgctcctcactcctgagtgcccacctgtcctgcttctctgcaggtgaaaactctgggggatgctgatcaatagagcttggtcccaagctctactgggcccttggaggtagcaaggccactgggttgctatcctcttgctggggatagcaaccactggtttgcaaccactgggttgctatccttttgctatcctcttgctcatgaccagccatatggtgaggctggggagttcacatcctcaggcaggaactagcagttgtttatccagcaatgcctcaaggatgttgcattgctcccaggaactggctattaggtatgtcttgtgcggtcagtcagcatcacagacacatagatgctcaccagcctggcttagctgggacctaaatcttctggtgaaaagcttttcactaagtgaggttccttccctgcaaatgctgaatctagcctaattcgcaaccacacagaatttcatggctttcaaaggcttgccatgtgccccatctcattctatactcacatcccatggaggtgaggattttcacttcttttctctagacttggaagctgagattcagagaggaagcatcccttgtgcaagatcacatagtcaggaggtgacacagggctaagacttgaaccaaggctctaagaggatttcttcttttcagagtctcttccctgtccatttctgtgactaagctgtgcagaggttgacagcagggcaagttacattgatattcatcctttataggcttcctgctaaaaagcttctgagattgtggtcttccaaaaaaaataggagcttggttgaagtccccacattttcaagcactcagtgttctgcctctggcagctgtgctaacagctcagtgctgtcctgggagtcctctgactcagaaccctcgaagcatcctgcattgtctttacccaccatcatcttcactaagagaaacatgcctacccatgaaggcgtgtttgattactccaggcttctggacacacatacccatgggtgatttttgctcctcaggcccaatattctcagacagcccagcagtgtgaacacacaatgccaggccaggaactgggaccaccatcttgctgatggaaggaacaacaggtggcccaggacatgctcctgcatactcctgggtgtcccagggactgtgtgctcaggagcactgtggtagagcactggccctgccttgagaagagacacaggtctcccgtccctgcaccagctgagagagacttgccgcaaagcacaaggctggcagagatttatgtatgacttgcacagacacaaaaatatacagacaatcaaaacattgatatattcaaactctcctttaaattccaatcttattgcaacaactctgtgaattgcaaggtcccagaatctgccttctcacatactctaccctcattcatccttttgggctaattgatgagcatcttatttcttatctctaaaaattatcagcaaaggctacttcagatggccactttagtcctttcagctgtagtcaggattatttaacttacctgtatatcaaaagtgaagaaaaagttagttcataagtaaaggcactaaatcctttcctgacaatggcagagtctctagaggtagaaatttgccttgctgcagagagagaaggaatggcgtgggatgggggaaagaaaagaaagagaagaagctggggtctccaggcagggtagtaagctgacactaaatattttttacacaaaaatgtattgaagcaacaaatatttcctgaagatccaccctgggtgaggctttgagctgactttagagatcactgtggggtcaagaatgtcttacatgttttattcatcattcttgaaaaaagaaataattcaaaccttggaattaaaaagtcagaaaaatatgggattttctttctggaattttcgaggttttctttttacctttgccagagtgtgggggcaggactgggcctgccagggtgtatagcccttcctgcttggtggaggccagtcaggcccagggccttctaagcagcagtagaaaggaggcttggggaagtggggggtctgggtagcaggggaaggaggccagttccagtgtagccccctatcccctccagatgtgctgcttctggctgtgcactcagtgactgccctcactgctcaaccctgtgctgtgtggtgtgtttctttccccactgacagtgaataaaaggtgcaactgtg

SEQ ID NO: 9472 - DNA, 4758 bp, Homo sapiens
  source 1..4758: mol_type = unassigned DNA; mol_type = unassigned DNA
cgggatggggcggggcttatgcaaatagtgtcgccttcgggaggcacatagtgatacaagagctggaaggcggctccggcgcagaccttggagagcacagctgccggcccgcgagccagcctcggttcccgcggcccgccgaggctcggagccatccagcgacccggcgaccggcctcaggcggcagcaactgaagagcccacccctgggcaggagaccccccacctcagtccaggcccatgggtgcagagaaggaggcagagccgcctacttatccccagctcaggccccgccatggggaagaccaacagcaagctggcccccgaggtgctggaggaccttgttcagaacactgagttcagcgagcaggagctgaagcagtggtacaagggcttcctgaaggactgccccagcggcatcctcaacctggaggagtttcagcagctctacatcaagttcttcccctacggcgacgcctccaagttcgcgcagcacgctttccgcaccttcgacaagaacggcgacggcaccatcgacttccgggagttcatctgcgccctgtcggtcacctcccgcggcagcttcgagcagaagctcaactgggcctttgagatgtacgacctggacggcgacgggcgcatcacgcgcctggagatgctggagatcatcgaggcaatctacaagatggtgggcaccgtgatcatgatgcgcatgaaccaggacgggctcacgccccagcagcgtgtggacaagatcttcaagaagatggaccaggataaggacgaccagattacattggaggagttcaaggaggcagccaagagtgacccatccattgtgttgctgctgcagtgtgacatgcagaagtagaagctggtgaggggcagggtccctggccagaaggggcatggccacctcccaacctgatgacctctctggctggcctcccaggaggagggacactccagcccccctctctggcccacccagtcctctgcccaagcccttcctcccctccatcaagatctttgagggaccacctcaccctgcaaaagagacaggtcctccagtaccctgtcttctagccccacctcccacttggccagaaccaatgtccattgggcataggggagttggcttttgccccaggaggtgaggttaaggagttgggggcctggggttctggttaggaattctcttgatcctgggattatgctttataggatgtggtcccacaggcctgtcacagggccaaattgggtctgtccattcctgaggctccagatcccataaagggggtctcttccccatcccttctactctacctggcccttccagccccagcctttggagcgttcattcagtcctttcttcagctaatgattactgagcacctgtttggtgctaaggatatggtcatttacaagacacatcttgtgccctctggaagctcatagggttgtgaggcaaacttccagccgtcagggtctcagctaagcagaaggtgctggaaggctggttagtctgggaggagctatttcatcttccagctcagctccacacaaagctgcagaaggacgaaatgaaaagcatttggaagtttaggagccacgtgagtgaaagttttaagaaaaatgaaatttatgtcatacttatttttttagtaccctttaaaggagctacagtcattttattatttcaggaggttaaaatatactctatattacttggtttcttataaaatgattaaatgaatagagaaaatattaattttcaaggggaaaaaacctgagaagaaagggagaaaagaccatgaaatttaccagataacactttttaagactaagtcctgagctgccactctcagcagtttttgctgcttcagctcttcctttttattacctttttcaattcaacaagcaactttctgctacatacttactccggttgggtgctgacttcagggacaggaaaaagcaaggtttgcaaagagtgaaactagtgtatattccgtatcttggtagttcgtttctggattgggtttagtttcagaactggacttgttccttcactgccacagaatcagaaagagctagaagaaaaggctcacctggccactgtttaggcacccagacataatttatggacgaaatgcctaaaaatgtgccaggcatgctctgtttgagaggctttttctaaccccaaatcttagatctgccaggtagttcaacatcttccaagtgtgctggttctgctttccaatgcctgcttcccaattttggatccatgagctatacagctgcatgctttgactgccggaaaaattaatcttgcttcttcatcaggtctttctcctgtacttgtgatcagaaattacctttgacgtgcagtgacagttgatttcctcttgaactgccggtgaaaacagtctagtacacaggtgctgtcagcccagggtgggagcaggaaatgattgctgagcccggggcaggggaattgcatctgcaggaaagagatgcagcatgctcctcactcctgagtgcccacctgtcctgcttctctgcaggtgaaaactctgggggatgctgatcaatagagcttggtcccaagctctactgggcccttggaggtagcaaggccactgggttgctatcctcttgctggggatagcaaccactggtttgcaaccactgggttgctatccttttgctatcctcttgctcatgaccagccatatggtgaggctggggagttcacatcctcaggcaggaactagcagttgtttatccagcaatgcctcaaggatgttgcattgctcccaggaactggctattaggtatgtcttgtgcggtcagtcagcatcacagacacatagatgctcaccagcctggcttagctgggacctaaatcttctggtgaaaagcttttcactaagtgaggttccttccctgcaaatgctgaatctagcctaattcgcaaccacacagaatttcatggctttcaaaggcttgccatgtgccccatctcattctatactcacatcccatggaggtgaggattttcacttcttttctctagacttggaagctgagattcagagaggaagcatcccttgtgcaagatcacatagtcaggaggtgacacagggctaagacttgaaccaaggctctaagaggatttcttcttttcagagtctcttccctgtccatttctgtgactaagctgtgcagaggttgacagcagggcaagttacattgatattcatcctttataggcttcctgctaaaaagcttctgagattgtggtcttccaaaaaaaataggagcttggttgaagtccccacattttcaagcactcagtgttctgcctctggcagctgtgctaacagctcagtgctgtcctgggagtcctctgactcagaaccctcgaagcatcctgcattgtctttacccaccatcatcttcactaagagaaacatgcctacccatgaaggcgtgtttgattactccaggcttctggacacacatacccatgggtgatttttgctcctcaggcccaatattctcagacagcccagcagtgtgaacacacaatgccaggccaggaactgggaccaccatcttgctgatggaaggaacaacaggtggcccaggacatgctcctgcatactcctgggtgtcccagggactgtgtgctcaggagcactgtggtagagcactggccctgccttgagaagagacacaggtctcccgtccctgcaccagctgagagagacttgccgcaaagcacaaggctggcagagatttatgtatgacttgcacagacacaaaaatatacagacaatcaaaacattgatatattcaaactctcctttaaattccaatcttattgcaacaactctgtgaattgcaaggtcccagaatctgccttctcacatactctaccctcattcatccttttgggctaattgatgagcatcttatttcttatctctaaaaattatcagcaaaggctacttcagatggccactttagtcctttcagctgtagtcaggattatttaacttacctgtatatcaaaagtgaagaaaaagttagttcataagtaaaggcactaaatcctttcctgacaatggcagagtctctagaggtagaaatttgccttgctgcagagagagaaggaatggcgtgggatgggggaaagaaaagaaagagaagaagctggggtctccaggcagggtagtaagctgacactaaatattttttacacaaaaatgtattgaagcaacaaatatttcctgaagatccaccctgggtgaggctttgagctgactttagagatcactgtggggtcaagaatgtcttacatgttttattcatcattcttgaaaaaagaaataattcaaaccttggaattaaaaagtcagaaaaatatgggattttctttctggaattttcgaggttttctttttacctttgccagagtgtgggggcaggactgggcctgccagggtgtatagcccttcctgcttggtggaggccagtcaggcccagggccttctaagcagcagtagaaaggaggcttggggaagtggggggtctgggtagcaggggaaggaggccagttccagtgtagccccctatcccctccagatgtgctgcttctggctgtgcactcagtgactgccctcactgctcaaccctgtgctgtgtggtgtgtttctttccccactgacagtgaataaaaggtgcaactgtg

SEQ ID NO: 9473 - DNA, 2363 bp, Homo sapiens
  source 1..2363: mol_type = unassigned DNA; mol_type = unassigned DNA
tcgagcccgctttccagggaccctacctgagggcccacaggtgaggcagcctggcctagcaggccccacgccaccgcctctgcctccaggccgcccgctgctgcggggccaccatgctcctgcccaggcctggagactgacccgaccccggcactacctcgaggctccgcccccacctgctggaccccagggtaaggacaagggcccccagactcacagttccagccctgaggacaggggttccctcatccccccacccagcctaatgcccacctcctaatagaggggttcctggggacctgaagagggggcactatgacgtccccccaagcacctaggtgttctgtcctgctcttccttcagactcagccgttggaccccagtcctttcctccccagacccaggagttccagccctcaggcccctcctccctcatactagggagtcctggcccccaaattcctcctttcccaagacttatgatttcaggtcctcagctgtctcctccctcaaaccgggatcctcagtcccctgctccaccaggctcaggcatgggggtccccatccctgcaaatccaggcgtccccccgctgctggtcagacactgaccccatccttgaacccagcccaatctgcgtccgtgatcacggcgtgctctggccaaggcccagtccctacagcctgcctggatggacgcctgggactgggggcgccaggactgggctgggctgggctcccccaggccctgcctccccgtccatctcctcacaggtcccaccctggcccaggaggtcagccagggaatcattaacaagaggcagtgacatggcgcagaaggagggtggccggactgtgccatgctgctccagacccaaggtggcagctctcactgcggggaccctgctacttctgacagccatcggggcggcatcctgggccattgtggctgttctcctcaggagtgaccaggagccgctgtacccagtgcaggtcagctctgcggacgctcggctcatggtctttgacaagacggaagggacgtggcggctgctgtgctcctcgcgctccaacgccagggtagccggactcagctgcgaggagatgggcttcctcagggcactgacccactccgagctggacgtgcgaacggcgggcgccaatggcacgtcgggcttcttctgtgtggacgaggggaggctgccccacacccagaggctgctggaggtcatctccgtgtgtgattgccccagaggccgtttcttggccgccatctgccaagactgtggccgcaggaagctgcccgtggaccgcatcgtgggaggccgggacaccagcttgggccggtggccgtggcaagtcagccttcgctatgatggagcacacctctgtgggggatccctgctctccggggactgggtgctgacagccgcccactgcttcccggagcggaaccgggtcctgtcccgatggcgagtgtttgccggtgccgtggcccaggcctctccccacggtctgcagctgggggtgcaggctgtggtctaccacgggggctatcttccctttcgggaccccaacagcgaggagaacagcaacgatattgccctggtccacctctccagtcccctgcccctcacagaatacatccagcctgtgtgcctcccagctgccggccaggccctggtggatggcaagatctgtaccgtgacgggctggggcaacacgcagtactatggccaacaggccggggtactccaggaggctcgagtccccataatcagcaatgatgtctgcaatggcgctgacttctatggaaaccagatcaagcccaagatgttctgtgctggctaccccgagggtggcattgatgcctgccagggcgacagcggtggtccctttgtgtgtgaggacagcatctctcggacgccacgttggcggctgtgtggcattgtgagttggggcactggctgtgccctggcccagaagccaggcgtctacaccaaagtcagtgacttccgggagtggatcttccaggccataaagactcactccgaagccagcggcatggtgacccagctctgaccggtggcttctcgctgcgcagcctccagggcccgaggtgatcccggtggtgggatccacgctgggcctaggatgggacgtttttcttcttgggcccggtccacaggtccaaggacaccctccctccagggtcctctcttccacagtggcgggcccactcagccccgagaccacccaacctcaccctcctgacccccatgtaaatattgttctgctgtctgggactcctgtctaggtgcccctgatgacgggatgctctttaaataataaagatggttttgatt

SEQ ID NO: 9474 - DNA, 1783 bp, Homo sapiens
  source 1..1783: mol_type = unassigned DNA; mol_type = unassigned DNA
tcgagcccgctttccagggaccctacctgagggcccacaggtgaggcagcctggcctagcaggccccacgccaccgcctctgcctccaggccgcccgctgctgcggggccaccatgctcctgcccaggcctggagactgacccgaccccggcactacctcgaggctccgcccccacctgctggaccccagggtcccaccctggcccaggaggtcagccagggaatcattaacaagaggcagtgacatggcgcagaaggagggtggccggactgtgccatgctgctccagacccaaggtggcagctctcactgcggggaccctgctacttctgacagccatcggggcggcatcctgggccattgtggctgttctcctcaggagtgaccaggagccgctgtacccagtgcaggtcagctctgcggacgctcggctcatggtctttgacaagacggaagggacgtggcggctgctgtgctcctcgcgctccaacgccagggtagccggactcagctgcgaggagatgggcttcctcagggcactgacccactccgagctggacgtgcgaacggcgggcgccaatggcacgtcgggcttcttctgtgtggacgaggggaggctgccccacacccagaggctgctggaggtcatctccgtgtgtgattgccccagaggccgtttcttggccgccatctgccaagactgtggccgcaggaagctgcccgtggaccgcatcgtgggaggccgggacaccagcttgggccggtggccgtggcaagtcagccttcgctatgatggagcacacctctgtgggggatccctgctctccggggactgggtgctgacagccgcccactgcttcccggagcggaaccgggtcctgtcccgatggcgagtgtttgccggtgccgtggcccaggcctctccccacggtctgcagctgggggtgcaggctgtggtctaccacgggggctatcttccctttcgggaccccaacagcgaggagaacagcaacgatattgccctggtccacctctccagtcccctgcccctcacagaatacatccagcctgtgtgcctcccagctgccggccaggccctggtggatggcaagatctgtaccgtgacgggctggggcaacacgcagtactatggccaacaggccggggtactccaggaggctcgagtccccataatcagcaatgatgtctgcaatggcgctgacttctatggaaaccagatcaagcccaagatgttctgtgctggctaccccgagggtggcattgatgcctgccagggcgacagcggtggtccctttgtgtgtgaggacagcatctctcggacgccacgttggcggctgtgtggcattgtgagttggggcactggctgtgccctggcccagaagccaggcgtctacaccaaagtcagtgacttccgggagtggatcttccaggccataaagactcactccgaagccagcggcatggtgacccagctctgaccggtggcttctcgctgcgcagcctccagggcccgaggtgatcccggtggtgggatccacgctgggcctaggatgggacgtttttcttcttgggcccggtccacaggtccaaggacaccctccctccagggtcctctcttccacagtggcgggcccactcagccccgagaccacccaacctcaccctcctgacccccatgtaaatattgttctgctgtctgggactcctgtctaggtgcccctgatgacgggatgctctttaaataataaagatggttttgatt

SEQ ID NO: 9475 - DNA, 564 bp, Homo sapiens
  source 1..564: mol_type = unassigned DNA; mol_type = unassigned DNA
acgccaccgcctctgcctccaggccgcccgctgctgcggggccaccatgctcctgcccaggcctggagactgacccgaccccggcactacctcgaggctccgcccccacctgctggaccccaggcccaatctgcgtccgtgatcacggcgtgctctggccaaggcccagtccctacagcctgcctggatggacgcctgggactgggggcgccaggactgggctgggctgggctcccccaggccctgcctccccgtccatctcctcacaggtcccaccctggcccaggaggtcagccagggaatcattaacaagaggcagtgacatggcgcagaaggagggtggccggactgtgccatgctgctccagacccaaggtggcagctctcactgcggggaccctgctacttctgacagccatcggggcggcatcctgggccattgtggctgttctcctcaggagtgaccaggagccgctgtacccagtgcaggtcagctctgcggacgctcggctcatggtctttgacaagacggaagggacgtggcggctgctgtgctcctcgcgct

SEQ ID NO: 9476 - DNA, 1212 bp, Homo sapiens
  source 1..1212: mol_type = unassigned DNA; mol_type = unassigned DNA
tccaggccgcccgctgctgcggggccaccatgctcctgcccaggcctggagactgacccgaccccggcactacctcgaggctccgcccccacctgctggaccccagggtcccaccctggcccaggaggtcagccagggaatcattaacaagaggcagtgacatggcgcagaaggaggtgcaggtcagctctgcggacgctcggctcatggtctttgacaagacggaagggacgtggcggctgctgtgctcctcgcgctccaacgccagggtagccggactcagctgcgaggagatgggcttcctcaggcggaaccgggtcctgtcccgatggcgagtgtttgccggtgccgtggcccaggcctctccccacggtctgcagctgggggtgcaggctgtggtctaccacgggggctatcttccctttcgggaccccaacagcgaggagaacagcaacgatattgccctggtccacctctccagtcccctgcccctcacagaatacatccagcctgtgtgcctcccagctgccggccaggccctggtggatggcaagatctgtaccgtgacgggctggggcaacacgcagtactatggccaacaggccggggtactccaggaggctcgagtccccataatcagcaatgatgtctgcaatggcgctgacttctatggaaaccagatcaagcccaagatgttctgtgctggctaccccgagggtggcattgatgcctgccagggcgacagcggtggtccctttgtgtgtgaggacagcatctctcggacgccacgttggcggctgtgtggcattgtgagttggggcactggctgtgccctggcccagaagccaggcgtctacaccaaagtcagtgacttccgggagtggatcttccaggccataaagactcactccgaagccagcggcatggtgacccagctctgaccggtggcttctcgctgcgcagcctccagggcccgaggtgatcccggtggtgggatccacgctgggcctaggatgggacgtttttcttcttgggcccggtccacaggtccaaggacaccctccctccagggtcctctcttccacagtggcgggcccactcagccccgagaccacccaacctcaccctcctgacccccatgtaaatattgttctgctgtctgggactcctgtctaggtgcccctgatgacgggatgctctttaaataataaa

SEQ ID NO: 9477 - DNA, 1828 bp, Homo sapiens
  source 1..1828: mol_type = unassigned DNA; mol_type = unassigned DNA
ccaggccgcccgctgctgcggggccaccatgctcctgcccaggcctggagactgacccgaccccggcactacctcgaggctccgcccccacctgctggaccccagggtcccaccctggcccaggaggtcagccagggaatcattaacaagaggcagtgacatggcgcagaaggaggtgcaggtcagctctgcggacgctcggctcatggtctttgacaagacggaagggacgtggcggctgctgtgctcctcgcgctccaacgccagggtagccggactcagctgcgaggagatgggcttcctcaggtactgggggccctcggaggggtgggagccgggaggggctggggagcaggcctaacccctgccccgcccagggcactgacccactccgagctggacgtgcgaacggcgggcgccaatggcacgtcgggcttcttctgtgtggacgaggggaggctgccccacacccagaggctgctggaggtcatctccgtgtgtgattgccccagaggccgtttcttggccgccatctgccaagactgtggccgcaggaagctgcccgtggaccgcatcgtgggaggccgggacaccagcttgggccggtggccgtggcaagtcagccttcgctatgatggagcacacctctgtgggggatccctgctctccggggactgggtgctgacagccgcccactgcttcccggagcggaaccgggtcctgtcccgatggcgagtgtttgccggtgccgtggcccaggcctctccccacggtctgcagctgggggtgcaggctgtggtctaccacgggggctatcttccctttcgggaccccaacagcgaggagaacagcaacgatattgccctggtccacctctccagtcccctgcccctcacagaatacatccagcctgtgtgcctcccagctgccggccaggccctggtggatggcaagatctgtaccgtgacgggctggggcaacacgcagtactatggccaacaggccggggtactccaggaggctcgagtccccataatcagcaatgatgtctgcaatggcgctgacttctatggaaaccagatcaagcccaagatgttctgtgctggctaccccgagggtggcattgatgcctgccagggcgacagcggtggtccctttgtgtgtgaggacagcatctctcggacgccacgttggcggctgtgtggcattgtgagttggggcactggctgtgccctggcccagaagccaggcgtctacaccaaagtcagtgacttccgggagtggatcttccaggccataaaggtgaaagttgggtccagatgggagccagggtggggacgtttgggtgtctaatgggggaagggaggcagagatttgttttaggaaacctacgctcaggcctagaagagggccccccttgggaacagatggactttgaagggttcctggggaagggaagccagtggtgggacgtggaagcctctcagacctcgggagcccccagctgtctttccccagactcactccgaagccagcggcatggtgacccagctctgaccggtggcttctcgctgcgcagcctccagggcccgaggtgatcccggtggtgggatccacgctgggcctaggatgggacgtttttcttcttgggcccggtccacaggtccaaggacaccctccctccagggtcctctcttccacagtggcgggcccactcagccccgagaccacccaacctcaccctcctgacccccatgtaaatattgttctgctgtctgggactcctgtctaggtgcccctgatgacgggatgctctttaaataataaa

SEQ ID NO: 9478 - DNA, 584 bp, Homo sapiens
  source 1..584: mol_type = unassigned DNA; mol_type = unassigned DNA
agcatggtgtctgttgcaggtggccggactgtgccatgctgctccagacccaaggtggcagctctcactgcggggaccctgctacttctgacagccatcggggcggcatcctgggccattggtgagagcggttcctgtgcctctgacctcccctggcccctgcagcctccagcctgcctgccctcacccctcccttctctgcagtggctgttctcctcaggagtgaccaggagccgctgtacccagtgcaggtcagctctgcggacgctcggctcatggtctttgacaagacggaagggacgtggcggctgctgtgctcctcgcgctccaacgccagggtagccggactcagctgcgaggagatgggcttcctcagggcactgacccactccgagctggacgtgcgaacggcgggcgccaatggcacgtcgggcttcttctgtgtggacgaggggaggctgccccacacccagaggctgctggaggtcatctccgtgtggtgaggagggcagcgggcaggtggggcaacacctcagacccccaaggcactccctctccccgttttccttccacctgtcttaact

SEQ ID NO: 9479 - DNA, 1820 bp, Homo sapiens
  source 1..1820: mol_type = unassigned DNA; mol_type = unassigned DNA
agcatggtgtctgttgcaggtggccggactgtgccatgctgctccagacccaaggtggcagctctcactgcggggaccctgctacttctgacagccatcggggcggcatcctgggccattgtggctgttctcctcaggagtgaccaggagccgctgtacccagatgtgcaaaatgaggaccagagaggacatgcagctggggaacgaggggccaggaacagctcttagacttatccacttgcaggtcagctctgcggacgctcggctcatggtctttgacaagacggaagggacgtggcggctgctgtgctcctcgcgctccaacgccagggtagccggactcagctgcgaggagatgggcttcctcagggcactgacccactccgagctggacgtgcgaacggcgggcgccaatggcacgtcgggcttcttctgtgtggacgaggggaggctgccccacacccagaggctgctggaggtcatctccgtgtgtgattgccccagaggccgtttcttggccgccatctgccaagactgtggccgcaggaagctgcccgtggaccgcatcgtgggaggccgggacaccagcttgggccggtggccgtggcaagtcagccttcgctatgatggagcacacctctgtgggggatccctgctctccggggactgggtgctgacagccgcccactgcttcccggagcggaaccgggtcctgtcccgatggcgagtgtttgccggtgccgtggcccaggcctctccccacggtctgcagctgggggtgcaggctgtggtctaccacgggggctatcttccctttcgggaccccaacagcgaggagaacagcaacgatattgccctggtccacctctccagtcccctgcccctcacagaatacatccagcctgtgtgcctcccagctgccggccaggccctggtggatggcaagatctgtaccgtgacgggctggggcaacacgcagtactatggccaacaggccggggtactccaggaggctcgagtccccataatcagcaatgatgtctgcaatggcgctgacttctatggaaaccagatcaagcccaagatgttctgtgctggctaccccgagggtggcattgatgcctgccagggcgacagcggtggtccctttgtgtgtgaggacagcatctctcggacgccacgttggcggctgtgtggcattgtgagttggggcactggctgtgccctggcccagaagccaggcgtctacaccaaagtcagtgacttccgggagtggatcttccaggccataaaggtgaaagttgggtccagatgggagccagggtggggacgtttgggtgtctaatgggggaagggaggcagagatttgttttaggaaacctacgctcaggcctagaagagggccccccttgggaacagatggactttgaagggttcctggggaagggaagccagtggtgggacgtggaagcctctcagacctcgggagcccccagctgtctttccccagactcactccgaagccagcggcatggtgacccagctctgaccggtggcttctcgctgcgcagcctccagggcccgaggtgatcccggtggtgggatccacgctgggcctaggatgggacgtttttcttcttgggcccggtccacaggtccaaggacaccctccctccagggtcctctcttccacagtggcgggcccactcagccccgagaccacccaacctcaccctcctgacccccatgtaaatattgttctgctgtctgggactcctgtctaggtgcccctgatgacgggatgctctttaaataataaa

SEQ ID NO: 9480 - DNA, 2175 bp, Homo sapiens
  source 1..2175: mol_type = unassigned DNA; mol_type = unassigned DNA
agacccaaggtggcagctctcactgcggggaccctgctacttctgacagccatcggggcggcatcctgggccattggtgagagcggttcctgtgcctctgacctcccctggcccctgcagcctccagcctgcctgccctcacccctcccttctctgcagtggctgttctcctcaggagtgaccaggagccgctgtacccagtgcaggtcagctctgcggacgctcggctcatggtctttgacaagacggaagggacgtggcggctgctgtgctcctcgcgctccaacgccagggtagccggactcagctgcgaggagatgggcttcctcaggtactgggggccctcggaggggtgggagccgggaggggctggggagcaggcctaacccctgccccgcccagggcactgacccactccgagctggacgtgcgaacggcgggcgccaatggcacgtcgggcttcttctgtgtggacgaggggaggctgccccacacccagaggctgctggaggtcatctccgtgtggtgaggagggcagcgggcaggtggggcaacacctcagacccccaaggcactccctctccccgttttccttccacctgtcttaactggtctctatttcctttctttctgtgtctccaatcccatctctcccagtgattgccccagaggccgtttcttggccgccatctgccaaggtgagatcctaaaactcagaaccctctcctttaggcccttggggaggccacgtcccctcaagctccccaggatggggccatgtactttcagaccccctagggcagggccaagcctgggctctggggacctgggctccagtcccctgtcgccgccccctgctgacccttgtcccacagactgtggccgcaggaagctgcccgtggaccgcatcgtgggaggccgggacaccagcttgggccggtggccgtggcaagtcagccttcgctatgatggagcacacctctgtgggggatccctgctctccggggactgggtgctgacagccgcccactgcttcccggagcggaaccgggtcctgtcccgatggcgagtgtttgccggtgccgtggcccaggcctctccccacggtctgcagctgggggtgcaggctgtggtctaccacgggggctatcttccctttcgggaccccaacagcgaggagaacagcaacgatattgccctggtccacctctccagtcccctgcccctcacagaatacatccagcctgtgtgcctcccagctgccggccaggccctggtggatggcaagatctgtaccgtgacgggctggggcaacacgcagtactatggccaacaggccggggtactccaggaggctcgagtccccataatcagcaatgatgtctgcaatggcgctgacttctatggaaaccagatcaagcccaagatgttctgtgctggctaccccgagggtggcattgatgcctgccagggcgacagcggtggtccctttgtgtgtgaggacagcatctctcggacgccacgttggcggctgtgtggcattgtgagttggggcactggctgtgccctggcccagaagccaggcgtctacaccaaagtcagtgacttccgggagtggatcttccaggccataaaggtgaaagttgggtccagatgggagccagggtggggacgtttgggtgtctaatgggggaagggaggcagagatttgttttaggaaacctacgctcaggcctagaagagggccccccttgggaacagatggactttgaagggttcctggggaagggaagccagtggtgggacgtggaagcctctcagacctcgggagcccccagctgtctttccccagactcactccgaagccagcggcatggtgacccagctctgaccggtggcttctcgctgcgcagcctccagggcccgaggtgatcccggtggtgggatccacgctgggcctaggatgggacgtttttcttcttgggcccggtccacaggtccaaggacaccctccctccagggtcctctcttccacagtggcgggcccactcagccccgagaccacccaacctcaccctcctgacccccatgtaaatattgttctgctgtctgggactcctgtctaggtgcccctgatgacgggatgctctttaaataataaagatggttttgatt

SEQ ID NO: 9481 - DNA, 551 bp, Homo sapiens
  source 1..551: mol_type = unassigned DNA; mol_type = unassigned DNA
gattggtccgacctgagtccttgagtctggcagagtgccatggtgctctgtaatcccacctgtaatcccagcattttaggaggcagaggcaggaagattgcttgagcctaggagttcaagaccagcctgggcaacatagcaagacccgtctctacaaaacaaaacaaaacaaaacaaacaaacaaaaaaattagtcaggtgtggtggtgcacgcctgtggtcctagctactcaggaggttgagtgcaggtcagctctgcggacgctcggctcatggtctttgacaagacggaagggacgtggcggctgctgtgctcctcgcgctccaacgccagggtagccggactcagctgcgaggagatgggcttcctcaggtactgggggccctcggaggggtgggagccgggaggggctggggagcaggcctaacccctgccccgcccagggcactgacccactccgagctggacgtgcgaacggcgggcgccaatggcacgtcgggcttcttctgtgtggacgaggggaggctgccccacacccagaggctgctgg

SEQ ID NO: 9482 - DNA, 2295 bp, Homo sapiens
  source 1..2295: mol_type = unassigned DNA; mol_type = unassigned DNA
aaggacaattagtcactagcgagacccagtaggaagagaggtttaaatcagagggattgaatgagggtgctttgtgccttccctgaagccatgccctccagcaactcccgcccccccgcgtgcctagccccgggggctctctacttggctctgttgctccatctctccctttcctcccaggctggagacaggagacccttgcctgtagacagagctgcaggtttgaaggaaaagaccctgattctacttgatgtgagcaccaagaacccagtcaggacagtcaatgagaacttcctctctctgcagctggatccgtccatcattcatgatggctggctcgatttcctaagctccaagcgcttggtgaccctggcccggggactttcgcccgcctttctgcgcttcgggggcaaaaggaccgacttcctgcagttccagaacctgaggaacccggcgaaaagccgcgggggcccgggcccggattactatctcaaaaactatgaggatgacattgttcgaagtgatgttgccttagataaacagaaaggctgcaagattgcccagcaccctgatgttatgctggagctccaaagggagaaggcagctcagatgcatctggttcttctaaaggagcaattctccaatacttacagtaatctcatattaacagccaggtctctagacaaactttataactttgctgattgctctggactccacctgatatttgctctaaatgcactgcgtcgtaatcccaataactcctggaacagttctagtgccctgagtctgttgaagtacagcgccagcaaaaagtacaacatttcttgggaactgggtaatgagccaaataactatcggaccatgcatggccgggcagtaaatggcagccagttgggaaaggattacatccagctgaagagcctgttgcagcccatccggatttattccagagccagcttatatggccctaatattgggcggccgaggaagaatgtcatcgccctcctagatggattcatgaaggtggcaggaagtacagtagatgcagttacctggcaacattgctacattgatggccgggtggtcaaggtgatggacttcctgaaaactcgcctgttagacacactctctgaccagattaggaaaattcagaaagtggttaatacatacactccaggaaagaagatttggcttgaaggtgtggtgaccacctcagctggaggcacaaacaatctatccgattcctatgctgcaggattcttatggttgaacactttaggaatgctggccaatcagggcattgatgtcgtgatacggcactcattttttgaccatggatacaatcacctcgtggaccagaattttaacccattaccagactactggctctctctcctctacaagcgcctgatcggccccaaagtcttggctgtgcatgtggctgggctccagcggaagccacggcctggccgagtgatccgggacaaactaaggatttatgctcactgcacaaaccaccacaaccacaactacgttcgtgggtccattacactttttatcatcaacttgcatcgatcaagaaagaaaatcaagctggctgggactctcagagacaagctggttcaccagtacctgctgcagccctatgggcaggagggcctaaagtccaagtcagtgcaactgaatggccagcccttagtgatggtggacgacgggaccctcccagaattgaagccccgcccccttcgggccggccggacattggtcatccctccagtcaccatgggcttttatgtggtcaagaatgtcaatgctttggcctgccgctaccgataagctatcctcacactcacggctaccagtgggcctgctgggctgcttccactcctccactccagtagtatcctctgttttcagacatcctagcaaccagcccctgctgccccatcctgctggaatcaacacagacttgctctccaaagagactaaatgtcatagcgtgatcttagcctaggtaggccacatccatcccaaaggaaaatgtagacatcacctgtacctatataaggataaaggcatgtgtatagagcagaatgtttcccttcatgtgcactatgaaaacgagctgacagcacactcccaggagaaatgtttccagacaactccccatgatcctgtcacacagcattataaccacaaatccaaaccttagcctgctgctgctgctgccctcagaggaagatgaggaaggaaaaaaactgggtggacctacaaaaacccatcctctcccaa

SEQ ID NO: 9483 - DNA, 2121 bp, Homo sapiens
  source 1..2121: mol_type = unassigned DNA; mol_type = unassigned DNA
aaggacaattagtcactagcgagacccagtaggaagagaggtttaaatcagagggattgaatgagggtgctttgtgccttccctgaagccatgccctccagcaactcccgcccccccgcgtgcctagccccgggggctctctacttggctctgttgctccatctctccctttcctcccaggctggagacaggagacccttgcctgtagacagagctgcaggtttgaaggaaaagaccctgattctacttgatgtgagcaccaagaacccagtcaggacagtcaatgagaacttcctctctctgcagctggatccgtccatcattcatgatggctggctcgatttcctaagctccaagcgcttggtgaccctggcccggggactttcgcccgcctttctgcgcttcgggggcaaaaggaccgacttcctgcagttccagaacctgaggaacccggcgaaaagccgcgggggcccgggcccggattactatctcaaaaactatgaggatgacattgttcgaagtgatgttgccttagataaacagaaaggctgcaagattgcccagcaccctgatgttatgctggagctccaaagggagaaggcagctcagatgcatctggttcttctaaaggagcaattctccaatacttacagtaatctcatattaacagagccaaataactatcggaccatgcatggccgggcagtaaatggcagccagttgggaaaggattacatccagctgaagagcctgttgcagcccatccggatttattccagagccagcttatatggccctaatattgggcggccgaggaagaatgtcatcgccctcctagatggattcatgaaggtggcaggaagtacagtagatgcagttacctggcaacattgctacattgatggccgggtggtcaaggtgatggacttcctgaaaactcgcctgttagacacactctctgaccagattaggaaaattcagaaagtggttaatacatacactccaggaaagaagatttggcttgaaggtgtggtgaccacctcagctggaggcacaaacaatctatccgattcctatgctgcaggattcttatggttgaacactttaggaatgctggccaatcagggcattgatgtcgtgatacggcactcattttttgaccatggatacaatcacctcgtggaccagaattttaacccattaccagactactggctctctctcctctacaagcgcctgatcggccccaaagtcttggctgtgcatgtggctgggctccagcggaagccacggcctggccgagtgatccgggacaaactaaggatttatgctcactgcacaaaccaccacaaccacaactacgttcgtgggtccattacactttttatcatcaacttgcatcgatcaagaaagaaaatcaagctggctgggactctcagagacaagctggttcaccagtacctgctgcagccctatgggcaggagggcctaaagtccaagtcagtgcaactgaatggccagcccttagtgatggtggacgacgggaccctcccagaattgaagccccgcccccttcgggccggccggacattggtcatccctccagtcaccatgggcttttatgtggtcaagaatgtcaatgctttggcctgccgctaccgataagctatcctcacactcacggctaccagtgggcctgctgggctgcttccactcctccactccagtagtatcctctgttttcagacatcctagcaaccagcccctgctgccccatcctgctggaatcaacacagacttgctctccaaagagactaaatgtcatagcgtgatcttagcctaggtaggccacatccatcccaaaggaaaatgtagacatcacctgtacctatataaggataaaggcatgtgtatagagcagaatgtttcccttcatgtgcactatgaaaacgagctgacagcacactcccaggagaaatgtttccagacaactccccatgatcctgtcacacagcattataaccacaaatccaaaccttagcctgctgctgctgctgccctcagaggaagatgaggaaggaaaaaaactgggtggacctacaaaaacccatcctctcccaa

SEQ ID NO: 9484 - DNA, 1760 bp, Homo sapiens
  source 1..1760: mol_type = unassigned DNA; mol_type = unassigned DNA
aaggacaattagtcactagcgagacccagtaggaagagaggtttaaatcagagggattgaatgagggtgctttgtgccttccctgaagccatgccctccagcaactcccgcccccccgcgtgcctagccccgggggctctctacttggctctgttgctccatctctccctttcctcccaggctggagacaggagacccttgcctgtagacagagctgcaggtttgaaggaaaagaccctgattctacttgatgtgagcaccaagaacccagtcaggacagtcaatgagaacttcctctctctgcagctggatccgtccatcattcatgatggctggctcgatttcctaagctccaagcgcttggtgaccctggcccggggactttcgcccgcctttctgcgcttcgggggcaaaaggaccgacttcctgcagttccagaacctgaggaacccggcgaaaagccgcgggggcccgggcccggattactatctcaaaaactatgaggatgagccaaataactatcggaccatgcatggccgggcagtaaatggcagccagttgggaaaggattacatccagctgaagagcctgttgcagcccatccggatttattccagagccagcttatatggccctaatattgggcggccgaggaagaatgtcatcgccctcctagatggattcatgaaggtggcaggaagtacagtagatgcagttacctggcaacattgctacattgatggccgggtggtcaaggtgatggacttcctgaaaactcgcctgttagacacactctctgaccagattaggaaaattcagaaagtggttaatacatacactccaggaaagaagatttggcttgaaggtgtggtgaccacctcagctggaggcacaaacaatctatccgattcctatgctgcaggattcttatggttgaacactttaggaatgctggccaatcagggcattgatgtcgtgatacggcactcattttttgaccatggatacaatcacctcgtggaccagaattttaacccattaccagactactggctctctctcctctacaagcgcctgatcggccccaaagtcttggctgtgcatgtggctgggctccagcggaagccacggcctggccgagtgatccgggacaaactaaggatttatgctcactgcacaaaccaccacaaccacaactacgttcgtgggtccattacactttttatcatcaacttgcatcgatcaagaaagaaaatcaagctggctgggactctcagagacaagctggttcaccagtacctgctgcagccctatgggcaggagggcctaaagtccaagtcagtgcaactgaatggccagcccttagtgatggtggacgacgggaccctcccagaattgaagccccgcccccttcgggccggccggacattggtcatccctccagtcaccatgggcttttatgtggtcaagaatgtcaatgctttggcctgccgctaccgataagctatcctcacactcacggctaccagtgggcctgctgggctgcttccactcctccactccagtagtatcctctgttttcagacatcctagcaaccagcccctgctgccccatcctgctggaatcaacacagacttgctctccaaagagactaaatgtcatagcgtgatcttagcctaggtaggccacatccatcccaaaggaaaatgtagacatcacctgtacctatataaggataaaggcatgtgtatagagcaga

SEQ ID NO: 9485 - DNA, 1849 bp, Homo sapiens
  source 1..1849: mol_type = unassigned DNA
atgagggtgctttgtgccttccctgaagccatgccctccagcaactcccgcccccccgcgtgcctagccccgggggctctctacttggctctgttgctccatctctccctttcctcccaggctggagacaggagacccttgcctgtagacagagctgcaggtttgaaggaaaagaccctgattctacttgatgtgagcaccaagaacccagtcaggacagtcaatgagaacttcctctctctgcagctggatccgtccatcattcatgatggctggctcgatttcctaagctccaagcgcttggtgaccctggcccggggactttcgcccgcctttctgcgcttcgggggcaaaaggaccgacttcctgcagttccagaacctgaggaacccggcgaaaagccgcgggggcccgggcccggattactatctcaaaaactatgaggatgacattgttcgaagtgatgttgccttagataaacagaaaggctgcaagattgcccagcaccctgatgttatgctggagctccaaagggagaaggcagctcagatgcatctggttcttctaaaggagcaattctccaatacttacagtaatctcatattaacagccaggtctctagacaaactttataactttgctgattgctctggactccacctgatatttgctctaaatgcactgcgtcgtaatcccaataactcctggaacagttctagtgccctgagtctgttgaagtacagcgccagcaaaaagtacaacatttcttgggaactgggtaatgagccaaataactatcggaccatgcatggccgggcagtaaatggcagccagttgggaaaggattacatccagctgaagagcctgttgcagcccatccggatttattccagagccagcttatatggccctaatattgggcggccgaggaagaatgtcatcgccctcctagatggattcatgaaggtggcaggaagtacagtagatgcagttacctggcaacattgctacattgatggccgggtggtcaaggtgatggacttcctgaaaactcgcctgttagacacactctctgaccagattaggaaaattcagaaagtggttaatacatacactccaggaaagaagatttggcttgaaggtgtggtgaccacctcagctggaggcacaaacaatctatccgattcctatgctgcaggattcttatggttgaacactttaggaatgctggccaatcagggcattgatgtcgtgatacggcactcattttttgaccatggatacaatcacctcgtggaccagaattttaacccattaccagactactggctctctctcctctacaagcgcctgatcggccccaaagtcttggctgtgcatgtggctgggctccagcggaagccacggcctggccgagtgatccgggacaaactaaggatttatgctcactgcacaaaccaccacaaccacaactacgttcgtgggtccattacactttttatcatcaacttgcatcgatcaagaaagaaaatcaagctggctgggactctcagagacaagctggttcaccagtacctgctgcagccctatgggcaggagggcctaaagtccaaaacccaaagatgtcaatactgtgggatcatctgaatctaaaagggcattacctaattcttcagaagaaaggtcagtgcaactgaatggccagcccttagtgatggtggacgacgggaccctcccagaattgaagccccgcccccttcgggccggccggacattggtcatccctccagtcaccatgggcttttatgtggtcaagaatgtcaatgctttggcctgccgctaccgataa

SEQ ID NO: 9486 - DNA, 3681 bp, Homo sapiens
  source 1..3681: mol_type = unassigned DNA
tctgcttcttcccagccaggtctctagacaaactttataactttgctgattgctctggactccacctgatatttgctctaaatgcactgcgtcgtaatcccaataactcctggaacagttctagtgccctgagtctgttgaagtacagcgccagcaaaaagtacaacatttcttgggaactgggtaatgagccaaataactatcggaccatgcatggccgggcagtaaatggcagccagttgggaaaggattacatccagctgaagagcctgttgcagcccatccggatttattccagagccagcttatatggccctaatattgggcggccgaggaagaatgtcatcgccctcctagatggattcatgaaggtggcaggaagtacagtagatgcagttacctggcaacattgctacattgatggccgggtggtcaaggtgatggacttcctgaaaactcgcctgttagacacactctctgaccagattaggaaaattcagaaagtggttaatacatacactccaggaaagaagatttggcttgaaggtgtggtgaccacctcagctggaggcacaaacaatctatccgattcctatgctgcaggattcttatggttgaacactttaggaatgctggccaatcagggcattgatgtcgtgatacggcactcattttttgaccatggatacaatcacctcgtggaccagaattttaacccattaccagactactggctctctctcctctacaagcgcctgatcggccccaaagtcttggctgtgcatgtggctgggctccagcggaagccacggcctggccgagtgatccgggacaaactaaggatttatgctcactgcacaaaccaccacaaccacaactacgttcgtgggtccattacactttttatcatcaacttgcatcgatcaagaaagaaaatcaagctggctgggactctcagagacaagctggttcaccagtacctgctgcagccctatgggcaggagggcctaaagtccaagtcagtgcaactgaatggccagcccttagtgatggtggacgacgggaccctcccagaattgaagccccgcccccttcgggccggccggacattggtcatccctccagtcaccatgggcttttatgtggtcaagaatgtcaatgctttggcctgccgctaccgataagctatcctcacactcacggctaccagtgggcctgctgggctgcttccactcctccactccagtagtatcctctgttttcagacatcctagcaaccagcccctgctgccccatcctgctggaatcaacacagacttgctctccaaagagactaaatgtcatagcgtgatcttagcctaggtaggccacatccatcccaaaggaaaatgtagacatcacctgtacctatataaggataaaggcatgtgtatagagcagaatgtttcccttcatgtgcactatgaaaacgagctgacagcacactcccaggagaaatgtttccagacaactccccatgatcctgtcacacagcattataaccacaaatccaaaccttagcctgctgctgctgctgccctcagaggaagatgaggaaggaaaaaaactgggtggacctacaaaaacccatcctctcccaactccttcttctctgcctctttcttgctgctgccctgagttttttgacacatctctttccataggggagtaatgggtgtgtcagccctggcctgctgggagagctgtttgtatgatttcccggctgatgtatgagcgtgcgcatctgggttcctgacagtggcatccatcactggcagttcttctgggaagcgggtgcttcaaaagtaaaattacaatcacactccagatttggtaagaaggttctattcctctgtgaatccagattcccccagagttgtaatgggagtcaagtaacaatattcattgagtggagagcagtttattaggcacaacaaaaagtagtcatcattcttcatgttgctatgagggagagtttgagtacaaagagaaagcatactgaaacatcaggtacacacacacaccccaactggacaaagcaaattagacctctccaaaattaagagaatattaggggctctatagggtaagcccttaattgtttggttaactcaaatcattatttttaaaaaagaagaaaaaagtgtgaatcaaggtcatcactggaagacacaactgaatctaacctttttgcctcttcccaagtagcctatttgagctagaacaaaactttgttagccattttgggagagaatagggaatctagagaatgaagatctggccaaaactatggaatggtaggtaggaagcttctgagttgggcaggtgtgaagtgggggatgaggacgttctatatgattcaaggggcatgagggtctttgccaatgagctacagctgaaatgactttcttttctgtggatgtgattttctttctcaggataaatgacaggaatgatgcttttgttagaaggaggagagatttgacactgttccaagtgagacggtgatacaatttctgctgtttgtgaaaggacaggaatggggcgggggcaaggcagggttgcctagggcagagactagggaggctgcctaagacgcacacggagttaaggatttgggccaagtctgcaaagtgagagatggaagggagattagaccaaagaggagggagagaattctgagcttggagaacggtggatttgggagagggaagctgactacctaattccaggaagcgaggggaccgggttttgacatgcttatcattaagcacaggaggaacagcatacagcagatgtactacagcgagcaagaaagggagagcccgaggaccaggctgcaccaggtcagtggctgtgctcagcatggaagcaactggagagagaggggcagaccctgagaccgccctgcaaggctgcccagaagggacccgtttctctgggaccaggcacctcccactgaggcttcagctctgagagggcaggaaagtgaagtaccaagatgggggcggggcggggggtaggaaataagagaaagaagaaacagattgacaggccaaagtgaggaaaagagaggaaaagagaaatgagactaaaaggtcgttcccccaactgttaaaaatgtgtgcagatatcaacgtctcttctacatactggtacaggtgcgactgcagggccccctgatataacaagagtaaccaaaggtccctaagagcctggccctggggacctatggtttgctttgcgtccttagtaaccccatgataaaggggtactactgttatccccatttttcctacgaggcatggagaggatccatggctcgcccaggggcacccggggaaatgggttgccgagcgcgaaataatccagagcctgcccactcagccacaaggctcagcggctccacaggtccagacacctccttcacatctttgtaggttctgctcattcagaacagccagaactccactcaaacacactttctgtaaataagtgttgatttttttttactaaaccttgcagaatatgggtaattcctgcttcttttatctttctctgtgtattaaatgctgctctcacgagatttaagttttgtttattttttagttaataaaaggaagagggaattactgaaattta

SEQ ID NO: 9487 - DNA, 447 bp, Homo sapiens
  source 1..447: mol_type = unassigned DNA
atgagggtgctttgtgccttccctgaagccatgccctccagcaactcccgcccccccgcgtgcctagccccgggggctctctacttggctctgttgctccatctctccctttcctcccaggctggagacaggagacccttgcctgtagacagagctgcaggtttgaaggaaaagaccctgattctacttgatgtgagcaccaagaacccagtcaggacagtcaatgagaacttcctctctctgcagctggatccgtccatcattcatgatggctggctcgatttcctaagctccaagcgcttggtgaccctggcccggggactttcgcccgcctttctgcgcttcgggggcaaaaggaccgacttcctgcagttccagaacctgaggaacccggcgaaaagccgcgggggcccgggcccggattactatctcaaaaactatgaggat

SEQ ID NO: 9488 - DNA, 1066 bp, Homo sapiens
  source 1..1066: mol_type = unassigned DNA
cgggcgggcgggcgggcgaagctgggctcggggccaagcgaggtctagccggagcgactgtgccccgcctcctgggcggagcgggcggctccccatggtcagagcctcgtgccggctcggcagcgcccggacgccgagcccagcgcgtcggccccccggcgtgcgggcgtctcagagccgcggaggggccgccgggaccgtttcagcgtggcggcgctggtgctggcgttggccctggaggacggccccgagtgatggctggcgcctgcctcccgggtgtctcccgggtacagatggagtcgtcccgcggccgccggcggcaaggtcggcagctgcgaggccaagagagaccccaggacacacacagctgcctcccggtgcgagaagaagaccccggcttgagagtgagatggcgtttaatgattgcttcagtttgaactaccctggcaacccctgcccaggggacttgatcgaagtgttccgtcctggctatcagcactgggccctgtacttgggtgatggttacgttatcaacatagcacctgtagatggcattcctgcgtcctttacaagcgccaagtctgtattcagcagtaaggccctggtgaaaatgcagctcttgaaggatgttgtgggaaatgacacatacagaataaacaataaatacgatgaaacgtacccccctctccctgtggaagaaatcataaagcggtcagagtttgtaattggacaggaggtggcctataacttacttgtcaacaactgtgaacattttgtgacattgcttcgctatggagaaggagtttcagagcaggccaaccgagcgataagtaccgttgagtttgtgacagctgctgttggtgtcttctcattcctgggcttgtttccaaaaggacaaagagcaaaatactattaacaatttaccaaagagatattgatattgaaggaatttgggaggaggaaaagaaacctggggtgaatacttattttcagtgcatcattactgttccagattcctatgatggatggcagactctttaataaattgcttactgatattatctta

SEQ ID NO: 9489 - DNA, 498 bp, Homo sapiens
  source 1..498: mol_type = unassigned DNA
tctgtattcagcagtaaggccctggtgaaaatgcagctcttgaaggatgttgtgggaaatgacacatacagaataaacaataaatacgatgaaacgtacccccctctccctgtggaagaaatcataaagcggtcagagtttgtaattggacaggaggtggcctataacttacttgtcaacaactgtgaacattttgtgacattgcttcgctatggagaaggagtttcagagcaggccaaccgagcgataagtaccgttgagtttgtgacagctgctgttggtgtcttctcattcctgggcttgtttccaaaaggacaaagagcaaaatactattaacaatttaccaaagagatattgatattgaaggaatttgggaggaggaaaagaaacctggggtggagacagtcttaatcaagttgtgaaatacagcaaattgtaaagggttgtttggattaaagggttgtttggaaaagctgggtcagattctagcagagaacc

SEQ ID NO: 9490 - DNA, 2561 bp, Homo sapiens
  source 1..2561: mol_type = unassigned DNA
gtgcgaggcgcggggcgcaggccgtgcgcgcgccgcccgctgcatccctgcccggagcgcagccggcgcgggcgcgggaccgaggcgaaccgggtgcggagccaatacccgcggcagcagcaccagctcctgccctccactgactccagagagggagatccccagtacttgactccatcacgcagatgggagcaggcaccagctatggagagggatacagctgcgtctccacatgacccatcctgcatgacaccaaagccaccgccagacagtgcctcggattctatgcaaaacctgggaagcggagacctaccccagccccgggaggaagctagctcttcaggggaccgtctgaggactggagtttgatccatgaacctggcttcgaggccttgcttttctctcttcttcattcatattcattcccaacaccttagaaggtgttgcttaatttatttctagaaaagcagcccagagtcagtcattgaagccttccccaccccctggccaaaaaaaaaaaaaaaaaaaaactggacacattttggatctgttgggagcttggagtccagtggttggcatagttgtcacattgggagcagagaagaagcaaccaggggccctgatcaggggactgagccgtagagtcccaggatggcacccaatggcacagcctcttccttttgcctggactctaccgcatgcaagatcaccatcaccgtggtccttgcggtcctcatcctcatcaccgttgctggcaatgtggtcgtctgtctggccgtgggcttgaaccgccggctccgcaacctgaccaattgtttcatcgtgtccttggctatcactgacctgctcctcggcctcctggtgctgcccttctctgccatctaccagctgtcctgcaagtggagctttggcaaggtcttctgcaatatctacaccagcctggatgtgatgctctgcacagcctccattcttaacctcttcatgatcagcctcgaccggtactgcgctgtcatggacccactgcggtaccctgtgctggtcaccccagttcgggtcgccatctctctggtcttaatttgggtcatctccattaccctgtcctttctgtctatccacctggggtggaacagcaggaacgagaccagcaagggcaatcataccacctctaagtgcaaagtccaggtcaatgaagtgtacgggctggtggatgggctggtcaccttctacctcccgctactgatcatgtgcatcacctactaccgcatcttcaaggtcgcccgggatcaggccaagaggatcaatcacattagctcctggaaggcagccaccatcagggagcacaaagccacagtgacactggccgccgtcatgggggccttcatcatctgctggtttccctacttcaccgcgtttgtgtaccgtgggctgagaggggatgatgccatcaatgaggtgttagaagccatcgttctgtggctgggctatgccaactcagccctgaaccccatcctgtatgctgcgctgaacagagacttccgcaccgggtaccaacagctcttctgctgcaggctggccaaccgcaactcccacaaaacttctctgaggtccaacgcctctcagctgtccaggacccaaagccgagaacccaggcaacaggaagagaaacccctgaagctccaggtgtggagtgggacagaagtcacggccccccagggagccacagacagaccatggctttgccttccagaatgctggtctgtggaactgacccattcattcattcatttgttcattcattcatttgcaaacattcatccaattcccaccacatgccaggaattatgatgaatactggggatgtagaaatgagattttttgggtttatggtgatgaagttacagaaaatcaatggcacagccctggtctcagctctgccgtcactcaacttgtatcttgagcaagttcctccccatctcaggcctcagtttcctcatcgcatagagagttggtcttccctcaccgggcttcctacttgccctccagagttgcctgaagctcacatgagcgaagggacatgaacatgctctgccatctcccaataggacataagtccacgctggagcgctgagcatcagactcaagaaaagcttgcgtggatattgcagacccaccaacaagggctccaggttctggagttgtggaggcaaaactgcctagtgagaaccctacatattccctctggtccttgcagctgccacccccattcccaggggtggagtgtccctccatagacttggatcctgggccctctgctccttcaccactgtccatctgaagcaagcctggttgctccggcactgaactgtggcctcgggccctggaccctgcccctcaaatccaccctccaagtgcacacctggaaacttccgcttccagtcctgatgggtaaaacgcccacctaccatatccttgcgcaatctcttattcaggaggcagctggagtgcaaagctgacttagttcacaaagtataaaaaaatacagggatgtggttcagctagaa

SEQ ID NO: 9491 - DNA, 4225 bp, Homo sapiens
  source 1..4225: mol_type = unassigned DNA
cacattgggagcagagaagaagcaaccaggggccctgatcaggggactgagccgtagagtcccaggatggcacccaatggcacagcctcttccttttgcctggactctaccgcatgcaagatcaccatcaccgtggtccttgcggtcctcatcctcatcaccgttgctggcaatgtggtcgtctgtctggccgtgggcttgaaccgccggctccgcaacctgaccaattgtttcatcgtgtccttggctatcactgacctgctcctcggcctcctggtgctgcccttctctgccatctaccagctgtcctgcaagtggagctttggcaaggtcttctgcaatatctacaccagcctggatgtgatgctctgcacagcctccattcttaacctcttcatgatcagcctcgaccggtactgcgctgtcatggacccactgcggtaccctgtgctggtcaccccagttcgggtcgccatctctctggtcttaatttgggtcatctccattaccctgtcctttctgtctatccacctggggtggaacagcaggaacgagaccagcaagggcaatcataccacctctaagtgcaaagtccaggtcaatgaagtgtacgggctggtggatgggctggtcaccttctacctcccgctactgatcatgtgcatcacctactaccgcatcttcaaggtcgcccgggatcaggccaagaggatcaatcacattagctcctggaaggcagccaccatcagggagcacaaagccacagtgacactggccgccgtcatgggggccttcatcatctgctggtttccctacttcaccgcgtttgtgtaccgtgggctgagaggggatgatgccatcaatgaggtgttagaagccatcgttctgtggctgggctatgccaactcagccctgaaccccatcctgtatgctgcgctgaacagagacttccgcaccgggtaccaacagctcttctgctgcaggctggccaaccgcaactcccacaaaacttctctgaggtccaacgcctctcagctgtccaggacccaaagccgagaacccaggcaacaggaagagaaacccctgaagctccaggtgtggagtgggacagaagtcacggccccccagggagccacagacagagagtttggggagtgagagcccctcccactcctggagaggaagtcaggggaaggagagcagagaggaggtgggaagccctttacagcctcaaaagtcaaggagaataaatcgtggccccccaggagtcattgaaaggaagccagcactgtcctgcactacgtgctccagcaacctcctgagctgctgcaagagcctgtgggggctcaggttccttcagagacacatgggaggcccctcggaggagctatcgggggagccactgtctgaggagccacagaagagacctccccagaaagcggtgaggacgctgccctctgaggctgtctagacctagccccaggacactgaagataccgctcccggtccccaagatgtgactcctggagctcctaaggacccagtctccaaagccaccaaggactcaccctggactgaatctgggggctcccagaacacacagctgggtgtggggtcctcaggcctagggcggaacagcctattctgtgctcagcattcccagacaggcacgcaagactcctctgggcccgagtgggctgaatcccatgggttcaaagctcacgttggtgctggccctgggagtcatgagcagagacggtgggacagacggggatgcgtgcacatgtgtgtgcatgggtgcatacgtgtagggacgtgcatgacctctgagcaaggcagagggtattgaagaaagcattggcctctcactccctcatgggttctgcaggatgaaggaaaggaaaggaaaagacagagaaaggaaggaaatagcttttcatgagcacctactgtgtaccaggtgcttccctggcatgagctctcgtaacccttatagcaacatgagtttagagcaagaatcacaccccgactttacagagatggaaactgaggctcagagaagtaagggacctgcccaaggccactcagcacctagaaagtgtgcctagcacataggaggcacacaaaaatatgtgttgaatgggtgaatgaatgagagaacgggtgaaaagccaggcctcaagcccacactactgacactgcactacaccacctctcaggagagaaggcaaatatttccttgactcagccaccttcctcctagcaaggcttagacccccaggctctgggggtcccttcctgctacagtatgaccctctctggtgcttgtcatcaagaagtggtatgcggtggacttgctggagagagtgtctgcagccaggcatcatggagggagggatggatcttgagggactgtaatggttgtgaatgggggagttggcccccagcactctctggtggccgtatgaccttgggcacgtctcctgaccactctaagcagcttttgattcccctgtccaagagggtaggccccctgttcctatttacaggatccataaagagactcaaagagatagggtagtgccagccccagagagagggggctgtggagggacttctacccccagggcttctcagtggcatctcctggctggcccctgacactcaatcttccttggtttccaagatgcttcatgatcttccccctccctgacatccccgacctcccttttctgtcccttttgcaactcattgtcctctacctgccatcagatgtggctgttcctcagtctcagtccagagtcctctcttctcactcagcatctctcctcctgtgacctcgtctgcacccacaactccagttacaaggcacgaggtttggttatgaaatcactcacagatttataactgcaggcttggctccttccgggagcttgagacccactgccgcctccgcaacacctccacctgggagtttcagaggcgctctccctcagcgtgtctgcagctgcgtgcctgcagctgcgtgcctgccttctccctgcacctgctctgctccccaggtccctttctcagaccaaagcctgcccgggcttcacaggctgagggtccaccttgccacctccgtttgcctcagtcctcatggagccctggctccactgtctgctggcttctccccatctactctgtgtcactccatccgaccaccattgtctccatcaggacagttggaacacctcttctcagcactctcgcccccacccagtccaccccctacctgacagccagagtgggccatgccagatgcaacccaggtcatgccacacaggtagataaaaccatcttcagcccagccctcaggccctgtgtgctgggaccctgctgggccctctccagcctccccctgcgccaggcctcctccgtcacttcactctggccctgctgttcttttccttttagtttgattaactcactctgcccattccatgctcaaagctgtttccgtgaggaaaggctcctcctgctcattttagtgccctgaaatgtcacttccttgaggaagtcttccttgaccctccacaccaaaccaggccccctgccacacccctcagagctctccttggaaggcactggcatggctgtttgcgtgattccttgaacgttgtctgtctctcctcctcaccaggctgtgggtcctgtctgtttctggtgaccgttgtctgtctaacccctagaggagagtttgtcacatggtaggagcttaataaatatgtgttggatgaatgatcagagaaaagagagtgcagagagtggccaaaacagatgctttcagcagtgtatctgccaataaacctaaaggcatgatttgccctggtgatccccccagaggtgcttagtctcttggctgaattccttctggaatccccagaatccccctccttggaagttttcccaggagtctgaggcaggcaggtctctcagtcacggccacatgacctcaagtgaaaacaaaccagtctggctgttcacagactcagctggtcagagctctggcccgaggggcccacgcaccacccgccactgcagaagacgcctccacgtctgtctctgggctgcctccaccttctgcaggcctcctggagcctctgctggctgcagaagtggggtgcatgctgcctggaggaggaacatctgtggtgggaccccaaatccatgtttgtgttac

SEQ ID NO: 9492 - DNA, 4067 bp, Homo sapiens
  source 1..4067: mol_type = unassigned DNA
gtagagtcccaggatggcacccaatggcacagcctcttccttttgcctggactctaccgcatgcaagatcaccatcaccgtggtccttgcggtcctcatcctcatcaccgttgctggcaatgtggtcgtctgtctggccgtgggcttgaaccgccggctccgcaacctgaccaattgtttcatcgtgtccttggctatcactgacctgctcctcggcctcctggtgctgcccttctctgccatctaccagctgtcctgcaagtggagctttggcaaggtcttctgcaatatctacaccagcctggatgtgatgctctgcacagcctccattcttaacctcttcatgatcagcctcgaccggtactgcgctgtcatggacccactgcggtaccctgtgctggtcaccccagttcgggtcgccatctctctggtcttaatttgggtcatctccattaccctgtcctttctgtctatccacctggggtggaacagcaggaacgagaccagcaagggcaatcataccacctctaagtgcaaagtccaggtcaatgaagtgtacgggctggtggatgggctggtcaccttctacctcccgctactgatcatgtgcatcacctactaccgcatcttcaaggtcgcccgggatcaggccaagaggatcaatcacattagctcctggaaggcagccaccatcagggagcacaaagccacagtgacactggccgccgtcatgggggccttcatcatctgctggtttccctacttcaccgcgtttgtgtaccgtgggctgagaggggatgatgccatcaatgaggtgttagaagccatcgttctgtggctgggctatgccaactcagccctgaaccccatcctgtatgctgcgctgaacagagacttccgcaccgggtaccaacagctcttctgctgcaggctggccaaccgcaactcccacaaaacttctctgaggtccaacgcctctcagctgtccaggacccaaagccgagaacccaggcaacaggaagagaaacccctgaagctccaggtgtggagtgggacagaagtcacggccccccagggagccacagacaggaagccagcactgtcctgcactacgtgctccagcaacctcctgagctgctgcaagagcctgtgggggctcaggttccttcagagacacatgggaggcccctcggaggagctatcgggggagccactgtctgaggagccacagaagagacctccccagaaagcggtgaggacgctgccctctgaggctgtctagacctagccccaggacactgaagataccgctcccggtccccaagatgtgactcctggagctcctaaggacccagtctccaaagccaccaaggactcaccctggactgaatctgggggctcccagaacacacagctgggtgtggggtcctcaggcctagggcggaacagcctattctgtgctcagcattcccagacaggcacgcaagactcctctgggcccgagtgggctgaatcccatgggttcaaagctcacgttggtgctggccctgggagtcatgagcagagacggtgggacagacggggatgcgtgcacatgtgtgtgcatgggtgcatacgtgtagggacgtgcatgacctctgagcaaggcagagggtattgaagaaagcattggcctctcactccctcatgggttctgcaggatgaaggaaaggaaaggaaaagacagagaaaggaaggaaatagcttttcatgagcacctactgtgtaccaggtgcttccctggcatgagctctcgtaacccttatagcaacatgagtttagagcaagaatcacaccccgactttacagagatggaaactgaggctcagagaagtaagggacctgcccaaggccactcagcacctagaaagtgtgcctagcacataggaggcacacaaaaatatgtgttgaatgggtgaatgaatgagagaacgggtgaaaagccaggcctcaagcccacactactgacactgcactacaccacctctcaggagagaaggcaaatatttccttgactcagccaccttcctcctagcaaggcttagacccccaggctctgggggtcccttcctgctacagtatgaccctctctggtgcttgtcatcaagaagtggtatgcggtggacttgctggagagagtgtctgcagccaggcatcatggagggagggatggatcttgagggactgtaatggttgtgaatgggggagttggcccccagcactctctggtggccgtatgaccttgggcacgtctcctgaccactctaagcagcttttgattcccctgtccaagagggtaggccccctgttcctatttacaggatccataaagagactcaaagagatagggtagtgccagccccagagagagggggctgtggagggacttctacccccagggcttctcagtggcatctcctggctggcccctgacactcaatcttccttggtttccaagatgcttcatgatcttccccctccctgacatccccgacctcccttttctgtcccttttgcaactcattgtcctctacctgccatcagatgtggctgttcctcagtctcagtccagagtcctctcttctcactcagcatctctcctcctgtgacctcgtctgcacccacaactccagttacaaggcacgaggtttggttatgaaatcactcacagatttataactgcaggcttggctccttccgggagcttgagacccactgccgcctccgcaacacctccacctgggagtttcagaggcgctctccctcagcgtgtctgcagctgcgtgcctgcagctgcgtgcctgccttctccctgcacctgctctgctccccaggtccctttctcagaccaaagcctgcccgggcttcacaggctgagggtccaccttgccacctccgtttgcctcagtcctcatggagccctggctccactgtctgctggcttctccccatctactctgtgtcactccatccgaccaccattgtctccatcaggacagttggaacacctcttctcagcactctcgcccccacccagtccaccccctacctgacagccagagtgggccatgccagatgcaacccaggtcatgccacacaggtagataaaaccatcttcagcccagccctcaggccctgtgtgctgggaccctgctgggccctctccagcctccccctgcgccaggcctcctccgtcacttcactctggccctgctgttcttttccttttagtttgattaactcactctgcccattccatgctcaaagctgtttccgtgaggaaaggctcctcctgctcattttagtgccctgaaatgtcacttccttgaggaagtcttccttgaccctccacaccaaaccaggccccctgccacacccctcagagctctccttggaaggcactggcatggctgtttgcgtgattccttgaacgttgtctgtctctcctcctcaccaggctgtgggtcctgtctgtttctggtgaccgttgtctgtctaacccctagaggagagtttgtcacatggtaggagcttaataaatatgtgttggatgaatgatcagagaaaagagagtgcagagagtggccaaaacagatgctttcagcagtgtatctgccaataaacctaaaggcatgatttgccctggtgatccccccagaggtgcttagtctcttggctgaattccttctggaatccccagaatccccctccttggaagttttcccaggagtctgaggcaggcaggtctctcagtcacggccacatgacctcaagtgaaaacaaaccagtctggctgttcacagactcagctggtcagagctctggcccgaggggcccacgcaccacccgccactgcagaagacgcctccacgtctgtctctgggctgcctccaccttctgcaggcctcctggagcctctgctggctgcagaagtggggtgcatgctgcctggaggaggaacatctgtggtgggaccccaaatccatgtttgtgttaccatcgtgttccaataaaactatcgaaacaga

SEQ ID NO: 9493 - DNA, 1080 bp, Homo sapiens
  source 1..1080: mol_type = unassigned DNA; mol_type = unassigned DNA
atggcacccaatggcacagcctcttccttttgcctggactctaccgcatgcaagatcaccatcaccgtggtccttgcggtcctcatcctcatcaccgttgctggcaatgtggtcgtctgtctggccgtgggcttgaaccgccggctccgcaacctgaccaattgtttcatcgtgtccttggctatcactgacctgctcctcggcctcctggtgctgcccttctctgccatctaccagctgtcctgcaagtggagctttggcaaggtcttctgcaatatctacaccagcctggatgtgatgctctgcacagcctccattcttaacctcttcatgatcagcctcgaccggtactgcgctgtcatggacccactgcggtaccctgtgctggtcaccccagttcgggtcgccatctctctggtcttaatttgggtcatctccattaccctgtcctttctgtctatccacctggggtggaacagcaggaacgagaccagcaagggcaatcataccacctctaagtgcaaagtccaggtcaatgaagtgtacgggctggtggatgggctggtcaccttctacctcccgctactgatcatgtgcatcacctactaccgcatcttcaaggtcgcccgggatcaggccaagaggatcaatcacattagctcctggaaggcagccaccatcagggagcacaaagccacagtgacactggccgccgtcatgggggccttcatcatctgctggtttccctacttcaccgcgtttgtgtaccgtgggctgagaggggatgatgccatcaatgaggtgttagaagccatcgttctgtggctgggctatgccaactcagccctgaaccccatcctgtatgctgcgctgaacagagacttccgcaccgggtaccaacagctcttctgctgcaggctggccaaccgcaactcccacaaaacttctctgaggtccaacgcctctcagctgtccaggacccaaagccgagaacccaggcaacaggaagagaaacccctgaagctccaggtgtggagtgggacagaagtcacggccccccagggagccacagacaggtaa

SEQ ID NO: 9494 - DNA, 2659 bp, Homo sapiens
  source 1..2659: mol_type = unassigned DNA; mol_type = unassigned DNA
cggctgcacggtcgcaccggcagcggctcaggctccggctcctctcccgctgcagcagccgcgctgccggccccactgggctcggatccggccccggccccctcggcaccgcctgctctggccccggccccggccccgcggaccatgcgctgggcgcccccaggggaacccgacccggccaagggcccgcaaagacgaggctcccgggccggggcccctcccggccgcccagctctcggccggcgccctgccccgcgtcccggagccgcgtgagcctgcggggccatggagcgcgcgccgcccgacgggccgctgaacgcttcgggggcgctggcgggcgaggcggcggcggcgggcggggcgcgcggcttctcggcagcctggaccgcggtgctggccgcgctcatggcgctgctcatcgtggccacggtgctgggcaacgcgctggtcatgctcgccttcgtggccgactcgagcctccgcacccagaacaacttcttcctgctcaacctcgccatctccgacttcctcgtcggcgccttctgcatcccactgtatgtaccctacgtgctgacaggccgctggaccttcggccggggcctctgcaagctgtggctggtagtggactacctgctgtgcacctcctctgccttcaacatcgtgctcatcagctacgaccgcttcctgtcggtcacccgagcggtctcataccgggcccagcagggtgacacgcggcgggcagtgcggaagatgctgctggtgtgggtgctggccttcctgctgtacggaccagccatcctgagctgggagtacctgtccgggggcagctccatccccgagggccactgctatgccgagttcttctacaactggtacttcctcatcacggcttccaccctggagttctttacgcccttcctcagcgtcaccttctttaacctcagcatctacctgaacatccagaggcgcacccgcctccggctggatggggctcgagaggcagccggccccgagccccctcccgaggcccagccctcaccacccccaccgcctggctgctggggctgctggcagaaggggcacggggaggccatgccgctgcacaggtatggggtgggtgaggcggccgtaggcgctgaggccggggaggcgaccctcgggggtggcggtgggggcggctccgtggcttcacccacctccagctccggcagctcctcgaggggcactgagaggccgcgctcactcaagaggggctccaagccgtcggcgtcctcggcctcgctggagaagcgcatgaagatggtgtcccagagcttcacccagcgctttcggctgtctcgggacaggaaagtggccaagtcgctggccgtcatcgtgagcatctttgggctctgctgggccccatacacgctgctgatgatcatccgggccgcctgccatggccactgcgtccctgactactggtacgaaacctccttctggctcctgtgggccaactcggctgtcaaccctgtcctctaccctctgtgccaccacagcttccgccgggccttcaccaagctgctctgcccccagaagctcaaaatccagccccacagctccctggagcactgctggaagtgagtggcccaccagagcctccctcagccacgcctctctcagcccaggtctcctgggcatctggccctgctgccccctacccggctcgttcccccaggggtgagccccgccgtgtctgtggccctctcttaatgccacggcagccaccctgccatggaggcgccttcctgggttggccagagggcccctcactggctggactggaggctgggtggccggccctgccccccacattctggctccaccgggagggacagtctggaggtcccagacatgctgcccaccccctgctggtgcccacccttcgcagttactggttggtgttcttcccaaagcaagcacctgggtgtgctccaggcttcctgccctagcagtttgcctctgcacgtgcacacacctgcacacccctgcacacacctgcacaccgtccctctccccggacaagcccaggacactgcctttgctgccttctgtctcttgcataagcctcaggcctggccctttcacccctcttcccaccaactctctctgcccccaaaagtgtcaaggggccctaggaacctcgaagctgttctctgcttttccattctgggtgttttcagaaagatgaagaagaaaacatgtctgtgaacttgatgttcctgggatgtttaatcaagagagacaaaattgctgaggagctcagggctggattggcaggtgtgggctcccacgccctcctccctccgctaaggcttccggctgagctgtgccagctgcttctgcccaccccgcctctgggctcacaccagccctggtggccaagcctgccccggccactctgtttgctcacccaggacctctgggggttgttgggaggagggggcccggctgggcccgagggtcccaaggcgtgcaggggcggtccagaggaggtgcccgggcaggggccgcttcgccatgtgctgtgcacccgtgccacgcgctctgcatgctcctctgcctgtgcccgctgcgctgccctgcaaaccgtgaggtcacaataaagtgtattttttta

SEQ ID NO: 9495 - DNA, 1419 bp, Homo sapiens
  source 1..1419: mol_type = unassigned DNA; mol_type = unassigned DNA
cgcgttgcgctccggctgcacggtcgcaccggcagcggctcaggctccggctcctctcccgctgcagcagccgcgctgccggccccactgggctcggatccggccccggccccctcggcaccgcctgctctggccccggccccggccccgcggaccatgcgctgggcgcccccaggggaacccgacccggccaagggcccgcaaagacgaggctcccgggccggggcccctcccggccgcccagctctcggccggcgccctgccccgcgtcccggagccgcgtgagcctgcggggccatggagcgcgcgccgcccgacgggccgctgaacgcttcgggggcgctggcgggcgaggcggcggcggcgggcggggcgcgcggcttctcggcagcctggaccgcggtgctggccgcgctcatggcgctgctcatcgtggccacggtgctgggcaacgcgctggtcatgctcgccttcgtggccgactcgagcctccgcacccagaacaacttcttcctgctcaacctcgccatctccgacttcctcgtcggcgccttctgcatcccactgtatgtaccctacgtgctgacaggccgctggaccttcggccggggcctctgcaagctgtggctggtagtggactacctgctgtgcacctcctctgccttcaacatcgtgctcatcagctacgaccgcttcctgtcggtcacccgagcggtctcataccgggcccagcagggtgacacgcggcgggcagtgcggaagatgctgctggtgtgggtgctggccttcctgctgtacggaccagccatcctgagctgggagtacctgtccgggggcagctccatccccgagggccactgctatgccgagttcttctacaactggtacttcctcatcacggcttccaccctggagttctttacgcccttcctcagcgtcaccttctttaacctcagcatctacctgaacatccagaggcgcacccgcctccggctggatggggctcgagaggcagccggccccgagccccctcccgaggcccagccctcaccacccccaccgcctggctgctggggctgctggcagaaggggcacggggaggccatgccgctgcacaggaaagtggccaagtcgctggccgtcatcgtgagcatctttgggctctgctgggccccatacacgctgctgatgatcatccgggccgcctgccatggccactgcgtccctgactactggtacgaaacctccttctggctcctgtgggccaactcggctgtcaaccctgtcctctaccctctgtgccaccacagcttccgccgggccttcaccaagctgctctgcccccagaagctcaaaatccagccccacagctccctggagcactgctggaaaaagatgaagaagaaaacatgtctgtga

SEQ ID NO: 9496 - DNA, 900 bp, Homo sapiens
  source 1..900: mol_type = unassigned DNA; mol_type = unassigned DNA
cgcgttgcgctccggctgcacggtcgcaccggcagcggctcaggctccggctcctctcccgctgcagcagccgcgctgccggccccactgggctcggatccggccccggccccctcggcaccgcctgctctggccccggccccggccccgcggaccatgcgctgggcgcccccaggggaacccgacccggccaagggcccgcaaagacgaggctcccgggccggggcccctcccggccgcccagctctcggccggcgccctgccccgcgtcccggagccgcgtgagcctgcggggccatggagcgcgcgccgcccgacgggccgctgaacgcttcgggggcgctggcgggcgaggcggcggcggcgggcggggcgcgcggcttctcggcagcctggaccgcggtgctggccgcgctcatggcgctgctcatcgtggccacggtgctgggcaacgcgctggtcatgctcgccttcgtggccgactcgagcctccgcacccagaacaacttcttcctgctcaacctcgccatctccgacttcctcgtcggcgccttctgcatcccactgtatgtaccctacgtgctgacaggccgctggaccttcggccggggcctctgcaagctgtggctggtagtggactacctgctgtgcacctcctctgccttcaacatcgtgctcatcagctacgaccgcttcctgtcggtcacccgagcggtctcataccgggcccagcagggtgacacgcggcgggcagtgcggaagatgctgctggtgtgggtgctggccttcctgctgtacggaccagctccggcagctcctcgaggggcactgagaggccgcgctcactcaagaggggctccaagccgtcggcgtcctcggcctcgctggagaagcgcatga

SEQ ID NO: 9497 - DNA, 8031 bp, Homo sapiens
  source 1..8031: mol_type = unassigned DNA; mol_type = unassigned DNA
agaacctcccagcttccggaatagaggagcggggcagaaatatcctgctttttatttcagagctgacgtttgcaatcctagtgcactagcggaaaaaaaaaaaaaaaaaaaaaaaaaaaaaagctgaattttccgcgctctcctggcaaattggcgtccgctctccgacgctaaaccaaaggaaaaggagtgttcaatggcgacagggcgctctttgaagccggctcctcacgcggattctggcccaggccgccgctccggtcccagtccggctgcagagcgaattggagaggatggcacctcctgcttcccggggggcggaaggagcgccagcgcctaaggtgggtcacctgccaggaagggaatacgcatggtgcagactcacgtgggaggagcacaggtcccgggtacaagtgccgagctggcgacttagagaagaggtagactcgggctcagaccaagcaggcgtaagggagtagacgggacgtcccgtgtttgcagtgacggcggagtcacccatcccagcagcctcaccttcttggagcgctggtccctccccttggactgaaaccccaggggccaccgcaccgggtgggcgggaccgactactacccgaccagccgctggagctgcgtgccaggcggggctgtgcggagcagctgagcgcagagcggagcaccaggcacctagcgggccggactctgggcggcacccgagcgggccgggcagcagtgggcgctcgcgatcctcctctgcccaacgcgctctccctccgggcccggcctcctccgtcccctccttttgctcccgctcctcctcccgctcctccccctcctcgggattgagcaccaaaacgcccgcctgcaaggtcctctgcgccctggcagccaggagtcgccgccacgacagccgggtctcagtgggtgcctgcgccttctccccgcccgcctgccccgggccatccagaaacttgctctacccgccgcgggtgctcggcagtgctgcccatggcccagcctaggagcctatttagggcgccggacgggctggacagaggcgcggctcagtaattgaaggcctgaaacgcccatgtgccactgactaggaggcttccctgctgcggcacttcatgacccagcggcgcgcggcccagtgaagccaccgtggtgtccagcatggccgcgctgctcctgggcgcggtgctgctggtggcccagccccagctagtgccttcccgccccgccgagctaggccagcaggagcttctgcggaaagcggggaccctccaggatgacgtccgcgatggcgtggccccaaacggctctgcccagcagttgccgcagaccatcatcatcggcgtgcgcaagggcggcacgcgcgcactgctggagatgctcagcctgcaccccgacgtggcggccgcggagaacgaggtccacttcttcgactgggaggagcattacagccacggcttgggctggtacctcagccagatgcccttctcctggccacaccagctcacagtggagaagacccccgcgtatttcacgtcgcccaaagtgcctgagcgagtctacagcatgaacccgtccatccggctgctgctcatcctgcgagacccgtcggagcgcgtgctatctgactacacccaagtgttctacaaccacatgcagaagcacaagccctacccgtccatcgaggagttcctggtgcgcgatggcaggctcaatgtggactacaaggccctcaaccgcagcctctaccacgtgcacatgcagaactggctgcgctttttcccgctgcgccacatccacattgtggacggcgaccgcctcatcagggaccccttccctgagatccaaaaggtcgagaggttcctaaagctgtcgccgcagatcaatgcttcgaacttctactttaacaaaaccaagggcttttactgcctgcgggacagcggccgggaccgctgcttacatgagtccaaaggccgggcgcacccccaagtcgatcccaaactactcaataaactgcacgaatattttcatgagccaaataagaagttcttcgagcttgttggcagaacatttgactggcactgatttgcaataagctaagctcagaaactttcctactgtaagttctggtgtacatctgaggggaaaaagaattttaaaaaagcatttaaggtataatttatttgtaaaatccataaagtacttctgtacagtattagattcacaattgccatatatactagttatatttttctacttgttaaatggagggcattttgtattgtttttcatggttgttaacattgtgtaatatgtctctatatgaaggaactaaactatttcactgaaaaaaaaaaaaagattttttctggagacgctatgtttttttgaatataattaacttgcccccaactcaaaatagctgtctgtgttgcaatcattgcaaaatctaaattcttttgttacttaaaaaaacatgtttttcatggctattacaatcctctctctcccctctcctttctgcattgctctttttaatttttaatgtctcattgtgatcatcagatttatttttacttggattgtaagatttatctcctcggcgattccttgtcatttttggaggtcacagttttactcattcccatgtgtaaacttcaagtaaacaaagcaatattcaggatggagaagcagttagtgactggctagaggtctcttgggatccatcttgacctcaaagaatatttgcacatgcttctgatctcagcagttataataaagaggattaaacccttggccttcagaatgatcttggacctggatactttgccccaggtggcagctggcctccagaaagccaattagaatagaaaagagaaactgcgaaatctatgcgtgtcttcatcctgtcggttctgtgaaaggctgactaaaagggtagtagtcttttgcttagtctgaaagtctgcttacttcctgaaagacacattggcattatagacatatattccatatgcactgagacataaatatgtgtatgtttcaaaatcaactctaaatttggagtcctgaatgtgaaagaaaaagtaagttcccaagtgttgaagttaaaaagagaaaagggcagagttgaaggtagcacctaagagaaccactgtacctgcccccagaggagtggctggagttcagttttacttctgcccctgagcagccagcttgttggagatggtcacataaacccttcttatcctcagttttttcatgcattcttcatgcagtcagccttttacagaattaaacccattggattttaataaaaataaaacattcattacagtaaaagagaaaatacaaacaagcaaaataaaccggcttcctgacatggtttataccgcaggaaaatgacagaaatggacgttattaatcatctcctacacttaagaactcattgaaatttctccaagcaaccccaggatgcagatattattatggaaatttcaaagaggaggaattaggcccagagaacatgagaaacttgcccaaggtcacattgactataaactcaggcttagaggctactcagagccaaagcacaggttatttatgtatttagtttttacccaactctttctgaactcaaaaggaaaagcccagactcagagccagttcttcctgacctgacttaacatttcttcccaggtgccaaatatcttccatcctaagaggtgtgtcccagatacaggaagggcaagaagaagcctgcatttttctcagcagtgttatcagggaagtgagtcaccttggtacgtttcagcagctccagcctgacctgaccttagcatggcctatgccccaccccatatcatgaacagagagcagagaggatgccttcctctttagaatccattgaagttgtcattaagccatcatctcccccagaggaagtagcagaaatatttacagcaggcccctggtggacatggtacttttcaataggcagagagcctccctctgcagcacatcgttggatcttgcttttaccatactccttgaagagctgaagaaataagagggcccagcaaggttaagtcaagtttccaagcctgttcaggaatatggtgactgaaaggaaactgcaatgagagtctctgactgaagaagatgctctttgcaaactgcctgtaaattcctgtcccctgacagggatggtctggtagaagcatgaactgtggatgcaagaggcagcggggaggagtggaggaagacaggaccagcacatggaatataatctagctgctgggactggcatagtcgatggaggcggtggtccagtgtaaaatgatcagtgaatgtaaattcaatatgttttcatttgggggtgcagagtcgtggctaaaggaatgttcaaatgagtctaccatgagcaagggatcagaggtcctagtggcactatctgttcattcatttttggtacaaccccagccagtcattgagaaggtacactgtgtaagaaaccatcactccagacttacccaaggtatttattgctagatctcaccaagcactgtcaaattcaaaggaggccctgtagtagaccctgggctgtccttacagggccaaaatgcagtgactcaggagcctaatagcacccggtccctccaaaacatgccttctaccaattccattaacagagacaggtgtcagtggaaggggtgggtctcctgtccagaccaccccggcccgggagcagcctgggggatctaggtgggtccttccagagaggcaagtgagaacaactgaaccaagcctcagctattagatttggaatattcacacacttgacactccagagtcagaacagccccttccctttcccttcctcctggaatcagatagggttgaaatccttttaacaccatttggttatcagctcacaacctgaaggtttgcaagtttaggaaaagtgacatgcctctgagcacagggtgctttactccttctgtgcttggaggcttacccaactgaaaggagatggagggcaggagaggccgatgcctagcgtgcctgctgcttacaggggtggtgtcacaggtcaccattattcattaaaattttacttttttgatcccctaccacatgctcaacatggtattgagtcctcaagaatataaaaagaaaatacaacaggaaccagtagtcattaactgtttgttctggactttaataaaagtacagagggtcttggagtacaaaggcaaagacatttagctgtgtatagaatgggtgggggaatgtgttccatggtttggcattcagttcagcaacattcctgagagaaatcaactagcccccttatagagaagaggaaactgagatttaaaaagtggtcctggccgggtgtagtggctcacgcctgtaatcccagcactttgggaggccaagacaggtgaatcacgaggtcaggagttcaagaccagcctgaccaacatggtgaaaccccatctctactaaaaatacaaaaatgtgccaggcatggtggcgagtgcctgtaatcccagctactcaggacactgaggcaagagaaccacttgaacctggcaggtggaggttgcagggggccgagatgatgccactgcactccagcctgggcaacagagcaagactccatctcaaaaaaaaaaaaaaaaaaaaaagataaattaataataaaaaaataaaaaagtaatcctgacttcaagtcatttttttcagaagaaaggattcttgctcactccagggaaatagtccagaaatggaaaatgttgacatcacaaatcacaaaagaaggtgaaaaatatcagagaccctctccagaatgtcatttctcagaaatattaagaaatagagaatcttcccagaggtcgcatgtcagggcaggtcacttaacttgtgggccacagagaccctgaccttcctgtgggaaggcttcatggaggaattgccataaagctggggcacgcacgaatggcagtagtgtcaccagagcagggcattctgaacaagggaagcttgagacatgaagacagtggtcacggggagaggctgggggtagagggtagaggtaggcaagagatttgtctgagtggcatgtcaaatgtgttaaactcaatgagaagctactgctttccaaggctggagtgttggaagcttacttagcaggcacccatgtgaatttggctcctgtgcaggtgtatctgttgcataaaaatagctatcatttgttgcacacctgccatgtgcttggtattttaaatatattgcttctaacctatataacaaccctaggaagtagaaaatgggctactaattttacagaaaaataaactcagaaattaaagggcttgcccatgttgatagagccattacttcttacaaatgaaattttgtctccgatgtctctgctccttttcagtccatctatttgtgggtaagtggaggaagatataaagcatatgcatctgtctattaggcagagcctgtaagggaaattatgggcatctaggatttggagttggacagttagggtgatatcaagattaccttcaagcaaagcagtggctgggatttgatgcaacagggacgtgataaaacatgctcctaaccggcagcagctcatttcggaagactgagcctgagttaaaggccagagcaacataacagagttctccaaacagcacacagtgagagaaggccaaagctaaagaggacatcatcggatttagctgcttcactaaagtgttttgatgtagaaaatgaccttggtgctttagttatccctgatgtcaagacctttactctattttgcccaaatttctcagttagataacagcaaagagagagagccagaagacctgggtgtgcatcctagctgtaccaatcactgaccatgggatcttagattcagactctgagaacctccatttccttctccataaaaatgggcagatatgtactgtactctgttgggggaaaactccaactcaatgagataaagtaggtaaaaactataaacccagtgcatatgttacttagtggttaaaaacatttgggactttaggagacagaccaaaactggttttgaaccagtcggcagaaatgcgctgccttttttcctcctctgcttcccagctatgtgactgtagctattgctgttaatgctccatccagagctcatttaccagggaagtgctctcaaccccagctgccacaaagattgtcttctgtactattttctgaaggatttctcttagttggcaggagttttcttacctgaagatgcctgagaaatgttgtccaccccactcccctgctttcctagggttagggcatgactaatgattgactgacccatgtgggatggggcatgggggtagtagggtaacagtccaccctcattgcctccaggcaggacaacctctggtgcaactcatgctcagagctcctcgtgagatcaggctgaggctagacttctcctgaaactgtacttttacttatttcttccgaaacttcatccttttcccacattaccttactcatttcttctgctaccctattctcagtaaatgtgtttcccaagaaaacaggaatcccccctcagactttgcttctagaccatccactctaaagtcttaaccttgcatgcatgttttcttctctctgtattttacatgtataacgtgatcaacccacggagttattagaattcttccaattaaatgagatatagcagagaatgagtctattttattggctagcaaatagcaaagtgttaaattcaataatggctgaaattgttaccaagtagtaggctcttttattagcttatcggactaccaaaatagtataatgcatcaatatcaaacttaaatttcaacttcataaaacaattctgggcccaacaaatatgaaggtattgctccatcttatgtagcaacatcttgtatttctattgtttgataaatattccacttagaactaa

SEQ ID NO: 9498 - DNA, 491 bp, Homo sapiens
  source 1..491: mol_type = unassigned DNA; mol_type = unassigned DNA
ctaagaagaatcgaggctggagcaggtggagtggatgcagagggaaccaggaagcaaaggctggggattttcccatcctcctcacctcctgccctagcacctctgctctggaagtcccgagggaccggttgatcttaattgaaggcctgaaacgcccatgtgccactgactaggaggcttccctgctgcggcacttcatgacccagcggcgcgcggcccagtgaagccaccgtggtgtccagcatggccgcgctgctcctgggcgcggtgctgctggtggcccagccccagctagtgccttcccgccccgccgagctaggccagcaggagcttctgcggaaagcggggaccctccaggatgacgtccgcgatggcgtggccccaaacggctctgcccagcagttgccgcagaccatcatcatcggcgtgcgcaagggcggcacgcgcgcactgctggagatgctcagcctgcaccccgacgtggcggccgc

SEQ ID NO: 9499 - DNA, 496 bp, Homo sapiens
  source 1..496: mol_type = unassigned DNA; mol_type = unassigned DNA
gacagggcgctctttgaagccggctcctcacgcggattctggcccaggccgccgctccggtcccagtccggctgcagagcgaattggagaggatggcacctcctgcttcccggggggcggaaggagcgccagcgcctaagtaattgaaggcctgaaacgcccatgtgccactgactaggaggcttccctgctgcggcacttcatgacccagcggcgcgcggcccagtgaagccaccgtggtgtccagcatggccgcgctgctcctgggcgcggtgctgctggtggcccagccccagctagtgccttcccgccccgccgagctaggccagcaggagcttctgcggaaagcggggaccctccaggatgacgtccgcgatggcgtggccccaaacggctctgcccagcagttgccgcagaccatcatcatcggcgtgcgcaagggcggcacgcgcgcactgctggagatgctcagcctgcaccccgacgtggcggccgc

SEQ ID NO: 9500 - DNA, 2314 bp, Homo sapiens
  source 1..2314: mol_type = unassigned DNA; mol_type = unassigned DNA
gccagatcgcggccggcgccagcgccaccgtccggtccacccgccagcccgcacagccgcgccgccgccgagcgtttcgtgagcggcgctccgaggatcaggaatggggcttcgggcgctgggcgcgctccgaacccggcgcacgtaagagcctgggagcgcccgagccgcccggctgcccggagccccatcgcctaggaccgggagatgctggaaatgcaaccgcctgttccccgaggagccgctgcccccgggaccccctggcactgtgcgcaccctggtcagcagcccccggagaagacggcgcccccaacgcccgacccgcgtggccgtggcagcgccacgcgagccctctaggcgaccgcagggccacagcagctcagccgccggtgccccctcggaaaccatgacccccggcgcgggcccatggagccatggcctatagggtcctgggccgcgcggggccacctcagccgcggagggcgcgcaggctgctcttcgccttcacgctctcgctctcctgcacttacctgtgttacagcttcctgtgctgctgcgacgacctgggtcggagccgcctcctcggcgcgcctcgctgcctccgcggccccagcgcgggcggccagaaacttctccagaagtcccgcccctgtgatccctccgggccgacgcccagcgagcccagcgctcccagcgcgcccgccgccgccgtgcccgcccctcgcctctccggttccaaccactccggctcacccaagctgggtaccaagcggttgccccaagccctcattgtgggcgtgaagaaggggggcacccgggccgtgctggagtttatccgagtacacccggacgtgcgggccttgggcacggaaccccacttctttgacaggaactacggccgcgggctggattggtacaggagcctgatgcccaggaccctcgagagccagatcacgctggagaagacgcccagctactttgtcactcaagaggctcctcgacgcatcttcaacatgtcccgagacaccaagctgatcgtggttgtgcggaaccctgtgacccgtgccatctctgattacacgcagacactctccaagaagcccgacatcccgacctttgagggcctctccttccgcaaccgcaccctgggcctggtggacgtgtcatggaacgccatccgcatcggcatgtacgtgctgcacctggagagctggctgcagtacttcccgctagctcagattcacttcgtcagtggcgagcgactcatcactgacccggccggcgagatggggcgagtccaggacttcctgggcattaagagattcatcacggacaagcacttctatttcaacaagaccaaaggattcccttgcttgaaaaaaacagaatcgagcctcctgcctcgatgcttgggcaaatcaaaagggagaactcatgtacagattgatcctgaagtgatagaccagctccgagaattttatagaccgtataatatcaaattttatgaaaccgttgggcaggacttcaggtgggaataagcccacgaaaggaaagggctctcaagggctcttctgctcatctcttccgtgagatttgctcccagaccctctgatctccctccaacaaaccctggctccagccccctttcccaacttgagttgcatcatcttggaaccaggaagcccagctaaagccaagagaccagagagtccctgccactagttttcatcagtctgttcaagcaaagttgatctgctcctggcacgtccagtaaattccagaatcattctcctttctgcccataaagggccttggagaattgctttaagaagagtgaatgttccaatgatgatagatattataagcgatgatggttctgttgctatgaacacagcagtcggtccctgtcattgtccacccaggagtggccttgttaattccaagtggcatgtatcttccctctgagcttcatttcttcaagatgctctgggtggtgggatgggagaccatcctcagccctcctcagaccttatcaattcattgagagattgcaaagctgaaagcacctccggccactcctgggagacagaccctttggtgatgaaataaaccagtgacttcagagcctatggtctcaactgtgcttgaaaaacactgtctctgaaaacaactttgtgattctccctgctccctgtggacaaaagcacataattctgctgttacgggtactttgctcatacgagctttcatgttcagcatgcaatggaatcatgcttgtccatgtgaaataaatatggctctctcgtgtccttaa

SEQ ID NO: 9501 - DNA, 2266 bp, Homo sapiens
  source 1..2266: mol_type = unassigned DNA; mol_type = unassigned DNA
cccgcgtggccgtggcagcgccacgcgagccctctaggcgaccgcagggccacagcagctcagccgccggtgccccctcggaaaccatgacccccggcgcgggcccatggagccatggcctatagggtcctgggccgcgcggggccacctcagccgcggagggcgcgcaggctgctcttcgccttcacgctctcgctctcctgcacttacctgtgttacagcttcctgtgctgctgcgacgacctgggtcggagccgcctcctcggcgcgcctcgctgcctccgcggccccagcgcgggcggccagaaacttctccagaagtcccgcccctgtgatccctccgggccgacgcccagcgagcccagcgctcccagcgcgcccgccgccgccgtgcccgcccctcgcctctccggttccaaccactccggctcacccaagctgggtaccaagcggttgccccaagccctcattgtgggcgtgaagaaggggggcacccgggccgtgctggagtttatccgagtacacccggacgtgcgggccttgggcacggaaccccacttctttgacaggaactacggccgcgggctggattggtacaggtgactcagacactacctgtgtggttgtcggtgcacacacttgggtgattgtgctgaagctacctggactggagacaagaatgtgtgtcttgctaaactgtggatgataattaaattcatggaagcagcagcaatgacccaggagcacgtatagctggagaagaaggtcagagggtctcactctgtcattcaagcttgggtgcagtggaatgatcatagctcacttcaacctcaaactcctgggctcaagcggtcctcccacctcagcttcccaaggagctgacactacaggagcctgatgcccaggaccctcgagagccagatcacgctggagaagacgcccagctactttgtcactcaagaggctcctcgacgcatcttcaacatgtcccgagacaccaagctgatcgtggttgtgcggaaccctgtgacccgtgccatctctgattacacgcagacactctccaagaagcccgacatcccgacctttgagggcctctccttccgcaaccgcaccctgggcctggtggacgtgtcatggaacgccatccgcatcggcatgtacgtgctgcacctggagagctggctgcagtacttcccgctagctcagattcacttcgtcagtggcgagcgactcatcactgacccggccggcgagatggggcgagtccaggacttcctgggcattaagagattcatcacggacaagcacttctatttcaacaagaccaaaggattcccttgcttgaaaaaaacagaatcgagcctcctgcctcgatgcttgggcaaatcaaaagggagaactcatgtacagattgatcctgaagtgatagaccagctccgagaattttatagaccgtataatatcaaattttatgaaaccgttgggcaggacttcaggtgggaataagcccacgaaaggaaagggctctcaagggctcttctgctcatctcttccgtgagatttgctcccagaccctctgatctccctccaacaaaccctggctccagccccctttcccaacttgagttgcatcatcttggaaccaggaagcccagctaaagccaagagaccagagagtccctgccactagttttcatcagtctgttcaagcaaagttgatctgctcctggcacgtccagtaaattccagaatcattctcctttctgcccataaagggccttggagaattgctttaagaagagtgaatgttccaatgatgatagatattataagcgatgatggttctgttgctatgaacacagcagtcggtccctgtcattgtccacccaggagtggccttgttaattccaagtggcatgtatcttccctctgagcttcatttcttcaagatgctctgggtggtgggatgggagaccatcctcagccctcctcagaccttatcaattcattgagagattgcaaagctgaaagcacctccggccactcctgggagacagaccctttggtgatgaaataaaccagtgacttcagagcctatggtctcaactgtgcttgaaaaacactgtctctgaaaacaactttgtgattctccctgctccctgtggacaaaagcacataattctgctgttacgggtactttgctcatacgagctttcatgttcagcatgcaatggaatcatgcttgtccatgtgaaataaatat

SEQ ID NO: 9502 - DNA, 3203 bp, Homo sapiens
  source 1..3203: mol_type = unassigned DNA; mol_type = unassigned DNA
cagcgcgcggcggcggcggcagaggctgaagcagaagccgcggcggagccggggaagcgggggcgctgcagacggagcaggtgccgccggcgggtccgcgcgcccccctcggtccccttgcctgaggctgaggggggggcggtggtgggggggccacccggactcggcgggcagcgtggggcggggggccatgcggccgggctcccccctggcgcagcgggacagcggccagggccgggggcgcagcggcgtcgcttcatgcagccggggcggctgggcagcggcggcggcggcggcggcggcggcggcggcgggggcggcggctgaaaccatgtccgggcagcgccgggggctgccgccgccgccgccgccgccgcgagccgggagccgcgatggcccggtggcccgcacctcctccgcctccgcctccgcctccacctctggccgcgccgccgccgcccggcgcctctgctaaggggccgccggcgcgcaagctgctttttatgtgcaccttgtccctgtctgtcacctacctgtgctacagcctcctgggcggctcgggctccctgcaattccctctggcgctgcaggagtcgccgggcgccgccgccgagcccccgccgagcccgccgccaccctctctgctgcctacccccgtgcgcctcggcgccccctcgcagccgcccgcgccgccgccgctggacaacgcgagccacggggagccgcccgagcccccagagcagccagccgcccccgggaccgacggctgggggctgccgagcggcggcggaggcgcccaggacgcctggctccggaccccgctggcccccagcgagatgatcacggctcagagcgcgctgccggagagggaagcgcaggagtccagcaccaccgacgaggatctcgcaggccggagagcggccaacgggagcagcgagaggggcggcgccgtcagcacccccgactatggggagaagaagctgccacaggcgctcatcatcggggtcaagaaaggagggacccgcgcgctgctggaggcgatccgcgtgcacccggacgtgcgggcggtgggcgtagagccgcacttcttcgacaggaactacgaaaaggggttggagtggtacagaaatgtgatgcccaagactttggatgggcaaataaccatggagaagactccaagttactttgtgacaaatgaggctcccaagcgcattcactccatggccaaggacatcaaactgattgtggtggtgagaaaccccgtgaccagggccatctctgactacacgcagacactgtcaaagaaacccgagatccccacctttgaggtgctggccttcaaaaaccggaccctcgggctgatcgatgcttcctggagtgccattcgaatagggatctatgcgctgcatctggaaaactggctccagtatttccccctctcccagatcctctttgtcagtggtgagcgactcattgtggaccccgccggggaaatggccaaagtacaggattttctaggcctcaaacgtgttgtgactgagaagcatttctatttcaacaaaaccaaggggttcccttgcctaaagaagccagaagacagcagtgccccgaggtgcttaggcaagagcaaaggtcggactcatcctcgcattgacccagatgtcatccacagactgaggaaattctacaaacccttcaacttgatgttttaccaaatgactggtcaagattttcagtgggaacaggaagagggtgataaatgaggctagagaggcagaggaaggctagtcaataagctaaggaggctccttgcctgagtccttgaataccccagcttctgcagcttcacttgctggagtgccaagtagatctcctcctccttcatgcagccaggattgcctccagtgctgttagcttaggcaaacaggtggatcccatggcatccccatggaggaaccaggcccatctgggcagcagcatctggttgaccagatggccaccagaacccactgttcattcttatcttctgctagttaatatagcctgaagacagaggataaatagttgtcaatgtcagagacagtgctattaatgtatatgtgagcgacaaaaaaggtctgctttataggggttctcactctagcttggggagccagggttctagccctgtatctgtcatgggcacctgctgtctaaacctctgcttgggcttctccccagaatgcactttgtggctgagtgctccaggactcctagggagcaaggtcctccctctaaggtgtttctagtcttctctttaaaggtctcatcccacaacccctgacttcctccctccccacatcatgaaggcagaggcatgcacattcctcactgaaaaagaaaacacacacccacccacacacacacacacagaagaaaatgaaagctgacacacctcgaagccttctttccaagagccctctaaatggggttgggtctcactcttcatgagtatcctgggttgtgcagaagcttagcatatgcccttgtgttcggatcaggcccacagggctgctcaaagagtagagtaattgtaaccgaggtcagagctctggggttggcagagatgagtggccatatctgggggtaaaagaagaaatcctgtcctcttggtgggaggttaccttacctgaagaccatctctcccaagcactgtagttctgagcatgtttttggggtggactctgtcccctagggtccctagaagggcaaagaccagagagttgacaagtctgttattaggaataatccttagccatgtaatggagaaaggagcagtcagcattcttccaatttgccccaccaccacctcctcgggcttcattttctctatttagagatggcagagagtgaggtagtggcgagaaagctgactccattcatcagatccagtttatgagggttgggggtgagcaagggctgtctgcagaaacccccatcaagagctgctgaatgaagtgtcccttcccatcagtttgattcaattaaaatgcatcatttgacataaagcacttgttcacagatctccaaaaccaggaattgttctagtaaaactggaaatttgtatgagtggggggagttaaatctgttcagctgttattaaactgtcatttctcccgctaaatgaaaaccgtgttgttataaagcttaatgcaacctgatta

SEQ ID NO: 9503 - DNA, 772 bp, Homo sapiens
  source 1..772: mol_type = unassigned DNA; mol_type = unassigned DNA
gctggatctgcattaaatgtcgaaaggaaggcggagaggggtgagacaagaggtgggaggtgaggcaggtgggagcctgaccctggagaaccccgcaggtggtgcttctgactttcagtttcagctttgacaccagcatggagctgactgtttgtcctttgctctggtatttagagaaatgtgatgcccaagactttggatgggcaaataaccatggagaagactccaagttactttgtgacaaatgaggctcccaagcgcattcactccatggccaaggacatcaaactgattgtggtggtgagaaaccccgtgaccagggccatctctgactacacgcagacactgtcaaagaaacccgagatccccacctttgaggtgctggccttcaaaaaccggaccctcgggctgatcgatgcttcctggagtgccattcgaatagggatctatgcgctgcatctggaaaactggctccagtatttccccctctcccagatcctctttgtcagtggtgagcgactcattgtggaccccgccggggaaatggccaaagtacaggattttctaggcctcaaacgtgttgtgactgagaagcatttctatttcaacaaaaccaaggggttcccttgcctaaagaagccagaagacagcagtgccccgaggtgcttaggcaagagcaaaggtcggactcatcctcgcattgacccagatgtcatccacagactgaggaaattctacaaacccttcaacttgatgttttaccaaatgactg

SEQ ID NO: 9504 - DNA, 4441 bp, Homo sapiens
  source 1..4441: mol_type = unassigned DNA; mol_type = unassigned DNA
aagccaggctgacctttatgctcccagaatcatcagccttttcattggaaaccatggaaggacggttctgggaaaataatgaaaatcataccacaccatagagacaaccagaagccctgctcagatgacagagttctcctcgccttccagaaaatgcccccgcttccgctggagaatggaaattggcaaagagagacggaaaagctccaatttgcgcctttgctattttaggagaggttgaaattacgagccaaagtggagtgatgcgctaagcggagtgacctccgtactccaagaaaagagaaaacccaggttctctgcttgtgaagtggctcgagctcttaggcgtgaggcattattatataaattcaagctcgctcgtgatccttagtaccctgagttgcctgaaggggggaatggcactgcctgcgtgtgcagtccgggagttcgagccgccgcggcaaccggagcgaggagcgcccgtccgcaccacctgtccccgccggcattccagagtagaggccgaattggcagcgagccggcccgggtcggtcgccgcctcagttcgcgcgggccctcctaggggtgtgtctcacggattccacacccggccgctcctggacaagccccgaaaggcgtcttcttccctggcgggagccgcgtgcgccccgcttttcgcgctgctgtcccggggccgccgcaggcggatgcacgtcctcaggcgacgctgggacctgggctccctctgccgggccctgctcactcggggcctggccgccctgggccactcgctgaagcacgtgctcggtgcgatcttctccaagattttcggccccatggccagcgtcgggaacatggatgagaaatccaacaagctgctgctagctttggtgatgctcttcctatttgccgtgatcgtcctccaatacgtgtgccccggcacagaatgccagctcctccgcctgcaggcgttcagctccccggtgccggacccgtaccgctcggaggatgagagctccgccaggttcgtgccccgctacaatttcacccgcggcgacctcctgcgcaaggtagacttcgacatcaagggcgatgacctgatcgtgttcctgcacatccagaagaccgggggcaccactttcggccgccacttggtgcgtaacatccagctggagcagccgtgcgagtgccgcgtgggtcagaagaaatgcacttgccaccggccgggtaagcgggaaacctggctcttctccaggttctccacgggctggagctgcgggttgcacgccgactggaccgagctcaccagctgtgtgccctccgtggtggacggcaagcgcgacgccaggctgagaccgtccaggaacttccactacatcaccatcctccgagacccagtgtcccggtacttgagtgagtggaggcatgtccagagaggggcaacatggaaagcatccctgcatgtctgcgatggaaggcctccaacctccgaagagctgcccagctgctacactggcgatgactggtctggctgccccctcaaagagtttatggactgtccctacaatctagccaacaaccgccaggtgcgcatgctctccgacctgaccctggtaggctgctacaacctctctgtcatgcctgaaaagcaaagaaacaaggtccttctggaaagtgccaagtcaaatctgaagcacatggcgttcttcggcctcactgagtttcagcggaagacccaatatctgtttgagaaaaccttcaacatgaactttatttcgccatttacccagtataataccactagggcctctagtgtagagatcaatgaggaaattcaaaagcgtattgagggactgaattttctggatatggagttgtacagctatgccaaagacctttttttgcagaggtatcagtttatgaggcagaaagagcatcaggaggccaggcgaaagcgtcaggaacaacgcaaatttctgaagggaaggctccttcagacccatttccagagccagggtcagggccagagccagaatccgaatcagaatcagagtcagaacccaaatccgaatgccaatcagaacctgactcagaatctgatgcagaatctgactcagagtttgagccagaaggagaaccgggaaagcccgaagcagaactcaggcaaggagcagaatgataacaccagcaatggcaccaacgactacataggcagtgtagagaaatggcgttaaatggctcaaaaaggcctgtacatacttctcccaaagcgccactgaaaagatggcatagcttaaaagatgaaagtgtccaaacacatcctgcttccttcattggggaagttttaaaaaaaagtttagatgttgcctttacagttgcctttcaattcagtgttatactgtgtgtaggtaaaacaaatctcaatatggaattaaattgtctttttggggttggactaaatatgaaatccgaaagccaaaccagactcaccagaaattgctgtttagatattttaagaagttcttaaattagttatggagacaaagtgaaaacataaaatgtgaccatttaacttatggctaagaaatggactttaaattattcatgatacactgttaaaacccaatcttggaatcaaatattttttccaggggtgagaataagtataaacataaagcaactaaaatgaaacataaaaccttttattttcttctgattttaacaaggaatctatttaaatagaataacaactgatggtgaatcttaccgagctgtagaaaataaaaaattcctctccaaacatgggtagttttatgtcaaaatattggcttttcaagaacaggactcatatcttgatatttaagagatgtttaaaattttaaactttttctaccttctactgtttaaaggttttacacagggtgtatctcacattaaacaaaacacctttttttcaaaatgaaataccaatgtaaagatctaatttccaggcgctttcagggcactgtaatttcaacaatactggaatcattttggcgctgcttctcattcattttaaggcttctctgaattgtgctcattccaaattaacccatgtatagaatctttcttcatcatctaaatggtgtgttgctgaagttattgtggtatataatcctggattaaagtcaggactttctttctatagaattattttatcaatatttgtgtagtgaggtcctaatcaagaaacttgaacaggataatgtgtctaaaaatattgctgaagttattcttgatcagatagaatttaacctaaaatgtgaactcttacttactttttgtacatctctattgtaatgtttccagttgggccaactatttctagccctttagttctttttcatgttgacagatttgtagacaattacaaaagccaaaaaaggataaaataagcattaggaaggctagccagttattcaatagcaccttgataatgtgggcaaacccttctacaaagtttttgttttgaaaagagcaaaagtaaaaagtgttctgtagtgaggttacatatcaggaacatatgagttgagcagagtaatttggtagtgtaagtcgatgcaaaaatacttctatggtacctattacaagctgaccaagataaaaagaagtatgtaacccactgtgctgtcaagcatcatgattccgggcagttttcattttactgtggattttgctatacttatgcaaggacttacactaacctcctggctgtaaatcaaacaaggtgactgaaagtggcatttatgttttcacaagggacatgcttagaagtgtgaccataaagtcacatcttgtacaatctgctcatgtgtttcatctgtagtaatatagccacaaactggacaagaagctgggtatttgggtttaaaatagattttcttgactctgagcttgtatcagtatttctagcttttgttttgtctgacagtattgcagtcttgaaaatcctgagagctaaaaaactgaaaggaatttttccacaccttgaagtcacagtgttttagagtaaaactattttgtgtacaattgtgtttttaaaatagttagtagatcactatggtatttcaattttctttagttttaattgaaaatgtttgcttttaaaactgataggtattgttggaaagcaggatgaagcctgagccagtggaaaagcttgttacagaaaaaacattttgtgttattgctgtggtgtgcatgatttgcaaagattaagtgcattttctctgtctatactgattattgtatatagaggatgttataaatatacatatacatttttgccattatgtaaatcccatgatttcaactgtaaacatctgtccattggtgtagctttacaaaccattcactgattttgtgtaatttaacaatagatatgaaataaagtttaaattac

SEQ ID NO: 9505 - DNA, 2607 bp, Homo sapiens
  source 1..2607: mol_type = unassigned DNA; mol_type = unassigned DNA
aagccaggctgacctttatgctcccagaatcatcagccttttcattggaaaccatggaaggacggttctgggaaaataatgaaaatcataccacaccatagagacaaccagaagccctgctcagatgacagagttctcctcgccttccagaaaatgcccccgcttccgctggagaatggaaattggcaaagagagacggaaaagctccaatttgcgcctttgctattttaggagaggttgaaattacgagccaaagtggagtgatgcgctaagcggagtgacctccgtactccaagaaaagagaaaacccaggttctctgcttgtgaagtggctcgagctcttaggcgtgaggcattattatataaattcaagctcgctcgtgatccttagtaccctgagttgcctgaaggggggaatggcactgcctgcgtgtgcagtccgggagttcgagccgccgcggcaaccggagcgaggagcgcccgtccgcaccacctgtccccgccggcattccagagtagaggccgaattggcagcgagccggcccgggtcggtcgccgcctcagttcgcgcgggccctcctaggggtgtgtctcacggattccacacccggccgctcctggacaagccccgaaaggcgtcttcttccctggcgggagccgcgtgcgccccgcttttcgcgctgctgtcccggggccgccgcaggcggatgcacgtcctcaggcgacgctgggacctgggctccctctgccgggccctgctcactcggggcctggccgccctgggccactcgctgaagcacgtgctcggtgcgatcttctccaagattttcggccccatggccagcgtcgggaacatggatgagaaatccaacaagctgctgctagctttggtgatgctcttcctatttgccgtgatcgtcctccaatacgtgtgccccggcacagaatgccagctcctccgcctgcaggcgttcagctccccggtgccggacccgtaccgctcggaggatgagagctccgccaggttcgtgccccgctacaatttcacccgcggcgacctcctgcgcaaggtagacttcgacatcaagggcgatgacctgatcgtgttcctgcacatccagaagaccgggggcaccactttcggccgccacttggtgcgtaacatccagctggagcagccgtgcgagtgccgcgtgggtcagaagaaatgcacttgccaccggccgggtaagcgggaaacctggctcttctccaggttctccacgggctggagctgcgggttgcacgccgactggaccgagctcaccagctgtgtgccctccgtggtggacggcaagcgcgacgccaggctgagaccgtccaggtggaggatttttcagattctagatgcagcaagtaaggataaacggggttctccaaacactaacgcaggcgccaactctccgtcatccacaaagacccggaacacatctaagagtgggaagaacttccactacatcaccatcctccgagacccagtgtcccggtacttgagtgagtggaggcatgtccagagaggggcaacatggaaagcatccctgcatgtctgcgatggaaggcctccaacctccgaagagctgcccagctgctacactggcgatgactggtctggctgccccctcaaagagtttatggactgtccctacaatctagccaacaaccgccaggtgcgcatgctctccgacctgaccctggtaggctgctacaacctctctgtcatgcctgaaaagcaaagaaacaaggtccttctggaaagtgccaagtcaaatctgaagcacatggcgttcttcggcctcactgagtttcagcggaagacccaatatctgtttgagaaaaccttcaacatgaactttatttcgccatttacccagtataataccactagggcctctagtgtagagatcaatgaggaaattcaaaagcgtattgagggactgaattttctggatatggagttgtacagctatgccaaagacctttttttgcagaggtatcagtttatgaggcagaaagagcatcaggaggccaggcgaaagcgtcaggaacaacgcaaatttctgaagggaaggctccttcagacccatttccagagccagggtcagggccagagccagaatccgaatcagaatcagagtcagaacccaaatccgaatgccaatcagaacctgactcagaatctgatgcagaatctgactcagagtttgagccagaaggagaaccgggaaagcccgaagcagaactcaggcaaggagcagaatgataacaccagcaatggcaccaacgactacataggcagtgtagagaaatggcgttaaatggctcaaaaaggcctgtacatacttctcccaaagcgccactgaaaagatggcatagcttaaaagatgaaagtgtccaaacacatcctgcttccttcattggggaagttttaaaaaaaagtttagatgttgcctttacagttgcctttcaattcagtgttatactgtgtgtaggtaaaacaaatctcaatatggaattaaattgtctttttggggttggactaaatatgaaatccgaaagccaaaccagact

SEQ ID NO: 9506 - DNA, 387 bp, Homo sapiens
  source 1..387: mol_type = unassigned DNA; mol_type = unassigned DNA
cctgcagcagaatcacctggcgaggaggtgcctgttgaaaaagataagaagtttcattcagaaaagatgaccctgaaatcctggagcttttgcccaaaaggctctgaaacatgcatcttgcctatggagcccgcatcctagcctgccttacttgggctgccttgataccatcccccatcagtgtgacaatgatgattctgggcacgtacaagcctctttcccaggaagctggagcaccaaatgacagctgtgtttgagggatggctccgttgacaactgattcagaatattgacaagacttcattatgtttttgctcttgtgtttacatctttcaagtgtgtttgaaaaatcaagaaaacaatacaatttggtttcccaaattgaaa

SEQ ID NO: 9507 - DNA, 1938 bp, Homo sapiens
  source 1..1938: mol_type = unassigned DNA; mol_type = unassigned DNA
atggcactgcctgcgtgtgcagtccgggagttcgagccgccgcggcaaccggagcgaggagcgcccgtccgcaccacctgtccccgccggcattccagagtagaggccgaattggcagcgagccggcccgggtcggtcgccgcctcagttcgcgcgggccctcctaggggtgtgtctcacggattccacacccggccgctcctggacaagccccgaaaggcgtcttcttccctggcgggagccgcgtgcgccccgcttttcgcgctgctgtcccggggccgccgcaggcggatgcacgtcctcaggcgacgctgggacctgggctccctctgccgggccctgctcactcggggcctggccgccctgggccactcgctgaagcacgtgctcggtgcgatcttctccaagattttcggccccatggccagcgtcgggaacatggatgagaaatccaacaagctgctgctagctttggtgatgctcttcctatttgccgtgatcgtcctccaatacgtgtgccccggcacagaatgccagctcctccgcctgcaggcgttcagctccccggtgccggacccgtaccgctcggaggatgagagctccgccaggttcgtgccccgctacaatttcacccgcggcgacctcctgcgcaaggtagacttcgacatcaagggcgatgacctgatcgtgttcctgcacatccagaagaccgggggcaccactttcggccgccacttggtgcgtaacatccagctggagcagccgtgcgagtgccgcgtgggtcagaagaaatgcacttgccaccggccgggtaagcgggaaacctggctcttctccaggttctccacgggctggagctgcgggttgcacgccgactggaccgagctcaccagctgtgtgccctccgtggtggacggcaagcgcgacgccaggctgagaccgtccaggtggaggatttttcagattctagatgcagcaagtaaggataaacggggttctccaaacactaacgcaggcgccaactctccgtcatccacaaagacccggaacacatctaagagtgggaagaacttccactacatcaccatcctccgagacccagtgtcccggtacttgagtgagtggaggcatgtccagagaggggcaacatggaaagcatccctgcatgtctgcgatggaaggcctccaacctccgaagagctgcccagctgctacactggcgatgactggtctggctgccccctcaaagagtttatggactgtccctacaatctagccaacaaccgccaggtgcgcatgctctccgacctgaccctggtaggctgctacaacctctctgtcatgcctgaaaagcaaagaaacaaggtccttctggaaagtgccaagtcaaatctgaagcacatggcgttcttcggcctcactgagtttcagcggaagacccaatatctgtttgagaaaaccttcaacatgaactttatttcgccatttacccagtataataccactagggcctctagtgtagagatcaatgaggaaattcaaaagcgtattgagggactgaattttctggatatggagttgtacagctatgccaaagacctttttttgcagaggtatcagtttatgaggcagaaagagcatcaggaggccaggcgaaagcgtcaggaacaacgcaaatttctgaagggaaggctccttcagacccatttccagagccagggtcagggccagagccagaatccgaatcagaatcagagtcagaacccaaatccgaatgccaatcagaacctgactcagaatctgatgcagaatctgactcagagtttgagccagaaggagaaccgggaaagcccgaagcagaactcaggcaaggagcagaatgataacaccagcaatggcaccaacgactacataggcagtgtagagaaatggcgttaa

SEQ ID NO: 9508 - DNA, 1818 bp, Homo sapiens
  source 1..1818: mol_type = unassigned DNA; mol_type = unassigned DNA
atggcactgcctgcgtgtgcagtccgggagttcgagccgccgcggcaaccggagcgaggagcgcccgtccgcaccacctgtccccgccggcattccagagtagaggccgaattggcagcgagccggcccgggtcggtcgccgcctcagttcgcgcgggccctcctaggggtgtgtctcacggattccacacccggccgctcctggacaagccccgaaaggcgtcttcttccctggcgggagccgcgtgcgccccgcttttcgcgctgctgtcccggggccgccgcaggcggatgcacgtcctcaggcgacgctgggacctgggctccctctgccgggccctgctcactcggggcctggccgccctgggccactcgctgaagcacgtgctcggtgcgatcttctccaagattttcggccccatggccagcgtcgggaacatggatgagaaatccaacaagctgctgctagctttggtgatgctcttcctatttgccgtgatcgtcctccaatacgtgtgccccggcacagaatgccagctcctccgcctgcaggcgttcagctccccggtgccggacccgtaccgctcggaggatgagagctccgccaggttcgtgccccgctacaatttcacccgcggcgacctcctgcgcaaggtagacttcgacatcaagggcgatgacctgatcgtgttcctgcacatccagaagaccgggggcaccactttcggccgccacttggtgcgtaacatccagctggagcagccgtgcgagtgccgcgtgggtcagaagaaatgcacttgccaccggccgggtaagcgggaaacctggctcttctccaggttctccacgggctggagctgcgggttgcacgccgactggaccgagctcaccagctgtgtgccctccgtggtggacggcaagcgcgacgccaggctgagaccgtccaggaacttccactacatcaccatcctccgagacccagtgtcccggtacttgagtgagtggaggcatgtccagagaggggcaacatggaaagcatccctgcatgtctgcgatggaaggcctccaacctccgaagagctgcccagctgctacactggcgatgactggtctggctgccccctcaaagagtttatggactgtccctacaatctagccaacaaccgccaggtgcgcatgctctccgacctgaccctggtaggctgctacaacctctctgtcatgcctgaaaagcaaagaaacaaggtccttctggaaagtgccaagtcaaatctgaagcacatggcgttcttcggcctcactgagtttcagcggaagacccaatatctgtttgagaaaaccttcaacatgaactttatttcgccatttacccagtataataccactagggcctctagtgtagagatcaatgaggaaattcaaaagcgtattgagggactgaattttctggatatggagttgtacagctatgccaaagacctttttttgcagaggtatcagtttatgaggcagaaagagcatcaggaggccaggcgaaagcgtcaggaacaacgcaaatttctgaagggaaggctccttcagacccatttccagagccagggtcagggccagagccagaatccgaatcagaatcagagtcagaacccaaatccgaatgccaatcagaacctgactcagaatctgatgcagaatctgactcagagtttgagccagaaggagaaccgggaaagcccgaagcagaactcaggcaaggagcagaatgataacaccagcaatggcaccaacgactacataggcagtgtagagaaatggcgttaa

SEQ ID NO: 9509 - DNA, 831 bp, Homo sapiens
  source 1..831: mol_type = unassigned DNA; mol_type = unassigned DNA
atgctcttcctatttgccgtgatcgtcctccaatacgtgtgccccggcacagaatgccagctcctccgcctgcaggcgttcagctccccggtgccggacccgtaccgctcggaggatgagagctccgccaggttcgtgccccgctacaatttcacccgcggcgacctcctgcgcaaggtagacttcgacatcaagggcgatgacctgatcgtgttcctgcacatccagaagaccgggggcaccactttcggccgccacttggtgcgtaacatccagctggagcagccgtgcgagtgccgcgtgggtcagaagaaatgcacttgccaccggccgggtaagcgggaaacctggctcttctccaggttctccacgggctggagctgcgggttgcacgccgactggaccgagctcaccagatgcgtcccacacatatggaattgggagcagtcatttagcatctcttataacaggtggaggatttttcagattctagatgcagcaagtaaggataaacggggttctccaaacactaacgcaggcgccaactctccgtcatccacaaagacccggaacacatctaagagtgggaagaacttccactacatcaccatcctccgagacccagtgtcccggtacttgagtgagtggaggcatgtccagagaggggcaacatggaaagcatccctgcatgtctgcgatggaaggcctccaacctccgaagagctgcccagctgctacactggcgatgactggtctggctgccccctcaaagagtttatggactgtccctacaatctagccaacaaccgccagtgcgcatgctctccgacc

SEQ ID NO: 9510 - DNA, 1885 bp, Homo sapiens
  source 1..1885: mol_type = unassigned DNA; mol_type = unassigned DNA
tggtgtaaaagacaatcgcggccacacaccgcgtgggggctgcgcaaagcagaactaggaagctttgctccggtctggacttcgtccctcccagatctctgagctagcaagcactgcagcccgagccaattgcgaaagaccaacaaagcccagcccagcggaaggaacggtttcggagttgtttttctttgatacgggagttcctccttgctctcgcccctactctttctggtgttagatcgagctaccctctaaaagcagtttagagtggtaaaaaaaaaaaaaaacacaccaaacgctcgcagccacaaaagggatgaaatttcttctggacatcctcctgcttctcccgttactgatcgtctgctccctagagtccttcgtgaagctttttattcctaagaggagaaaatcagtcaccggcgaaatcgtgctgattacaggagctgggcatggaattgggagactgactgcctatgaatttgctaaacttaaaagcaagctggttctctgggatataaataagcatggactggaggaaacagctgccaaatgcaagggactgggtgccaaggttcatacctttgtggtagactgcagcaaccgagaagatatttacagctctgcaaagaaggtgaaggcagaaattggagatgttagtattttagtaaataatgctggtgtagtctatacatcagatttgtttgctacacaagatcctcagattgaaaagacttttgaagttaatgtacttgcacatttctggactacaaaggcatttcttcctgcaatgacgaagaataaccatggccatattgtcactgtggcttcggcagctggacatgtctcggtccccttcttactggcttactgttcaagcaagtttgctgctgttggatttcataaaactttgacagatgaactggctgccttacaaataactggagtcaaaacaacatgtctgtgtcctaatttcgtaaacactggcttcatcaaaaatccaagtacaagtttgggacccactctggaacctgaggaagtggtaaacaggctgatgcatgggattctgactgagcagaagatgatttttattccatcttctatagcttttttaacaacattggaaaggatccttcctgagcgtttcctggcagttttaaaacgaaaaatcagtgttaagtttgatgcagttattggatataaaatgaaagcgcaataagcacctagttttctgaaaactgatttaccaggtttaggttgatgtcatctaatagtgccagaattttaatgtttgaacttctgttttttctaattatccccatttcttcaatatcatttttgaggctttggcagtcttcatttactaccacttgttctttagccaaaagctgattacatatgatataaacagagaaatacctttagaggtgactttaaggaaaatgaagaaaaagaaccaaaatgactttattaaaataatttccaagattatttgtggctcacctgaaggctttgcaaaatttgtaccataaccgtttatttaacatatatttttatttttgattgcacttaaattttgtataatttgtgtttctttttctgttctacataaaatcagaaacttcaagctctctaaataaaatgaaggactatatctagtggtatttcacaatgaatatcatgaactctcaatgggtaggtttcatcctacccattgccactctgtttcctgagagatacctcacattccaatgccaaacatttctgcacagggaagctagaggtggatacacgtgttgcaagtataaaagcatcactgggatttaaggagaattgagagaatgtacccacaaatggcagcaataataaatggatcacacttaaa

SEQ ID NO: 9511 - DNA, 843 bp, Homo sapiens
  source 1..843: mol_type = unassigned DNA; mol_type = unassigned DNA
aacctctgcctcccgggttcaagtgattctcctgcctcagcctccccagtagctgggattacagactacaaaggcatttcttcctgcaatgacgaagaataaccatggccatattgtcactgtggcttcggcagctggacatgtctcggtccccttcttactggcttactgttcaagcaagtttgctgctgttggatttcataaaactttgacagatgaactggctgccttacaaataactggagtcaaaacaacatgtctgtgtcctaatttcgtaaacactggcttcatcaaaaatccaagtacaagtttgggacccactctggaacctgaggaagtggtaaacaggctgatgcatgggattctgactgagcagaagatgatttttattccatcttctatagcttttttaacaacattggaaaggatccttcctgagcgtttcctggcagttttaaaacgaaaaatcagtgttaagtttgatgcagttattggatataaaatgaaagcgcaataagcacctagttttctgaaaactgatttaccaggtttaggttgatgtcatctaatagtgccagaattttaatgtttgaacttctgttttttctaattatccccatttcttcaatatcatttttgaggctttggcagtcttcatttactaccacttgttctttagccaaaagctgattacatatgatataaacagagaaatacctttagaggtgactttaaggaaaatgaagaaaaagaaccaaaatgactttattaaaataatttccaagattatttgtggctcacctgaaggctttgcaaaatttgtaccataaccgtttatttaac

SEQ ID NO: 9512 - DNA, 641 bp, Homo sapiens
  source 1..641: mol_type = unassigned DNA; mol_type = unassigned DNA
cctgtaatcccagctacctgggaggctgagacagaagaattgcttgaacccgggaagcagaggttgcgttcaagcaagtttgctgctgttggatttcataaaactttgacagatgaactggctgccttacaaataactggagtcaaaacaacatgtctgtgtcctaatttcgtaaacactggcttcatcaaaaatccaagtacaagtttgggacccactctggaacctgaggaagtggtaaacaggctgatgcatgggattctgactgagcagaagatgatttttattccatcttctatagcttttttaacaacattggaaaggatccttcctgagcgtttcctggcagttttaaaacgaaaaatcagtgttaagtttgatgcagttattggatataaaatgaaagcgcaataagcacctagttttctgaaaactgatttaccaggtttaggttgatgtcatctaatagtgccagaattttaatgtttgaacttctgttttttctaattatccccatttcttcaatatcatttttgaggctttggcagtcttcatttactaccacttgttctttagccaaaagctgattacatatgatataaacagagaaatacctttagaggtgactttaaggaaaatga

SEQ ID NO: 9513 - DNA, 571 bp, Homo sapiens
  source 1..571: mol_type = unassigned DNA; mol_type = unassigned DNA
agataaagaaaggagttggggaccatccgagtcatcgtctgtgattttataaagactacaaaggcatttcttcctgcaatgacgaagaataaccatggccatattgtcactgtggcttcggcagctggacatgtctcggtccccttcttactggcttactgttcaagcaagtttgctgctgttggatttcataaaactttgacagatgaactggctgccttacaaataactggagtcaaaacaacatgtctgtgtcctaatttcgtaaacactggcttcatcaaaaatccaagtacaagtttgggacccactctggaacctgaggaagtggtaaacaggctgatgcatgggattctgactgagcagaagatgatttttattccatcttctatagcttttttaacaacattggaaaggatccttcctgagcgtttcctggcagttttaaaacgaaaaatcagtgttaagtttgatgcagttattggatataaaatgaaagcgcaataagcacctagttttctgaaaactgatttaccaggtttaggttgatgtcatctaatagtgccagaat

SEQ ID NO: 9514 - DNA, 851 bp, Homo sapiens
  source 1..851: mol_type = unassigned DNA; mol_type = unassigned DNA
gatcgagctaccctctaaaagcagtttagagtggtaaaaaaaaaaaaaaacacaccaaacgctcgcagccacaaaagggatgaaatttcttctggacatcctcctgcttctcccgttactgatcgtctgctccctagagtccttcgtgaagctttttattcctaagaggagaaaatcagtcaccggcgaaatcgtgctgattacaggagctgggcatggaattgggagactgactgcctatgaatttgctaaacttaaaagcaagctggttctctgggatataaataagcatggactggaggaaacagctgccaaatgcaagggactgggtgccaaggttcatacctttgtggtagactgcagcaaccgagaagatatttacagctctgcaaagaagactacaaaggcatttcttcctgcaatgacgaagaataaccatggccatattgtcactgtggcttcggcagctggacatgtctcggtccccttcttactggcttactgttcaagcaagtttgctgctgttggatttcataaaactttgacagatgaactggctgccttacaaataactggagtcaaaacaacatgtctgtgtcctaatttcgtaaacactggcttcatcaaaaatccaagtacaagtttgggacccactctggaacctgaggaagtggtaaacaggctgatgcatgggattctgactgagcagaagatgatttttattccatcttctatagcttttttaacaacattggaaaggatccttcctgagcgtttcctggcagttttaaaacgaaaaatcagtgttaagtttgatgcagttattggatataaaatgaaagcgcaataag

SEQ ID NO: 9515 - DNA, 569 bp, Homo sapiens
  source 1..569: mol_type = unassigned DNA; mol_type = unassigned DNA
cctgatcaacatggagaaaccctgtctctactaaaaatacaaaattagccaggcatggtggcacatgcctgtaatcccagctacctgggaggctgagacagaagaattgcttgaacccgggaagcagaggttgcgttcaagcaagtttgctgctgttggatttcataaaactttgacagatgaactggctgccttacaaataactggagtcaaaacaacatgtctgtgtcctaatttcgtaaacactggcttcatcaaaaatccaagtacaagtttgggacccactctggaacctgaggaagtggtaaacaggctgatgcatgggattctgactgagcagaagatgatttttattccatcttctatagcttttttaacaacattggaaaggtaagtgacagttaagaaaccttagaaatgaaaggtaaaataacaattatctattgcattttttactgacatttaaatcaggcagttgataaagtacagttaaatggaattgacttaataaaaataacaggctcaataacattgaggcaagattgatacagctcttgggtaaatgaacc

SEQ ID NO: 9516 - DNA, 563 bp, Homo sapiens
  source 1..563: mol_type = unassigned DNA; mol_type = unassigned DNA
agttcctccttgctctcgcccctactctttctggtgttagatcgagctaccctctaaaagcagtttagagtggtaaaaaaaaaaaaaaacacaccaaacgctcgcagccacaaaagggatgaaatttcttctggacatcctcctgcttctcccgttactgatcgtctgctccctagagtccttcgtgaagctttttattcctaagaggagaaaatcagtcaccggcgaaatcgtgctgattacaggagctgggcatggaattgggagactgactgcctatgaatttgctaaacttaaaagcaagctggttctctgggatataaataagagtctcgcactgttgcccggactggtgtgcggtggcaaaatcttggcttgctgcaacctctgcctcccggattcaagtgattctcctgcctcagcctcccaagtagctaggattacagcatggactggaggaaacagctgccaaatgcaagggactgggtgccaaggttcatacctttgtggtagactgcagcaaccgagaagatatttacagctctgcaaagaaggtgaaggca

SEQ ID NO: 9517 - DNA, 2571 bp, Homo sapiens
  source 1..2571: mol_type = unassigned DNA; mol_type = unassigned DNA
actggcggaaccccgggggacgcggtgatgggaggagtgtgggaggggcagtggaactggagtcagctaatggctgacgcactacgcgcagagggaaagacgggtcaccaatagcgacacggatatggccccgcgggcggggtttaggcccaaagtggtgtcggagcagcgcctattagtgtcatcctcaccgtcacggccggcgcctcctcctggattcattcactcgctcttttcattcacgaaggtagtgaggcctagtggaaagccatggagagcgctctccccgccgccggcttcctgtactgggtcggcgcgggcaccgtggcctacctagccctgcgtatttcgtactcgctcttcacggccctccgggtctggggagtggggaatgaggcgggggtcggcccggggctcggagaatgggcagttgtcacaggtagtactgatggaattggaaaatcatatgcagaagagttagcaaagcatggaatgaaggttgtccttatcagcagatcaaaggataaacttgaccaggtttccagtgaaataaaagaaaaattcaaagtggagacaagaaccattgctgttgactttgcatcagaagatatttatgataaaattaaaacaggcttggctggtcttgaaatcggcatcttagtgaacaacgtgggaatgtcgtatgagtatcctgaatactttttggatgttcctgacttggacaatgtgatcaagaaaatgataaatattaatattctttctgtttgtaagatgacacaattggtactgcctggcatggtggaaagatccaaaggggctattctgaacatttcatctggcagtggcatgctccctgtcccactcttgaccatctattctgcaaccaagacttttgtagatttcttctctcagtgcctccatgaggagtataggagcaagggcgtctttgtgcagagtgtcctgccatacttcgtagctacaaaactggctaaaatccggaagccaactttggataagccctctccggagacgtttgtgaagtctgcaattaaaacagtcggcctgcaatcccgaaccaatggatacctgatccatgctcttatgggctcgataatctcaaacctgccttcttggatttatttgaaaatagtcatgaatatgaacaagtctacacgggctcactatctgaagaaaaccaagaagaactaagcattgataactgcattgtaacttggccagatgctccagcatatgcacgttcactgcaaagcaccctactggttttgaaaatctgaccttgtcatttcaatagttattaacatgactaaatattatcttaattaagaggaaaatagaagttgcttttaggggtttctgacatatattctggatactatccgaggtaattttgaagtttaatataaatgctcatatcaaatgaatatagaactaatattgtcgggaacacctaatagaaaggaatactattatagcaaatcacagaatgatagactcaagcataaaacttggcagttttatctgcttcaaaatgccattgatcattattcctgtattttctctgaaactgattataaaaaccaatgtccagctactcttttgtttttgacacttgaagaaatggagatcgatttgatttgtttataagcagacacactgcaatttacaaagatctctttacggttttataaaattatcttccagtttgtacatttatatggaattgttctttatcaagggtagctaatgacatgaaaataattgtgaaatatggaattatttctgacacatgaagcccactaaactatgctttcttataatgcatatttcttctcagtttaaatgtatgtaaatatcgaagctatatggtatgatttataaagataaatgggccaaagtgtacattgagactggcagccatctatggtaccactgaaaccctgacccagaaaagtggcttgcttggacacccagctgcctttgtttctgcattaaaccaatattgatcacacatatgacacaggctagtcctataaaagtaatgacttcatagaaatggcattataatttttaagttgatactctacaggtagctattgatataattagttttaataaaacatgctgcaaccatggtatacaacaaaaatacatttctttggtgattgaaattaaggccgtatttacaatgacttaatataagactgacttttatcctgcttcataacttgtatggagaactcaccaagaaagaattcaatactgtgaaatatgcagcaagaagattggtctttacctaggctgtgtttcctaagctctgagttttcagcaccagtagatttgtattaaaagaaaaaaaaatggggccttagcttctggcttttaattttgccagctaaggacataaaacaaaaataaacaaacaaaaacaaatagccatctgctatcagcatcattatgtaaaagaaaatatattttagcccctaaaattaggaagaatgtaatctcagaataaaggttgtcatttaagttgaataaatatatagctttatg

SEQ ID NO: 9518 - DNA, 559 bp, Homo sapiens
  source 1..559: mol_type = unassigned DNA
atatggccccgcgggcggggtttaggcccaaagtggtgtcggagcagcgcctattagtgtcatcctcaccgtcacggccggcgcctcctcctggattcattcactcgctcttttcattcacgaagttgtcacaggtagtactgatggaattggaaaatcatatgcagaagagttagcaaagcatggaatgaaggttgtccttatcagcagatcaaaggataaacttgaccaggtttccagtgaaataaaagaaaaattcaaagtggagacaagaaccattgctgttgactttgcatcagaagatatttatgataaaattaaaacaggcttggctggtcttgaaatcggcatcttagtgaacaacgtgggaatgtcgtatgagtatcctgaatactttttggatgttcctgacttggacaatgtgatcaagaaaatgataaatattaatattctttctgtttgtaagatgacacaattggtactgcctggcatggtggaaagatccaaaggggctattctgaacatttcatctggcagtggcatgctccctgtcccactc

SEQ ID NO: 9519 - DNA, 611 bp, Homo sapiens
  source 1..611: mol_type = unassigned DNA
aaagtggtgtcggagcagcgcctattagtgtcatcctcaccgtcacggccggcgcctcctcctggattcattcactcgctcttttcattcacgaaggtagtgaggcctagtggaaagccatggagagcgctctccccgccgccggcttcctgtactgggtcggcgcgggcaccgtggcctacctagccctgcgtatttcgtactcgctcttcacggccctccgggtctggggagtggggaatgaggcgggggtcggcccggggctcggagaatgggcagaagaaaaattcaaagtggagacaagaaccattgctgttgactttgcatcagaagatatttatgataaaattaaaacaggcttggctggtcttgaaatcggcatcttagtgaacaacgtgggaatgtcgtatgagtatcctgaatactttttggatgttcctgacttggacaatgtgatcaagaaaatgataaatattaatattctttctgtttgtaagatgacacaattggtactgcctggcatggtggaaagatccaaaggggctattctgaacatttcatctggcagtggcatgctccctgtcccactcttgaccatctattctgcaacc

SEQ ID NO: 9520 - DNA, 563 bp, Homo sapiens
  source 1..563: mol_type = unassigned DNA
attcactcgctcttttcattcacgaaggtagtgaggcctagtggaaagccatggagagcgctctccccgccgccggcttcctgtactgggtcggcgcgggcaccgtggcctacctagccctgcgtatttcgtactcgctcttcacggccctccgggtctggggagtggggaatgaggcgggggtcggcccggggctcggagaatgggcagatgacacaattggtactgcctggcatggtggaaagatccaaaggggctattctgaacatttcatctggcagtggcatgctccctgtcccactcttgaccatctattctgcaaccaagacttttgtagatttcttctctcagtgcctccatgaggagtataggagcaagggcgtctttgtgcagagtgtcctgccatacttcgtagctacaaaactggctaaaatccggaagccaactttggataagccctctccggagacgtttgtgaagtctgcaattaaaacagtcggcctgcaatcccgaaccaatggatacctgatccatgctcttatgggctcgataatctcaaacct

SEQ ID NO: 9521 - DNA, 994 bp, Homo sapiens
  source 1..994: mol_type = unassigned DNA
cactcgctcttttcattcacgaaggtagtgaggcctagtggaaagccatggagagcgctctccccgccgccggcttcctgtactgggtcggcgcgggcaccgtggcctacctagccctgcgtatttcgtactcgctcttcacggccctccgggtctggggagtggggaatgaggcgggggtcggcccggggctcggagaatgggcagttgtcacaggtagtactgatggaattggaaaatcatatgcagaagagttagcaaagcatggaatgaaggttgtccttatcagcagatcaaaggataaacttgaccaggtttccagtgaaataagcaattatacttgagacctgaattacaatatggcaaagactcttaactaacttctactcaatcaaccagatggataaaccaatgctgttcatttgtttggtaaaacatactaactgatgtccccagtttgctgaccatttgtggccaggaagcttctgtgtataatgcttatatacttttatcctcacaaatcaaattgtttacttattaagagtcaatttgtgtttgtttccaaacttatgttgggtatattttttattaaatattctgtaaaatgatgaactattagtgtaaaagctagagttagttctataaaaactaagttgaatgctctaaaaaaagtgagtaaaattacttctttgaaaaattggccgtcaaattagtgttgaacaaagacaaatgtaaaatattggaagaacttacaaaaaagaaatctgctctcctgattgtttcatatgtgttgaagtttgtgctgtactttactagaactgaaattgtaatcataaatgatagaatatgggtgtgatgcatgcaagaaagactggaattcaagtccgcagatccaatctcaaagacaaggtcttggccctacacagaggattggtgaatgaattacatttatacatggtttaagtgaaaataaaatgattaccatgtgtattta

SEQ ID NO: 9522 - DNA, 540 bp, Homo sapiens
  source 1..540: mol_type = unassigned DNA
attcacgaaggtagtgaggcctagtggaaagccatggagagcgctctccccgccgccggcttcctgtactgggtcggcgcgggcaccgtggcctacctagccctgcgtatttcgtactcgctcttcacggccctccgggtctggggagtggggaatgaggcgggggtcggcccggggctcggagaatgggcaggtgagtcggatgcagcgccgcgtcctcgctcccgcggcggcccggaccaggcctgggccgtgatgactagttctggggtctgctcctggccttcccctccccagctctcctctttctcaggctcctgtgccccgcgggcccctcctggctcccttggctgtcttctgcttgcttagactacttgcagagttttaagttgtcacaggtagtactgatggaattggaaaatcatatgcagaagagttagcaaagcatggaatgaaggttgtccttatcagcagatcaaaggataaacttgaccaggtttccagtgaaataagtaagttctcacatcaaacaaaaggaat

SEQ ID NO: 9523 - DNA, 866 bp, Homo sapiens
  source 1..866: mol_type = unassigned DNA
attcacgaaggtagtgaggcctagtggaaagccatggagagcgctctccccgccgccggcttcctgtactgggtcggcgcgggcaccgtggcctacctagccctgcgtatttcgtactcgctcttcacggccctccgggtctggggagtggggaatgaggcgggggtcggcccggggctcggagaatgggcagttgtcacaggtagtactgatggaattggaaaatcatatgcagaagagttagcaaagcatggaatgaaggttgtccttatcagcagatcaaaggataaacttgaccaggtttccagtgaaataatgaacaacgtgggaatgtcgtatgagtatcctgaatactttttggatgttcctgacttggacaatgtgatcaagaaaatgataaatattaatattctttctgtttgtaagatgacacaattggtactgcctggcatggtggaaagatccaaaggggctattctgaacatttcatctggcagtggcatgctccctgtcccactcttgaccatctattctgcaaccaagacttttgtagatttcttctctcagtgcctccatgaggagtataggagcaagggcgtctttgtgcagagtgtcctgccatacttcgtagctacaaaactggctaaaatccggaagccaactttggataagccctctccggagacgtttgtgaagtctgcaattaaaacagtcggcctgcaatcccgaaccaatggatacctgatccatgctcttatgggctcgataatctcaaacctgccttcttggatttatttgaaaatagtcatgaatatgaacaagtctacacgggctcactatctgaagaaaaccaagaagaactaagc

SEQ ID NO: 9524 - DNA, 546 bp, Homo sapiens
  source 1..546: mol_type = unassigned DNA
attccgtgttcatggagccagtcagtcgccctgctgcctcctcagtcacacgctgtcctccttggttcgccccttttgtcacaggtagtactgatggaattggaaaatcatatgcagaagagttagcaaagcatggaatgaaggttgtccttatcagcagatcaaaggataaacttgaccaggtttccagtgaaataaaagaaaaattcaaagtggagacaagaaccattgctgttgactttgcatcagaagatatttatgataaaattaaaacaggcttggctggtcttgaaatcggcatcttagtgaacaacgtgggaatgtcgtatgagtatcctgaatactttttggatgttcctgacttggacaatgtgatcaagaaaatgataaatattaatattctttctgtttgtaagatgacacaattggtactgcctggcatggtggaaagatccaaaggggctattctgaacatttcatctggcagtggcatgctccctgtcccactcttgaccatctattctgcaaccaagacttttgtagatt

SEQ ID NO: 9525 - DNA, 571 bp, Homo sapiens
  source 1..571: mol_type = unassigned DNA
attcatctatctgcatctgcttacacatctctacttattgtctgatatgagaagctgttatagatcactaagctgaagttgtcacaggtagtactgatggaattggaaaatcatatgcagaagagttagcaaagcatggaatgaaggttgtccttatcagcagatcaaaggataaacttgaccaggtttccagtgaaataaaagaaaaattcaaagtggagacaagaaccattgctgttgactttgcatcagaagatatttatgataaaattaaaacaggcttggctggtcttgaaatcggcatcttagtgaacaacgtgggaatgtcgtatgagtatcctgaatactttttggatgttcctgacttggacaatgtgatcaagaaaatgataaatattaatattctttctgtttgtaagatgacacaattggtactgcctggcatggtggaaagatccaaaggggctattctgaacatttcatctggcagtggcatgctccctgtcccactcttgaccatctattctgcaaccaagacttttgtagatttcttctctcagtgcctccatga

SEQ ID NO: 9526 - DNA, 403 bp, Homo sapiens
  source 1..403: mol_type = unassigned DNA
agttagcaaagcatggaatgaaggttgtccttatcagcagatcaaaggataaacttgaccaggtttccagtgaaataaaagaaaaattcaaagtggagacaagaaccattgctgttgactttgcatcagaagatatttatgataaaattaaaacaggcttggctggtcttgaaatcggcatcttaggttgggctggcttaaagccccagccctctagtcacagagttggtctttctggtgtccaaccccatcctgggtcatcttgattccactactgagtatatatcaaaaacgaagaaactcaatatattgaagagatatctgcactctatgtttattgcagcactattcacagtagccaaaatatggaatcagcctaacagtctatcagcagatgaatgga

SEQ ID NO: 9527 - DNA, 2507 bp, Homo sapiens
  source 1..2507: mol_type = unassigned DNA
tatttctaggaaaacaaaattcccttctcatcagaatgctgtctactttaattaatatgaagtattattcaagatagaaacaacaaaatttctatgcttagcatgcattgaaaccttattattacaaaacagcatctgtttcttagagaattgatgatatccaggagtcagaaattcacgttacagcctcggtatttaactgtgaggtgattttgactaaaccattggacttctgaacttttcttggttaataatatatcaaaacagagtttaaaaatagcccctctcattatatgtatttagtcaacaattatggagtccttaaaaaatgcagatgtcaccttttcatgttggttactagagatcacatcttaactctctttaaggatgagttttacttacagctaactagaccaacaagagaaatgaatgtgaagttacacttactctttgccaacctaccactttatcgtattcttttaaagactttttttggctggaaaagtttatgtgagctcttgaggttagaaagcttaagtcatcttggtaggcaggatatttcttctgataacatatattcttttctgagaatgcattttgggaaatgtagattttcactgtaaatccttcattgtttgaagaactctgtgccagtattacatttcaggcaagactaattttagccaggttcattaaagtattccctgtgttctctccagtaatttcagctggttcctttttatgccctcttgacacagtcacattctacagtgtacagaaaataacctgctgtctgtagaagtggtgaatggtttcatgattcccttctttttagtgtgggtgagttttcttcactctttttctgttgcctgcatccttggccatcatgaatgttttgctttctctcttgcagatgacacaattggtactgcctggcatggtggaaagatccaaaggggctattctgaacatttcatctggcagtggcatgctccctgtcccactcttgaccatctattctgcaaccaagacttttgtagatttcttctctcagtgcctccatgaggagtataggagcaagggcgtctttgtgcagagtgtcctgccatacttcgtagctacaaaactggctaaaatccggaagccaactttggataagccctctccggagacgtttgtgaagtctgcaattaaaacagtcggcctgcaatcccgaaccaatggatacctgatccatgctcttatgggctcgataatctcaaacctgccttcttggatttatttgaaaatagtcatgaatatgaacaagtctacacgggctcactatctgaagaaaaccaagaagaactaagcattgataactgcattgtaacttggccagatgctccagcatatgcacgttcactgcaaagcaccctactggttttgaaaatctgaccttgtcatttcaatagttattaacatgactaaatattatcttaattaagaggaaaatagaagttgcttttaggggtttctgacatatattctggatactatccgaggtaattttgaagtttaatataaatgctcatatcaaatgaatatagaactaatattgtcgggaacacctaatagaaaggaatactattatagcaaatcacagaatgatagactcaagcataaaacttggcagttttatctgcttcaaaatgccattgatcattattcctgtattttctctgaaactgattataaaaaccaatgtccagctactcttttgtttttgacacttgaagaaatggagatcgatttgatttgtttataagcagacacactgcaatttacaaagatctctttacggttttataaaattatcttccagtttgtacatttatatggaattgttctttatcaagggtagctaatgacatgaaaataattgtgaaatatggaattatttctgacacatgaagcccactaaactatgctttcttataatgcatatttcttctcagtttaaatgtatgtaaatatcgaagctatatggtatgatttataaagataaatgggccaaagtgtacattgagactggcagccatctatggtaccactgaaaccctgacccagaaaagtggcttgcttggacacccagctgcctttgtttctgcattaaaccaatattgatcacacatatgacacaggctagtcctataaaagtaatgacttcatagaaatggcattataatttttaagttgatactctacaggtagctattgatataattagttttaataaaacatgctgcaaccatggtatacaacaaaaatacatttctttggtgattgaaattaaggccgtatttacaatgacttaatataagactgacttttatcctgcttcataacttgtatggagaactcaccaagaaagaattcaatactgtgaaatatgcagcaagaagattggtctttacctaggctgtgtttcctaagctctgagttttcagcaccagtagatttgtatt

SEQ ID NO: 9528 - DNA, 511 bp, Homo sapiens
  source 1..511: mol_type = unassigned DNA
catgtgctgaatgtttgcaaactttcttccacaaagcaatatttgtacaatatccaaaggggctattctgaacatttcatctggcagtggcatgctccctgtcccactcttgaccatctattctgcaaccaagacttttgtagatttcttctctcagtgcctccatgaggagtataggagcaagggcgtctttgtgcagagtgtcctgccatacttcgtagctacaaaactggctaaaatccggaagccaactttggataagccctctccggagacgtttgtgaagtctgcaattaaaacagtcggcctgcaatcccgaaccaatggatacctgatccatgctcttatgggctcgataatctcaaacctgccttcttggatttatttgaaaatagtcatgaatatgaacaagtctacacgggctcactatctgaagaaaaccaagaagaactaagcattgataactgcattgtaacttggccagatgctccagcatatgcacgttcactgc

SEQ ID NO: 9529 - DNA, 583 bp, Homo sapiens
  source 1..583: mol_type = unassigned DNA
atgttaaaataaaggtgtatgcagggaatataaaagatctgtaagtaaaaattctcagcactgtggctagagaagacctcagagggtagagatcaactcgaggagactggagatctgatctggttatgccctgggttactaagactgggaaatgagctaatcgtgaagaagagctatttttagttgattgaattatgtctcatttactgaccaagcatagcacatactgatgaaaggcagggagagatatgtggtagaaaaacagctacattattctgtttcgaataattatatatctcaatctgtaattcacaaacaactgcatactgtggcttcactccttttacacggtacattttcctttttagatccaaaggggctattctgaacatttcatctggcagtggcatgctccctgtcccactcttgaccatctattctgcaaccaagacttttgtagatttcttctctcagtgcctccatgaggagtataggagcaagggcgtctttgtgcagagtgtcctgccatacttcgtagctacaaaactggctaaaatccggaagccaactttggataagccct

SEQ ID NO: 9530 - DNA, 4292 bp, Homo sapiens
  source 1..4292: mol_type = unassigned DNA
actgccttgattttaaaccatcgtggaaataaatatactttctagaaaagaatttacatttcttagctggaaaaacataacccaacttggaattcctgagtatgcatctcttgtccccaccccttgatctgggggttctctagactagctctatggtttagctgcatgaagagttaacttgtggcaccaccaagtggttcagtcaggcagtgcaacttaattctcctacaagatcaaagtagtccaatttataccatgttacatacgaagggagggaagaagatggcaaaaaggatggacgaaaggaacaaaaaattataacgcagttgagaggtataatgattagaccatctctacctctagaagctcaaaatcttacaatacctttaccaggcttgtgatctatatttgggtttttttttttaatcttcactattttgtgacctttaaacctaatgcatagaaatgagaaatggtttgcttatgttccttcattatgtgagatcagagtatttacatatactctttctttccttactgctcaactttactctgggaaataaccttttctttactgacccattgtgagagcctcactgaactctgcatttcctactcagtctgagtcggagatctcaccctagtgtgtgctctcatagactatatccttgtggcaaaatggtccttaaaagatgtgacaaaaaatttttttttctaagtgagggataaatatatagtgataatcccaataaacaaattctcagaaatcaaaagttacctaatcaaagttggctcaaatattgaagtacttcatacttagtatgagtctgtggctgcagcaacaaggaaagaggaagatagagagtgacagcactccatctggggttcttggttctaatgaagaggctgaggtttcatctaacctgtcaaggagagtgggttgcattccttgacttagacttcggagtgggaaaaatgcaaagcacacacgtacataaaaacccagagacggccgggcgcggtggctcacgcctgtaatcccagcactttggaggccgaggtgggtgcatcacaaggtcaggagatcgagaccatcctggctaacatggtgaaaccctgtctctactaaaaatacaaaaaattagccaggcgtggtggcgggcgcctgtagtcccagctactggggaggctgaggcaggagaatggtgtgaacccaggaggcggaacttgtggtgagcagagatcgcgccactgcactccagcttggggactctcgctgagactctgtctcaaaaaaaaaaaaaaaaaaaaaaaaaaaccagagacatgggaccactccttctaggtctcagcaggacggaaatccatagaatggaacagatctcaatttgattgaaattttaagattttgaccaccatgtgttagaaccattccttttctttaatggaagtgtcattgggccaagcgtggtagctcacacctgtcatcccgacacttggggaggctgaagtgggaggatcacatgagcccagaagtttgagaccagcctgggcagcatgttgaaaccttgtctctacaaaaaaaattttaaattagctgggcatggtggtgcacacctgtggttccaactactcagaaggctgagacaggaggatcccttgagcccaagagctcaaggctgcagtgagctatgatcgtgccaccgcactccagcctaagcaacaagcaaaaccctgcctcaaaaaaaaaagaagaaaaagaaaaaaagaagtatcattgcagtgatacttcacacatgtgagataaacaatacattcactctttgttgaactaccatgcccaggttatttcaaactacagaaggacctcttgtatcatgactcaggacttgttacaatagggtttccttatactctgtgttgaatcacatccaaaatgcagcaagcttaagcaataaagaacctaacattattgaagttcctctaaaggtcatgtccagatttgtcaccctacacccatccagtcaggtgtcttttagttacccaaacagtttccatattgttagactgtgtttcttctaaaaaagaaaaaaagggaggtggttctatcttatcaataaaattgtttataaaactcagaagtagaatggtgagaaactagggaagaaaagtagtaacgcaagtctgagaaataagatgtctattttagaaggatcaaagctgatagaacaagcttaattagccataaattatggagaaagttggcattatcccattagaagaataaagtatcaaagatctcctacttggtggttctgtctcaatgttgagtttactaagtgtgaaaagtatcctatcctgaatctgtgctctctggattatttaatgctttcctttttaaaggttcaaaaaggtagatttctgcttatttttaatactttctctggtctcaaactctgttttattgagagattgatttgttacaatttgttttatggtatcatgtgttctatcaagttggctttagatagccacttctcttttcttctctctctgtaaagatacagatgtttctaccactaagagcagtcaagcaccactgtacattctgagtttgtggccttactaatcaatggcatgttttctggggtgggtgttccctttctagagtgtcctgccatacttcgtagctacaaaactggctaaaatccggaagccaactttggataagccctctccggagacgtttgtgaagtctgcaattaaaacagtcggcctgcaatcccgaaccaatggatacctgatccatgctcttatgggctcgataatctcaaacctgccttcttggatttatttgaaaatagtcatgaatatgaacaagtctacacgggctcactatctgaagaaaaccaagaagaactaagcattgataactgcattgtaacttggccagatgctccagcatatgcacgttcactgcaaagcaccctactggttttgaaaatctgaccttgtcatttcaatagttattaacatgactaaatattatcttaattaagaggaaaatagaagttgcttttaggggtttctgacatatattctggatactatccgaggtaattttgaagtttaatataaatgctcatatcaaatgaatatagaactaatattgtcgggaacacctaatagaaaggaatactattatagcaaatcacagaatgatagactcaagcataaaacttggcagttttatctgcttcaaaatgccattgatcattattcctgtattttctctgaaactgattataaaaaccaatgtccagctactcttttgtttttgacacttgaagaaatggagatcgatttgatttgtttataagcagacacactgcaatttacaaagatctctttacggttttataaaattatcttccagtttgtacatttatatggaattgttctttatcaagggtagctaatgacatgaaaataattgtgaaatatggaattatttctgacacatgaagcccactaaactatgctttcttataatgcatatttcttctcagtttaaatgtatgtaaatatcgaagctatatggtatgatttataaagataaatgggccaaagtgtacattgagactggcagccatctatggtaccactgaaaccctgacccagaaaagtggcttgcttggacacccagctgcctttgtttctgcattaaaccaatattgatcacacatatgacacaggctagtcctataaaagtaatgacttcatagaaatggcattataatttttaagttgatactctacaggtagctattgatataattagttttaataaaacatgctgcaaccatggtatacaacaaaaatacatttctttggtgattgaaattaaggccgtatttacaatgacttaatataagactgacttttatcctgcttcataacttgtatggagaactcaccaagaaagaattcaatactgtgaaatatgcagcaagaagattggtctttacctaggctgtgtttcctaagctctgagttttcagcaccagtagatttgtattaaaagaaaaaaaaatggggccttagcttctggcttttaattttgccagctaaggacataaaacaaaaataaacaaacaaaaacaaatagccatctgctatcagcatcattatgtaaaagaaaatatattttagcccctaaaattaggaagaatgtaatctcagaataaaggttgtcatttaagttgaataaatatatagctttatgaaaaaca

SEQ ID NO: 9531 - DNA, 3379 bp, Homo sapiens
  source 1..3379: mol_type = unassigned DNA
gtgccgcggcaacggcgcatgcgtaggcgcgcggccgcggcggcggctggggagggttcttccggaaggttcgggaggcttctggaaaaagcgccgcgcgctgggcgggcccgtcgctatataaggcaggcgcgggggtggcgcgtcagttgcttcagcgtcccggtgtggctgtgccgttggtcctgtgcggtcacttagccaagatgcctgaggaaacccagacccaagaccaaccgatggaggaggaggaggttgagacgttcgcctttcaggcagaaattgcccagttgatgtcattgatcatcaatactttctactcgaacaaagagatctttctgagagagctcatttcaaattcatcagatgcattggacaaaatccggtatgaaagcttgacagatcccagtaaattagactctgggaaagagctgcatattaaccttataccgaacaaacaagatcgaactctcactattgtggatactggaattggaatgaccaaggctgacttgatcaataaccttggtactatcgccaagtctgggaccaaagcgttcatggaagctttgcaggctggtgcagatatctctatgattggccagttcggtgttggtttttattctgcttatttggttgctgagaaagtaactgtgatcaccaaacataacgatgatgagcagtacgcttgggagtcctcagcagggggatcattcacagtgaggacagacacaggtgaacctatgggtcgtggaacaaaagttatcctacacctgaaagaagaccaaactgagtacttggaggaacgaagaataaaggagattgtgaagaaacattctcagtttattggatatcccattactctttttgtggagaaggaacgtgataaagaagtaagcgatgatgaggctgaagaaaaggaagacaaagaagaagaaaaagaaaaagaagagaaagagtcggaagacaaacctgaaattgaagatgttggttctgatgaggaagaagaaaagaaggatggtgacaagaagaagaagaagaagattaaggaaaagtacatcgatcaagaagagctcaacaaaacaaagcccatctggaccagaaatcccgacgatattactaatgaggagtacggagaattctataagagcttgaccaatgactgggaagatcacttggcagtgaagcatttttcagttgaaggacagttggaattcagagcccttctatttgtcccacgacgtgctccttttgatctgtttgaaaacagaaagaaaaagaacaacatcaaattgtatgtacgcagagttttcatcatggataactgtgaggagctaatccctgaatatctgaacttcattagaggggtggtagactcggaggatctccctctaaacatatcccgtgagatgttgcaacaaagcaaaattttgaaagttatcaggaagaatttggtcaaaaaatgcttagaactctttactgaactggcggaagataaagagaactacaagaaattctatgagcagttctctaaaaacataaagcttggaatacacgaagactctcaaaatcggaagaagctttcagagctgttaaggtactacacatctgcctctggtgatgagatggtttctctcaaggactactgcaccagaatgaaggagaaccagaaacatatctattatatcacaggtgagaccaaggaccaggtagctaactcagcctttgtggaacgtcttcggaaacatggcttagaagtgatctatatgattgagcccattgatgagtactgtgtccaacagctgaaggaatttgaggggaagactttagtgtcagtcaccaaagaaggcctggaacttccagaggatgaagaagagaaaaagaagcaggaagagaaaaaaacaaagtttgagaacctctgcaaaatcatgaaagacatattggagaaaaaagttgaaaaggtggttgtgtcaaaccgattggtgacatctccatgctgtattgtcacaagcacatatggctggacagcaaacatggagagaatcatgaaagctcaagccctaagagacaactcaacaatgggttacatggcagcaaagaaacacctggagataaaccctgaccattccattattgagaccttaaggcaaaaggcagaggctgataagaacgacaagtctgtgaaggatctggtcatcttgctttatgaaactgcgctcctgtcttctggcttcagtctggaagatccccagacacatgctaacaggatctacaggatgatcaaacttggtctgggtattgatgaagatgaccctactgctgatgataccagtgctgctgtaactgaagaaatgccaccccttgaaggagatgacgacacatcacgcatggaagaagtagactaatctctggctgagggatgacttacctgttcagtactctacaattcctctgataatatattttcaaggatgtttttctttatttttgttaatattaaaaagtctgtatggcatgacaactactttaaggggaagataagatttctgtctactaagtgatgctgtgataccttaggcactaaagcagagctagtaatgctttttgagtttcatgttggtttattttcacagattggggtaacgtgcactgtaagacgtatgtaacatgatgttaactttgtggtctaaagtgtttagctgtcaagccggatgcctaagtagaccaaatcttgttattgaagtgttctgagctgtatcttgatgtttagaaaagtattcgttacatcttgtaggatctactttttgaacttttcattccctgtagttgacaattctgcatgtactagtcctctagaaataggttaaactgaagcaacttgatggaaggatctctccacagggcttgttttccaaagaaaagtattgtttggaggagcaaagttaaaagcctacctaagcatatcgtaaagctgttcaaaaataactcagacccagtcttgtggatggaaatgtagtgctcgagtcacattctgcttaaagttgtaacaaatacagatgagttaaaagatattgtgtgacagtgtcttatttagggggaaaggggagtatctggatgacagttagtgccaaaatgtaaaacatgaggcgctagcaggagatggttaaacactagctgctccaagggttgacatggtcttcccagcatgtactcagcaggtgtggggtggagcacacgtaggcacagaaaacaggaatgcagacaacatgcatcccctgcgtccatgagttacatgtgttctcttagtgtccacgttgttttgatgttattcatggaataccttctgtgttaaatacagtcacttaattccttggcctta

SEQ ID NO: 9532 - DNA, 3510 bp, Homo sapiens
  source 1..3510: mol_type = unassigned DNA
gggtgtggcctccgggcggcatggctgcttcccaggtgatgccggcttcagctagtggggtctagttgaccgttccgcagccgccagggccagcggaaagccggtcagggggaaccgcggcggggctggtgtcatgagcctgaggtgaacttgagggtgcctcctcagcggtctcccgccctgccctgaggggcgccgggaccccaaagagcggaggaagagcgccaccccgacggccaccgcttcggagccagcacgcggggtaccctacggggagcgcggatgcccccgtgttcgggcggggacggctccacccctcctgggccctcccttcgggacagggactgtcccgcccagagtgctgaatacccgcgcgaccgtctggatccccgcccaggaagcccctctgaagcctcctcgccgccgtttctgagaagcagggcacctgttaactggtaccaagaaaaggcccaagtgtttctctggcatctgatggtgtctggatccaccactctactctgtctctggaaacagcccttccacgtctctgcattccctgtcaccgcgtcactggccttcagacagagccaaggtgcagggcaacacctctacaaggatctgcagccatttatattgcttaggctactgatgcctgaggaaacccagacccaagaccaaccgatggaggaggaggaggttgagacgttcgcctttcaggcagaaattgcccagttgatgtcattgatcatcaatactttctactcgaacaaagagatctttctgagagagctcatttcaaattcatcagatgcattggacaaaatccggtatgaaagcttgacagatcccagtaaattagactctgggaaagagctgcatattaaccttataccgaacaaacaagatcgaactctcactattgtggatactggaattggaatgaccaaggctgacttgatcaataaccttggtactatcgccaagtctgggaccaaagcgttcatggaagctttgcaggctggtgcagatatctctatgattggccagttcggtgttggtttttattctgcttatttggttgctgagaaagtaactgtgatcaccaaacataacgatgatgagcagtacgcttgggagtcctcagcagggggatcattcacagtgaggacagacacaggtgaacctatgggtcgtggaacaaaagttatcctacacctgaaagaagaccaaactgagtacttggaggaacgaagaataaaggagattgtgaagaaacattctcagtttattggatatcccattactctttttgtggagaaggaacgtgataaagaagtaagcgatgatgaggctgaagaaaaggaagacaaagaagaagaaaaagaaaaagaagagaaagagtcggaagacaaacctgaaattgaagatgttggttctgatgaggaagaagaaaagaaggatggtgacaagaagaagaagaagaagattaaggaaaagtacatcgatcaagaagagctcaacaaaacaaagcccatctggaccagaaatcccgacgatattactaatgaggagtacggagaattctataagagcttgaccaatgactgggaagatcacttggcagtgaagcatttttcagttgaaggacagttggaattcagagcccttctatttgtcccacgacgtgctccttttgatctgtttgaaaacagaaagaaaaagaacaacatcaaattgtatgtacgcagagttttcatcatggataactgtgaggagctaatccctgaatatctgaacttcattagaggggtggtagactcggaggatctccctctaaacatatcccgtgagatgttgcaacaaagcaaaattttgaaagttatcaggaagaatttggtcaaaaaatgcttagaactctttactgaactggcggaagataaagagaactacaagaaattctatgagcagttctctaaaaacataaagcttggaatacacgaagactctcaaaatcggaagaagctttcagagctgttaaggtactacacatctgcctctggtgatgagatggtttctctcaaggactactgcaccagaatgaaggagaaccagaaacatatctattatatcacaggtgagaccaaggaccaggtagctaactcagcctttgtggaacgtcttcggaaacatggcttagaagtgatctatatgattgagcccattgatgagtactgtgtccaacagctgaaggaatttgaggggaagactttagtgtcagtcaccaaagaaggcctggaacttccagaggatgaagaagagaaaaagaagcaggaagagaaaaaaacaaagtttgagaacctctgcaaaatcatgaaagacatattggagaaaaaagttgaaaaggtggttgtgtcaaaccgattggtgacatctccatgctgtattgtcacaagcacatatggctggacagcaaacatggagagaatcatgaaagctcaagccctaagagacaactcaacaatgggttacatggcagcaaagaaacacctggagataaaccctgaccattccattattgagaccttaaggcaaaaggcagaggctgataagaacgacaagtctgtgaaggatctggtcatcttgctttatgaaactgcgctcctgtcttctggcttcagtctggaagatccccagacacatgctaacaggatctacaggatgatcaaacttggtctgggtattgatgaagatgaccctactgctgatgataccagtgctgctgtaactgaagaaatgccaccccttgaaggagatgacgacacatcacgcatggaagaagtagactaatctctggctgagggatgacttacctgttcagtactctacaattcctctgataatatattttcaaggatgtttttctttatttttgttaatattaaaaagtctgtatggcatgacaactactttaaggggaagataagatttctgtctactaagtgatgctgtgataccttaggcactaaagcagagctagtaatgctttttgagtttcatgttggtttattttcacagattggggtaacgtgcactgtaagacgtatgtaacatgatgttaactttgtggtctaaagtgtttagctgtcaagccggatgcctaagtagaccaaatcttgttattgaagtgttctgagctgtatcttgatgtttagaaaagtattcgttacatcttgtaggatctactttttgaacttttcattccctgtagttgacaattctgcatgtactagtcctctagaaataggttaaactgaagcaacttgatggaaggatctctccacagggcttgttttccaaagaaaagtattgtttggaggagcaaagttaaaagcctacctaagcatatcgtaaagctgttcaaaaataactcagacccagtcttgtggatggaaatgtagtgctcgagtcacattctgcttaaagttgtaacaaatacagatgagttaaaag

SEQ ID NO: 9533 - DNA, 1710 bp, Homo sapiens
  source 1..1710: mol_type = unassigned DNA
ggttgagacgttcgcctttcaggcagaaattgcccagttgatgtcattgatcatcaatactttctactcgaacaaagagatctttctgagagagctcatttcaaattcatcagatgtgaacctatgggtcgtggaacaaaagttatcctacacctgaaagaagaccaaactgagtacttggaggaacgaagaataaaggagattgtgaagaaacattctcagtttattggatatcccattactctttttgtggagaaggaacgtgataaagaagtaagcgatgatgaggctgaagaaaaggaagacaaagaagaagaaaaagaaaaagaagagaaagagtcggaagacaaacctgaaattgaagatgttggttctgatgaggaagaagaaaagaaggatggtgacaagaagaagaagaagaagattaaggaaaagtacatcgatcaagaagagctcaacaaaacaaagcccatctggaccagaaatcccgacgatattactaatgaggagtacggagaattctataagagcttgaccaatgactgggaagatcacttggcagtgaagcatttttcagttgaaggacagttggaattcagagcccttctatttgtcccacgacgtgctccttttgatctgtttgaaaacagaaagaaaaagaacaacatcaaattgtatgtacgcagagttttcatcatggataactgtgaggagctaatccctgaatatctgaacttcattagaggggtggtagactcggaggatctccctctaaacatatcccgtgagatgttgcaacaaagcaaaattttgaaagttatcaggaagaatttggtcaaaaaatgcttagaactctttactgaactggcggaagataaagagaactacaagaaattctatgagcagttctctaaaaacataaagcttggaatacacgaagactctcaaaatcggaagaagctttcagagctgttaaggtactacacatctgcctctggtgatgagatggtttctctcaaggactactgcaccagaatgaaggagaaccagaaacatatctattatatcacaggtgagaccaaggaccaggtagctaactcagcctttgtggaacgtcttcggaaacatggcttagaagtgatctatatgattgagcccattgatgagtactgtgtccaacagctgaaggaatttgaggggaagactttagtgtcagtcaccaaagaaggcctggaacttccagaggatgaagaagagaaaaagaagcaggaagagaaaaaaacaaagtttgagaacctctgcaaaatcatgaaagacatattggagaaaaaagttgaaaaggtatgtgaatacagcatttcctgatcattgatacttctaaggtgctttcaagcttagtcatacatagcccattttcgcatgttttcaacttaaaacagaaaactatgttgtgtgtggctgggcgcggtggctcacgcctgcaatcccagcactttgggaggctgaggcagcggatcacaaggtcaggagatcgagaccatcctggctaacacggtgaaactcagtctctactaaaaatagaaaaaaataaaccaggcgtggtggcacggcctgtaatcctagccacttgggaggctgaggcaggagaatcgcctgaacccaggaggcggaggttgcagtgagccaagatcgcaccactgcactccagcc

SEQ ID NO: 9534 - DNA, 694 bp, Homo sapiens
  source 1..694: mol_type = unassigned DNA
atctctactaaattacaaaaattagccccatgtagtggcaggctgaggcatgaaaacagcttgaacccccccgggaggcagaggttgcagtgagtggagattgcgccactgccctccagcctgggcaacagagtgagactgtctcaaaaatacgtcccatcatcttcaggttatctttgattttgggagtttacatagtaccagttttgtccttggaatgactcagtgcatttggtttatatttttttcagacttcattagaggggtggtagactcggaggatctccctctaaacatatcccgtgagatgttgcaacaaagcaaaattttgaaagttatcaggaagaatttggtcaaaaaatgcttagaactctttactgaactggcggaagataaagagaactacaagaaattctatgagcagttctctaaaaacataaagcttggaatacacgaagactctcaaaatcggaagaagctttcagagctgttaaggtactacacatctgcctctggtgatgagatggtttctctcaaggactactgcaccagaatgaaggagaaccagaaacatatctattatatcacaggtaagagaacactatgttacagtcatacacgtcgttcttacaatcttgtaggctctgtgggtgtgttttctactcaggtagcactgttacaactggtattgatc

SEQ ID NO: 9535 - DNA, 488 bp, Homo sapiens
  source 1..488: mol_type = unassigned DNA
agagctcaacaaaacaaagcccatctggaccagaaatcccgacgatattactaatgaggagtacggagaattctataagagcttgaccaatgactgggaagatcacttggcagtgaaggtgagtgactgatgggtgcttcaagcttgtccttagattatcatctttctccaccaccccaaatatcttctataatgcattgttcattggtacttagtgtatctgttttattacagcatttttcagttgaaggacagttggaattcagagcccttctatttgtcccacgacgtgctccttttgatctgtttgaaaacagaaagaaaaagaacaacatcaaattgtatgtacgcagagttttcatcatggataactgtgaggagctaatccctgaatatctgaacttcattagaggggtggtagactcggaggatctccctctaaacatatcccgtgagatgttgcaacaaagcaaaattttgaaagttat

SEQ ID NO: 9536 - DNA, 581 bp, Homo sapiens
  source 1..581: mol_type = unassigned DNA
agttgcttcagcgtcccggtgtggctgtgccgttggtcctgtgcggtcacttagccaagatgcctgaggaaacccagacccaagaccaaccgatggaggaggaggaggttgagacgttcgcctttcaggcagaaattgcccagttgatgtcattgatcatcaatactttctactcgaacaaagagatctttctgagagagctcatttcaaattcatcagatgcattggacaaaatccggtatgaaagcttgacagatcccagtaaattagactctgggaaagagctgcatattaaccttataccgaacaaacaagatcgaactctcactattgtggatactggaattggaatgaccaaggctgacttgatcaataaccttggtgaacctatgggtcgtggaacaaaagttatcctacacctgaaagaagaccaaactgagtacttggaggaacgaagaataaaggagattgtgaagaaacattctcagtttattggatatcccattactctttttgtggagaaggaacgtgataaagaagtaagcgatgatgaggctgaagaaaaggaagacaaagaagaa

SEQ ID NO: 9537 - DNA, 429 bp, Homo sapiens
  source 1..429: mol_type = unassigned DNA
ctgcaacccttggacccctggggatgcggtgaagcttacagaatttgtgtttgcccaacgatcaggaacaagctagagcacttaattagtgtaatggcatgacttggtgggcggttcttttgggcgaggcaccttgcccaaaaggttctgctgtggtggcctttgcatctgtagtaacggcaaaccttgctttatagacacgttataagggtgttaggcatggcgttgagcactaaattgaatgtattaagtcaatttttctttcttctcttgcaggtgaacctatgggtcgtggaacaaaagttatcctacacctgaaagaagaccaaactgagtacttggaggaacgaagaataaaggagattgtgaagaaacattctcagtttattggatatcccattactctttttgtggagaaggaacgtgata

SEQ ID NO: 9538 - DNA, 552 bp, Homo sapiens
  source 1..552: mol_type = unassigned DNA; mol_type = unassigned DNA
agttgcttcagcgtcccggtgtggctgtgccgttggtcctgtgcggtcacttagccaagatgcctgaggaaacccagacccaagaccaaccgatggaggaggaggaggttgagacgttcgcctttcaggcagaaattgcccagttgatgtcattgatcatcaatactttctactcgaacaaagagatctttctgagagagctcatttcaaattcatcagatgtaagtcacttattaacccagaatcggattttggtttcagtgtgaacttcttgggggtgctgtatgcttaaattaatattttttgttaacaggcattggacaaaatccggtatgaaagcttgacagatcccagtaaattagactctgggaaagagctgcatattaaccttataccgaacaaacaagatcgaactctcactattgtggatactggaattggaatgaccaaggctgacttgatcaataaccttggtactatcgccaagtctgggaccaaagcgttcatggaagctttgcaggctggtgcagatatctctatgattggccagtt

SEQ ID NO: 9539 - DNA, 584 bp, Homo sapiens
  source 1..584: mol_type = unassigned DNA; mol_type = unassigned DNA
gcgccaccccgacggccaccgcttcggagccagcacgcggggtaccctacggggagcgcggatgcccccgtgttcgggcggggacggctccacccctcctgggccctcccttcgggacagggactgtcccgcccagagtgctgaatacccgcgcgaccgtctggatccccgcccaggaagcccctctgaagcctcctcgccgccgtttctgagaagatgcctgaggaaacccagacccaagaccaaccgatggaggaggaggaggttgagacgttcgcctttcaggcagaaattgcccagttgatgtcattgatcatcaatactttctactcgaacaaagagatctttctgagagagctcatttcaaattcatcagatgcattggacaaaatccggtatgaaagcttgacagatcccagtaaattagactctgggaaagagctgcatattaaccttataccgaacaaacaagatcgaactctcactattgtggatactggaattggaatgaccaaggctgacttgatcaataaccttggtactatcgccaagtctgggaccaaagcgttcatggaagctttgca

SEQ ID NO: 9540 - DNA, 595 bp, Homo sapiens
  source 1..595: mol_type = unassigned DNA; mol_type = unassigned DNA
aggctcctcccccgggtgtggcctccgggcggcatggctgcttcccaggtgatgccggcttcagctagtggggtctagttgaccgttccgcagccgccagggccagcggaaagccggtcagggggaaccgcggcggggctggtgtcatgagcctgaggtgaacttgagggtgcctcctcagcggtctcccgccctgccctgaggggcgccgggaccccaaagagcggaggaagagcgccaccccgacggccaccgcttcggagccagcacgcggggtaccctacggggagcgcggatgcccccgtgttcgggcggggacggctccacccctcctgggccctcccttcgggacagggactgtcccgcccagagtgctgaatacccgcgcgaccgtctggatccccgcccaggaagcccctctgaagcctcctcgccgccgtttctgagaagggcacctgttaactggtaccaagaaaaggcccaagtgtttctctggcatctgatggtgtctggatccaccactctactctgtctctggaaacagcccttccacgtctctgcattccctgtcaccgcgtcactggccttcagacag

SEQ ID NO: 9541 - DNA, 2572 bp, Homo sapiens
  source 1..2572: mol_type = unassigned DNA; mol_type = unassigned DNA
ggcacgcagtagctctctcgagtcactccggcgcagtgttgggactgtctgggtatcggaaagcaagcctacgttgctcactattacgtataatccttttcttttcaagatgcctgaggaagtgcaccatggagaggaggaggtggagacttttgcctttcaggcagaaattgcccaactcatgtccctcatcatcaataccttctattccaacaaggagattttccttcgggagttgatctctaatgcttctgatgccttggacaagattcgctatgagagcctgacagacccttcgaagttggacagtggtaaagagctgaaaattgacatcatccccaaccctcaggaacgtaccctgactttggtagacacaggcattggcatgaccaaagctgatctcataaataatttgggaaccattgccaagtctggtactaaagcattcatggaggctcttcaggctggtgcagacatctccatgattgggcagtttggtgttggcttttattctgcctacttggtggcagagaaagtggttgtgatcacaaagcacaacgatgatgaacagtatgcttgggagtcttctgctggaggttccttcactgtgcgtgctgaccatggtgagcccattggcaggggtaccaaagtgatcctccatcttaaagaagatcagacagagtacctagaagagaggcgggtcaaagaagtagtgaagaagcattctcagttcataggctatcccatcaccctttatttggagaaggaacgagagaaggaaattagtgatgatgaggcagaggaagagaaaggtgagaaagaagaggaagataaagatgatgaagaaaaacccaagatcgaagatgtgggttcagatgaggaggatgacagcggtaaggataagaagaagaaaactaagaagatcaaagagaaatacattgatcaggaagaactaaacaagaccaagcctatttggaccagaaaccctgatgacatcacccaagaggagtatggagaattctacaagagcctcactaatgactgggaagaccacttggcagtcaagcacttttctgtagaaggtcagttggaattcagggcattgctatttattcctcgtcgggctccctttgacctttttgagaacaagaagaaaaagaacaacatcaaactctatgtccgccgtgtgttcatcatggacagctgtgatgagttgataccagagtatctcaattttatccgtggtgtggttgactctgaggatctgcccctgaacatctcccgagaaatgctccagcagagcaaaatcttgaaagtcattcgcaaaaacattgttaagaagtgccttgagctcttctctgagctggcagaagacaaggagaattacaagaaattctatgaggcattctctaaaaatctcaagcttggaatccacgaagactccactaaccgccgccgcctgtctgagctgctgcgctatcatacctcccagtctggagatgagatgacatctctgtcagagtatgtttctcgcatgaaggagacacagaagtccatctattacatcactggtgagagcaaagagcaggtggccaactcagcttttgtggagcgagtgcggaaacggggcttcgaggtggtatatatgaccgagcccattgacgagtactgtgtgcagcagctcaaggaatttgatgggaagagcctggtctcagttaccaaggagggtctggagctgcctgaggatgaggaggagaagaagaagatggaagagagcaaggcaaagtttgagaacctctgcaagctcatgaaagaaatcttagataagaaggttgagaaggtgacaatctccaatagacttgtgtcttcaccttgctgcattgtgaccagcacctacggctggacagccaatatggagcggatcatgaaagcccaggcacttcgggacaactccaccatgggctatatgatggccaaaaagcacctggagatcaaccctgaccaccccattgtggagacgctgcggcagaaggctgaggccgacaagaatgataaggcagttaaggacctggtggtgctgctgtttgaaaccgccctgctatcttctggcttttcccttgaggatccccagacccactccaaccgcatctatcgcatgatcaagctaggtctaggtattgatgaagatgaagtggcagcagaggaacccaatgctgcagttcctgatgagatcccccctctcgagggcgatgaggatgcgtctcgcatggaagaagtcgattaggttaggagttcatagttggaaaacttgtgcccttgtatagtgtccccatgggctcccactgcagcctcgagtgcccctgtcccacctggctccccctgctggtgtctagtgtttttttccctctcctgtccttgtgttgaaggcagtaaactaagggtgtcaagccccattccctctctactcttgacagcaggattggatgttgtgtattgtggtttattttattttcttcattttgttctgaaattaaagtatgcaaaataaagaatatgccgtttttatacagtt

SEQ ID NO: 9542 - DNA, 2582 bp, Homo sapiens
  source 1..2582: mol_type = unassigned DNA; mol_type = unassigned DNA
ggcacgcagtagctctctcgagtcactccggcgcagtgttgggactgtctgggtatcggaaagcaagcctacgttgctcactattacgtataatccttttcttttcaagatttttattttagatgcctgaggaagtgcaccatggagaggaggaggtggagacttttgcctttcaggcagaaattgcccaactcatgtccctcatcatcaataccttctattccaacaaggagattttccttcgggagttgatctctaatgcttctgatgccttggacaagattcgctatgagagcctgacagacccttcgaagttggacagtggtaaagagctgaaaattgacatcatccccaaccctcaggaacgtaccctgactttggtagacacaggcattggcatgaccaaagctgatctcataaataatttgggaaccattgccaagtctggtactaaagcattcatggaggctcttcaggctggtgcagacatctccatgattgggcagtttggtgttggcttttattctgcctacttggtggcagagaaagtggttgtgatcacaaagcacaacgatgatgaacagtatgcttgggagtcttctgctggaggttccttcactgtgcgtgctgaccatggtgagcccattggcaggggtaccaaagtgatcctccatcttaaagaagatcagacagagtacctagaagagaggcgggtcaaagaagtagtgaagaagcattctcagttcataggctatcccatcaccctttatttggagaaggaacgagagaaggaaattagtgatgatgaggcagaggaagagaaaggtgagaaagaagaggaagataaagatgatgaagaaaaacccaagatcgaagatgtgggttcagatgaggaggatgacagcggtaaggataagaagaagaaaactaagaagatcaaagagaaatacattgatcaggaagaactaaacaagaccaagcctatttggaccagaaaccctgatgacatcacccaagaggagtatggagaattctacaagagcctcactaatgactgggaagaccacttggcagtcaagcacttttctgtagaaggtcagttggaattcagggcattgctatttattcctcgtcgggctccctttgacctttttgagaacaagaagaaaaagaacaacatcaaactctatgtccgccgtgtgttcatcatggacagctgtgatgagttgataccagagtatctcaattttatccgtggtgtggttgactctgaggatctgcccctgaacatctcccgagaaatgctccagcagagcaaaatcttgaaagtcattcgcaaaaacattgttaagaagtgccttgagctcttctctgagctggcagaagacaaggagaattacaagaaattctatgaggcattctctaaaaatctcaagcttggaatccacgaagactccactaaccgccgccgcctgtctgagctgctgcgctatcatacctcccagtctggagatgagatgacatctctgtcagagtatgtttctcgcatgaaggagacacagaagtccatctattacatcactggtgagagcaaagagcaggtggccaactcagcttttgtggagcgagtgcggaaacggggcttcgaggtggtatatatgaccgagcccattgacgagtactgtgtgcagcagctcaaggaatttgatgggaagagcctggtctcagttaccaaggagggtctggagctgcctgaggatgaggaggagaagaagaagatggaagagagcaaggcaaagtttgagaacctctgcaagctcatgaaagaaatcttagataagaaggttgagaaggtgacaatctccaatagacttgtgtcttcaccttgctgcattgtgaccagcacctacggctggacagccaatatggagcggatcatgaaagcccaggcacttcgggacaactccaccatgggctatatgatggccaaaaagcacctggagatcaaccctgaccaccccattgtggagacgctgcggcagaaggctgaggccgacaagaatgataaggcagttaaggacctggtggtgctgctgtttgaaaccgccctgctatcttctggcttttcccttgaggatccccagacccactccaaccgcatctatcgcatgatcaagctaggtctaggtattgatgaagatgaagtggcagcagaggaacccaatgctgcagttcctgatgagatcccccctctcgagggcgatgaggatgcgtctcgcatggaagaagtcgattaggttaggagttcatagttggaaaacttgtgcccttgtatagtgtccccatgggctcccactgcagcctcgagtgcccctgtcccacctggctccccctgctggtgtctagtgtttttttccctctcctgtccttgtgttgaaggcagtaaactaagggtgtcaagccccattccctctctactcttgacagcaggattggatgttgtgtattgtggtttattttattttcttcattttgttctgaaattaaagtatgcaaaataaagaatatgccgtttttataca

SEQ ID NO: 9543 - DNA, 2674 bp, Homo sapiens
  source 1..2674: mol_type = unassigned DNA; mol_type = unassigned DNA
gtgcccggatgctggggcgagggagggtgcactgcggcgccccctcctcgcgtggtcctggccgacgcatgtccggcagtgacgagtgtcggcctggtggctacggccaccatctttcttgggtttggtcctgttctgtaattttgtgctgtgaaagggtcgtggtggagcttttggcttaagaattctttgtccggatttaattgctcctccgatgcctgaggaagtgcaccatggagaggaggaggtggagacttttgcctttcaggcagaaattgcccaactcatgtccctcatcatcaataccttctattccaacaaggagattttccttcgggagttgatctctaatgcttctgatgccttggacaagattcgctatgagagcctgacagacccttcgaagttggacagtggtaaagagctgaaaattgacatcatccccaaccctcaggaacgtaccctgactttggtagacacaggcattggcatgaccaaagctgatctcataaataatttgggaaccattgccaagtctggtactaaagcattcatggaggctcttcaggctggtgcagacatctccatgattgggcagtttggtgttggcttttattctgcctacttggtggcagagaaagtggttgtgatcacaaagcacaacgatgatgaacagtatgcttgggagtcttctgctggaggttccttcactgtgcgtgctgaccatggtgagcccattggcaggggtaccaaagtgatcctccatcttaaagaagatcagacagagtacctagaagagaggcgggtcaaagaagtagtgaagaagcattctcagttcataggctatcccatcaccctttatttggagaaggaacgagagaaggaaattagtgatgatgaggcagaggaagagaaaggtgagaaagaagaggaagataaagatgatgaagaaaaacccaagatcgaagatgtgggttcagatgaggaggatgacagcggtaaggataagaagaagaaaactaagaagatcaaagagaaatacattgatcaggaagaactaaacaagaccaagcctatttggaccagaaaccctgatgacatcacccaagaggagtatggagaattctacaagagcctcactaatgactgggaagaccacttggcagtcaagcacttttctgtagaaggtcagttggaattcagggcattgctatttattcctcgtcgggctccctttgacctttttgagaacaagaagaaaaagaacaacatcaaactctatgtccgccgtgtgttcatcatggacagctgtgatgagttgataccagagtatctcaattttatccgtggtgtggttgactctgaggatctgcccctgaacatctcccgagaaatgctccagcagagcaaaatcttgaaagtcattcgcaaaaacattgttaagaagtgccttgagctcttctctgagctggcagaagacaaggagaattacaagaaattctatgaggcattctctaaaaatctcaagcttggaatccacgaagactccactaaccgccgccgcctgtctgagctgctgcgctatcatacctcccagtctggagatgagatgacatctctgtcagagtatgtttctcgcatgaaggagacacagaagtccatctattacatcactggtgagagcaaagagcaggtggccaactcagcttttgtggagcgagtgcggaaacggggcttcgaggtggtatatatgaccgagcccattgacgagtactgtgtgcagcagctcaaggaatttgatgggaagagcctggtctcagttaccaaggagggtctggagctgcctgaggatgaggaggagaagaagaagatggaagagagcaaggcaaagtttgagaacctctgcaagctcatgaaagaaatcttagataagaaggttgagaaggtgacaatctccaatagacttgtgtcttcaccttgctgcattgtgaccagcacctacggctggacagccaatatggagcggatcatgaaagcccaggcacttcgggacaactccaccatgggctatatgatggccaaaaagcacctggagatcaaccctgaccaccccattgtggagacgctgcggcagaaggctgaggccgacaagaatgataaggcagttaaggacctggtggtgctgctgtttgaaaccgccctgctatcttctggcttttcccttgaggatccccagacccactccaaccgcatctatcgcatgatcaagctaggtctaggtattgatgaagatgaagtggcagcagaggaacccaatgctgcagttcctgatgagatcccccctctcgagggcgatgaggatgcgtctcgcatggaagaagtcgattaggttaggagttcatagttggaaaacttgtgcccttgtatagtgtccccatgggctcccactgcagcctcgagtgcccctgtcccacctggctccccctgctggtgtctagtgtttttttccctctcctgtccttgtgttgaaggcagtaaactaagggtgtcaagccccattccctctctactcttgacagcaggattggatgttgtgtattgtggtttattttattttcttcattttgttctgaaattaaagtatgcaaaataaagaatatgccgtttttataca

SEQ ID NO: 9544 - DNA, 2644 bp, Homo sapiens
  source 1..2644: mol_type = unassigned DNA; mol_type = unassigned DNA
agaggggggtcccccccgcaggtactccactctcagtctgcaaaagtgtacgcccgcagagccgccccaggtgcctgggtgttgtgtgattgacgcggggaaggaggggtcagccgatccctccccaaccctccatcccatccctgaggattgggctggtacccgcgtctctcggacagatgcctgaggaagtgcaccatggagaggaggaggtggagacttttgcctttcaggcagaaattgcccaactcatgtccctcatcatcaataccttctattccaacaaggagattttccttcgggagttgatctctaatgcttctgatgccttggacaagattcgctatgagagcctgacagacccttcgaagttggacagtggtaaagagctgaaaattgacatcatccccaaccctcaggaacgtaccctgactttggtagacacaggcattggcatgaccaaagctgatctcataaataatttgggaaccattgccaagtctggtactaaagcattcatggaggctcttcaggctggtgcagacatctccatgattgggcagtttggtgttggcttttattctgcctacttggtggcagagaaagtggttgtgatcacaaagcacaacgatgatgaacagtatgcttgggagtcttctgctggaggttccttcactgtgcgtgctgaccatggtgagcccattggcaggggtaccaaagtgatcctccatcttaaagaagatcagacagagtacctagaagagaggcgggtcaaagaagtagtgaagaagcattctcagttcataggctatcccatcaccctttatttggagaaggaacgagagaaggaaattagtgatgatgaggcagaggaagagaaaggtgagaaagaagaggaagataaagatgatgaagaaaaacccaagatcgaagatgtgggttcagatgaggaggatgacagcggtaaggataagaagaagaaaactaagaagatcaaagagaaatacattgatcaggaagaactaaacaagaccaagcctatttggaccagaaaccctgatgacatcacccaagaggagtatggagaattctacaagagcctcactaatgactgggaagaccacttggcagtcaagcacttttctgtagaaggtcagttggaattcagggcattgctatttattcctcgtcgggctccctttgacctttttgagaacaagaagaaaaagaacaacatcaaactctatgtccgccgtgtgttcatcatggacagctgtgatgagttgataccagagtatctcaattttatccgtggtgtggttgactctgaggatctgcccctgaacatctcccgagaaatgctccagcagagcaaaatcttgaaagtcattcgcaaaaacattgttaagaagtgccttgagctcttctctgagctggcagaagacaaggagaattacaagaaattctatgaggcattctctaaaaatctcaagcttggaatccacgaagactccactaaccgccgccgcctgtctgagctgctgcgctatcatacctcccagtctggagatgagatgacatctctgtcagagtatgtttctcgcatgaaggagacacagaagtccatctattacatcactggtgagagcaaagagcaggtggccaactcagcttttgtggagcgagtgcggaaacggggcttcgaggtggtatatatgaccgagcccattgacgagtactgtgtgcagcagctcaaggaatttgatgggaagagcctggtctcagttaccaaggagggtctggagctgcctgaggatgaggaggagaagaagaagatggaagagagcaaggcaaagtttgagaacctctgcaagctcatgaaagaaatcttagataagaaggttgagaaggtgacaatctccaatagacttgtgtcttcaccttgctgcattgtgaccagcacctacggctggacagccaatatggagcggatcatgaaagcccaggcacttcgggacaactccaccatgggctatatgatggccaaaaagcacctggagatcaaccctgaccaccccattgtggagacgctgcggcagaaggctgaggccgacaagaatgataaggcagttaaggacctggtggtgctgctgtttgaaaccgccctgctatcttctggcttttcccttgaggatccccagacccactccaaccgcatctatcgcatgatcaagctaggtctaggtattgatgaagatgaagtggcagcagaggaacccaatgctgcagttcctgatgagatcccccctctcgagggcgatgaggatgcgtctcgcatggaagaagtcgattaggttaggagttcatagttggaaaacttgtgcccttgtatagtgtccccatgggctcccactgcagcctcgagtgcccctgtcccacctggctccccctgctggtgtctagtgtttttttccctctcctgtccttgtgttgaaggcagtaaactaagggtgtcaagccccattccctctctactcttgacagcaggattggatgttgtgtattgtggtttattttattttcttcattttgttctgaaattaaagtatgcaaaataaagaatatgccgtttttatacagttct

SEQ ID NO: 9545 - DNA, 2483 bp, Homo sapiens
  source 1..2483: mol_type = unassigned DNA; mol_type = unassigned DNA
gagctcggtgattggctcagaagggaaaaggcgggtctccgtgacgacttataaaagcccaggggcaagcggtccggataacggctagcctgaggagctgctgcgacagtccactacctttttcgagagtgactcccgttgtcccaaggcttcccagagcgaacctgtgcggctgcaggcaccggcgcgtcgagtttccggcgtccggaaggaccgagctcttctcgcggatccagtgttccgtttccagcccccaatctcagagcggagccgacagagagcagggaaccggcatggccaaagccgcggcgatcggcatcgacctgggcaccacctactcctgcgtgggggtgttccaacacggcaaggtggagatcatcgccaacgaccagggcaaccgcaccacccccagctacgtggccttcacggacaccgagcggctcatcggggatgcggccaagaaccaggtggcgctgaacccgcagaacaccgtgtttgacgcgaagcggctgatcggccgcaagttcggcgacccggtggtgcagtcggacatgaagcactggcctttccaggtgatcaacgacggagacaagcccaaggtgcaggtgagctacaagggggagaccaaggcattctaccccgaggagatctcgtccatggtgctgaccaagatgaaggagatcgccgaggcgtacctgggctacccggtgaccaacgcggtgatcaccgtgccggcctacttcaacgactcgcagcgccaggccaccaaggatgcgggtgtgatcgcggggctcaacgtgctgcggatcatcaacgagcccacggccgccgccatcgcctacggcctggacagaacgggcaagggggagcgcaacgtgctcatctttgacctgggcgggggcaccttcgacgtgtccatcctgacgatcgacgacggcatcttcgaggtgaaggccacggccggggacacccacctgggtggggaggactttgacaacaggctggtgaaccacttcgtggaggagttcaagagaaaacacaagaaggacatcagccagaacaagcgagccgtgaggcggctgcgcaccgcctgcgagagggccaagaggaccctgtcgtccagcacccaggccagcctggagatcgactccctgtttgagggcatcgacttctacacgtccatcaccagggcgaggttcgaggagctgtgctccgacctgttccgaagcaccctggagcccgtggagaaggctctgcgcgacgccaagctggacaaggcccagattcacgacctggtcctggtcgggggctccacccgcatccccaaggtgcagaagctgctgcaggacttcttcaacgggcgcgacctgaacaagagcatcaaccccgacgaggctgtggcctacggggcggcggtgcaggcggccatcctgatgggggacaagtccgagaacgtgcaggacctgctgctgctggacgtggctcccctgtcgctggggctggagacggccggaggcgtgatgactgccctgatcaagcgcaactccaccatccccaccaagcagacgcagatcttcaccacctactccgacaaccaacccggggtgctgatccaggtgtacgagggcgagagggccatgacgaaagacaacaatctgttggggcgcttcgagctgagcggcatccctccggcccccaggggcgtgccccagatcgaggtgaccttcgacatcgatgccaacggcatcctgaacgtcacggccacggacaagagcaccggcaaggccaacaagatcaccatcaccaacgacaagggccgcctgagcaaggaggagatcgagcgcatggtgcaggaggcggagaagtacaaagcggaggacgaggtgcagcgcgagagggtgtcagccaagaacgccctggagtcctacgccttcaacatgaagagcgccgtggaggatgaggggctcaagggcaagatcagcgaggcggacaagaagaaggtgctggacaagtgtcaagaggtcatctcgtggctggacgccaacaccttggccgagaaggacgagtttgagcacaagaggaaggagctggagcaggtgtgtaaccccatcatcagcggactgtaccagggtgccggtggtcccgggcctgggggcttcggggctcagggtcccaagggagggtctgggtcaggccccaccattgaggaggtagattaggggcctttccaagattgctgtttttgttttggagcttcaagactttgcatttcctagtatttctgtttgtcagttctcaatttcctgtgtttgcaatgttgaaattttttggtgaagtactgaacttgctttttttccggtttctacatgcagagatgaatttatactgccatcttacgactatttcttctttttaatacacttaactcaggccattttttaagttggttacttcaaagtaaataaactttaaaattcaagtga

SEQ ID NO: 9546 - DNA, 1909 bp, Homo sapiens
  source 1..1909: mol_type = unassigned DNA; mol_type = unassigned DNA
aacggctagcctgaggagctgctgcgacagtccactacctttttcgagagtgactcccgttgtcccaaggcttcccagagcgaacctgtgcggctgcaggcaccggcgcgtcgagtttccggcgtccggaaggaccgagctcttctcgcggatccagtgttccgtttccagcccccaatctcagagcggagccgacagagagcagggaaccggcatggccaaagccgcggcgatcggcatcgacctgggcaccacctactcctgcgtgggggtgttccaacacggcaagggggagcgcaacgtgctcatctttgacctgggcgggggcaccttcgacgtgtccatcctgacgatcgacgacggcatcttcgaggtgaaggccacggccggggacacccacctgggtggggaggactttgacaacaggctggtgaaccacttcgtggaggagttcaagagaaaacacaagaaggacatcagccagaacaagcgagccgtgaggcggctgcgcaccgcctgcgagagggccaagaggaccctgtcgtccagcacccaggccagcctggagatcgactccctgtttgagggcatcgacttctacacgtccatcaccagggcgaggttcgaggagctgtgctccgacctgttccgaagcaccctggagcccgtggagaaggctctgcgcgacgccaagctggacaaggcccagattcacgacctggtcctggtcgggggctccacccgcatccccaaggtgcagaagctgctgcaggacttcttcaacgggcgcgacctgaacaagagcatcaaccccgacgaggctgtggcctacggggcggcggtgcaggcggccatcctgatgggggacaagtccgagaacgtgcaggacctgctgctgctggacgtggctcccctgtcgctggggctggagacggccggaggcgtgatgactgccctgatcaagcgcaactccaccatccccaccaagcagacgcagatcttcaccacctactccgacaaccaacccggggtgctgatccaggtgtacgagggcgagagggccatgacgaaagacaacaatctgttggggcgcttcgagctgagcggcatccctccggcccccaggggcgtgccccagatcgaggtgaccttcgacatcgatgccaacggcatcctgaacgtcacggccacggacaagagcaccggcaaggccaacaagatcaccatcaccaacgacaagggccgcctgagcaaggaggagatcgagcgcatggtgcaggaggcggagaagtacaaagcggaggacgaggtgcagcgcgagagggtgtcagccaagaacgccctggagtcctacgccttcaacatgaagagcgccgtggaggatgaggggctcaagggcaagatcagcgaggcggacaagaagaaggtgctggacaagtgtcaagaggtcatctcgtggctggacgccaacaccttggccgagaaggacgagtttgagcacaagaggaaggagctggagcaggtgtgtaaccccatcatcagcggactgtaccagggtgccggtggtcccgggcctgggggcttcggggctcagggtcccaagggagggtctgggtcaggccccaccattgaggaggtagattaggggcctttccaagattgctgtttttgttttggagcttcaagactttgcatttcctagtatttctgtttgtcagttctcaatttcctgtgtttgcaatgttgaaattttttggtgaagtactgaacttgctttttttccggtttctacatgcagagatgaatttatactgccatcttacgactatttcttctttttaatacacttaactcaggccattttttaagttggttacttcaaagtaaataaactttaaaattcaagtga

SEQ ID NO: 9547 - DNA, 2483 bp, Homo sapiens
  source 1..2483: mol_type = unassigned DNA; mol_type = unassigned DNA
gagctcggtgattggctcagaagggaaaaggcgggtctccgtgacgacttataaaagcccaggggcaagcggtccggataacggctagcctgaggagctgctgcgacagtccactacctttttcgagagtgactcccgttgtcccaaggcttcccagagcgaacctgtgcggctgcaggcaccggcgcgtcgagtttccggcgtccggaaggaccgagctcttctcgcggatccagtgttccgtttccagcccccaatctcagagccgagccgacagagagcagggaaccggcatggccaaagccgcggcgatcggcatcgacctgggcaccacctactcctgcgtgggggtgttccaacacggcaaggtggagatcatcgccaacgaccagggcaaccgcaccacccccagctacgtggccttcacggacaccgagcggctcatcggggatgcggccaagaaccaggtggcgctgaacccgcagaacaccgtgtttgacgcgaagcggctgatcggccgcaagttcggcgacccggtggtgcagtcggacatgaagcactggcctttccaggtgatcaacgacggagacaagcccaaggtgcaggtgagctacaagggggacaccaaggcattctaccccgaggagatctcgtccatggtgctgaccaagatgaaggagatcgccgaggcgtacctgggctacccggtgaccaacgcggtgatcaccgtgccggcctacttcaacgactcgcagcgccaggccaccaaggatgcgggtgtgatcgcggggctcaacgtgctgcggatcatcaacgagcccacggccgccgccatcgcctacggcctggacagaacgggcaagggggagcgcaacgtgctcatctttgacctgggcgggggcaccttcgacgtgtccatcctgacgatcgacgacggcatcttcgaggtgaaggccacggccggggacacccacctgggtggggaggactttgacaacaggctggtgaaccacttcgtggaggagttcaagagaaaacacaagaaggacatcagccagaacaagcgagccgtgaggcggctgcgcaccgcctgcgagagggccaagaggaccctgtcgtccagcacccaggccagcctggagatcgactccctgtttgagggcatcgacttctacacgtccatcaccagggcgaggttcgaggagctgtgctccgacctgttccgaagcaccctggagcccgtggagaaggctctgcgcgacgccaagctggacaaggcccagattcacgacctggtcctggtcgggggctccacccgcatccccaaggtgcagaagctgctgcaggacttcttcaacgggcgcgacctgaacaagagcatcaaccccgacgaggctgtggcctacggggcggcggtgcaggcggccatcctgatgggggacaagtccgagaacgtgcaggacctgctgctgctggacgtggctcccctgtcgctggggctggagacggccggaggcgtgatgactgccctgatcaagcgcaactccaccatccccaccaagcagacgcagatcttcaccacctactccgacaaccaacccggggtgctgatccaggtgtacgagggcgagagggccatgacgaaagacaacaatctgttggggcgcttcgagctgagcggcatccctccggcccccaggggcgtgccccagatcgaggtgaccttcgacatcgatgccaacggcatcctgaacgtcacggccacggacaagagcaccggcaaggccaacaagatcaccatcaccaacgacaagggccgcctgagcaaggaggagatcgagcgcatggtgcaggaggcggagaagtacaaagcggaggacgaggtgcagcgcgagagggtgtcagccaagaacgccctggagtcctacgccttcaacatgaagagcgccgtggaggatgaggggctcaagggcaagatcagcgaggccgacaagaagaaggtgctggacaagtgtcaagaggtcatctcgtggctggacgccaacaccttggccgagaaggacgagtttgagcacaagaggaaggagctggagcaggtgtgtaaccccatcatcagcggactgtaccagggtgccggtggtcccgggcctgggggcttcggggctcagggtcccaagggagggtctgggtcaggccccaccattgaggaggtagattaggggcctttccaagattgctgtttttgttttggagcttcaagactttgcatttcctagtatttctgtttgtcagttctcaatttcctgtgtttgcaatgttgaaattttttggtgaagtactgaacttgctttttttccggtttctacatgcagagatgaatttatactgccatcttacgactatttcttctttttaatacacttaactcaggccattttttaagttggttacttcaaagtaaataaactttaaaattcaagtga

SEQ ID NO: 9548 - DNA, 1909 bp, Homo sapiens
  source 1..1909: mol_type = unassigned DNA; mol_type = unassigned DNA
aacggctagcctgaggagctgctgcgacagtccactacctttttcgagagtgactcccgttgtcccaaggcttcccagagcgaacctgtgcggctgcaggcaccggcgcgtcgagtttccggcgtccggaaggaccgagctcttctcgcggatccagtgttccgtttccagcccccaatctcagagccgagccgacagagagcagggaaccggcatggccaaagccgcggcgatcggcatcgacctgggcaccacctactcctgcgtgggggtgttccaacacggcaagggggagcgcaacgtgctcatctttgacctgggcgggggcaccttcgacgtgtccatcctgacgatcgacgacggcatcttcgaggtgaaggccacggccggggacacccacctgggtggggaggactttgacaacaggctggtgaaccacttcgtggaggagttcaagagaaaacacaagaaggacatcagccagaacaagcgagccgtgaggcggctgcgcaccgcctgcgagagggccaagaggaccctgtcgtccagcacccaggccagcctggagatcgactccctgtttgagggcatcgacttctacacgtccatcaccagggcgaggttcgaggagctgtgctccgacctgttccgaagcaccctggagcccgtggagaaggctctgcgcgacgccaagctggacaaggcccagattcacgacctggtcctggtcgggggctccacccgcatccccaaggtgcagaagctgctgcaggacttcttcaacgggcgcgacctgaacaagagcatcaaccccgacgaggctgtggcctacggggcggcggtgcaggcggccatcctgatgggggacaagtccgagaacgtgcaggacctgctgctgctggacgtggctcccctgtcgctggggctggagacggccggaggcgtgatgactgccctgatcaagcgcaactccaccatccccaccaagcagacgcagatcttcaccacctactccgacaaccaacccggggtgctgatccaggtgtacgagggcgagagggccatgacgaaagacaacaatctgttggggcgcttcgagctgagcggcatccctccggcccccaggggcgtgccccagatcgaggtgaccttcgacatcgatgccaacggcatcctgaacgtcacggccacggacaagagcaccggcaaggccaacaagatcaccatcaccaacgacaagggccgcctgagcaaggaggagatcgagcgcatggtgcaggaggcggagaagtacaaagcggaggacgaggtgcagcgcgagagggtgtcagccaagaacgccctggagtcctacgccttcaacatgaagagcgccgtggaggatgaggggctcaagggcaagatcagcgaggccgacaagaagaaggtgctggacaagtgtcaagaggtcatctcgtggctggacgccaacaccttggccgagaaggacgagtttgagcacaagaggaaggagctggagcaggtgtgtaaccccatcatcagcggactgtaccagggtgccggtggtcccgggcctgggggcttcggggctcagggtcccaagggagggtctgggtcaggccccaccattgaggaggtagattaggggcctttccaagattgctgtttttgttttggagcttcaagactttgcatttcctagtatttctgtttgtcagttctcaatttcctgtgtttgcaatgttgaaattttttggtgaagtactgaacttgctttttttccggtttctacatgcagagatgaatttatactgccatcttacgactatttcttctttttaatacacttaactcaggccattttttaagttggttacttcaaagtaaataaactttaaaattcaagtga

SEQ ID NO: 9549 - DNA, 2483 bp, Homo sapiens
  source 1..2483: mol_type = unassigned DNA; mol_type = unassigned DNA
gagctcggtgattggctcagaagggaaaaggcgggtctccgtgacgacttataaaagcccaggggcaagcggtccggataacggctagcctgaggagctgctgcgacagtccactacctttttcgagagtgactcccgttgtcccaaggcttcccagagcgaacctgtgcggctgcaggcaccggcgcgtcgagtttccggcgtccggaaggaccgagctcttctcgcggatccagtgttccgtttccagcccccaatctcagagcggagccgacagagagcagggaaccggcatggccaaagccgcggcgatcggcatcgacctgggcaccacctactcctgcgtgggggtgttccaacacggcaaggtggagatcatcgccaacgaccagggcaaccgcaccacccccagctacgtggccttcacggacaccgagcggctcatcggggatgcggccaagaaccaggtggcgctgaacccgcagaacaccgtgtttgacgcgaagcggctgatcggccgcaagttcggcgacccggtggtgcagtcggacatgaagcactggcctttccaggtgatcaacgacggagacaagcccaaggtgcaggtgagctacaagggggagaccaaggcattctaccccgaggagatctcgtccatggtgctgaccaagatgaaggagatcgccgaggcgtacctgggctacccggtgaccaacgcggtgatcaccgtgccggcctacttcaacgactcgcagcgccaggccaccaaggatgcgggtgtgatcgcggggctcaacgtgctgcggatcatcaacgagcccacggccgccgccatcgcctacggcctggacagaacgggcaagggggagcgcaacgtgctcatctttgacctgggcgggggcaccttcgacgtgtccatcctgacgatcgacgacggcatcttcgaggtgaaggccacggccggggacacccacctgggtggggaggactttgacaacaggctggtgaaccacttcgtggaggagttcaagagaaaacacaagaaggacatcagccagaacaagcgagccgtgaggcggctgcgcaccgcctgcgagagggccaagaggaccctgtcgtccagcacccaggccagcctggagatcgactccctgtttgagggcatcgacttctacacgtccatcaccagggcgaggttcgaggagctgtgctccgacctgttccgaagcaccctggagcccgtggagaaggctctgcgcgacgccaagctggacaaggcccagattcacgacctggtcctggtcgggggctccacccgcatccccaaggtgcagaagctgctgcaggacttcttcaacgggcgcgacctgaacaagagcatcaaccccgacgaggctgtggcctacggggcggcggtgcaggcggccatcctgatgggggacaagtccgagaacgtgcaggacctgctgctgctggacgtggctcccctgtcgctggggctggagacggccggaggcgtgatgactgccctgatcaagcgcaactccaccatccccaccaagcagacgcagatcttcaccacctactccgacaaccaacccggggtgctgatccaggtgtacgagggcgagagggccatgacgaaagacaacaatctgttggggcgcttcgagctgagcggcatccctccggcccccaggggcgtgccccagatcgaggtgaccttcgacatcgatgccaacggcatcctgaacgtcacggccacggacaagagcaccggcaaggccaacaagatcaccatcaccaacgacaagggccgcctgagcaaggaggagatcgagcgcatggtgcaggaggcggagaagtacaaagcggaggacgaggtgcagcgcgagagggtgtcagccaagaacgccctggagtcctacgccttcaacatgaagagcgccgtggaggatgaggggctcaagggcaagatcagcgaggccgacaagaagaaggtgctggacaagtgtcaagaggtcatctcgtggctggacgccaacaccttggccgagaaggacgagtttgagcacaagaggaaggagctggagcaggtgtgtaaccccatcatcagcggactgtaccagggtgccggtggtcccgggcctgggggcttcggggctcagggtcccaagggagggtctgggtcaggccccaccattgaggaggtagattaggggcctttccaagattgctgtttttgttttggagcttcaagactttgcatttcctagtatttctgtttgtcagttctcaatttcctgtgtttgcaatgttgaaattttttggtgaagtactgaacttgctttttttccggtttctacatgcagagatgaatttatactgccatcttacgactatttcttctttttaatacacttaactcaggccattttttaagttggttacttcaaagtaaataaactttaaaattcaagtga

SEQ ID NO: 9550 - DNA, 1909 bp, Homo sapiens
  source 1..1909: mol_type = unassigned DNA; mol_type = unassigned DNA
aacggctagcctgaggagctgctgcgacagtccactacctttttcgagagtgactcccgttgtcccaaggcttcccagagcgaacctgtgcggctgcaggcaccggcgcgtcgagtttccggcgtccggaaggaccgagctcttctcgcggatccagtgttccgtttccagcccccaatctcagagcggagccgacagagagcagggaaccggcatggccaaagccgcggcgatcggcatcgacctgggcaccacctactcctgcgtgggggtgttccaacacggcaagggggagcgcaacgtgctcatctttgacctgggcgggggcaccttcgacgtgtccatcctgacgatcgacgacggcatcttcgaggtgaaggccacggccggggacacccacctgggtggggaggactttgacaacaggctggtgaaccacttcgtggaggagttcaagagaaaacacaagaaggacatcagccagaacaagcgagccgtgaggcggctgcgcaccgcctgcgagagggccaagaggaccctgtcgtccagcacccaggccagcctggagatcgactccctgtttgagggcatcgacttctacacgtccatcaccagggcgaggttcgaggagctgtgctccgacctgttccgaagcaccctggagcccgtggagaaggctctgcgcgacgccaagctggacaaggcccagattcacgacctggtcctggtcgggggctccacccgcatccccaaggtgcagaagctgctgcaggacttcttcaacgggcgcgacctgaacaagagcatcaaccccgacgaggctgtggcctacggggcggcggtgcaggcggccatcctgatgggggacaagtccgagaacgtgcaggacctgctgctgctggacgtggctcccctgtcgctggggctggagacggccggaggcgtgatgactgccctgatcaagcgcaactccaccatccccaccaagcagacgcagatcttcaccacctactccgacaaccaacccggggtgctgatccaggtgtacgagggcgagagggccatgacgaaagacaacaatctgttggggcgcttcgagctgagcggcatccctccggcccccaggggcgtgccccagatcgaggtgaccttcgacatcgatgccaacggcatcctgaacgtcacggccacggacaagagcaccggcaaggccaacaagatcaccatcaccaacgacaagggccgcctgagcaaggaggagatcgagcgcatggtgcaggaggcggagaagtacaaagcggaggacgaggtgcagcgcgagagggtgtcagccaagaacgccctggagtcctacgccttcaacatgaagagcgccgtggaggatgaggggctcaagggcaagatcagcgaggccgacaagaagaaggtgctggacaagtgtcaagaggtcatctcgtggctggacgccaacaccttggccgagaaggacgagtttgagcacaagaggaaggagctggagcaggtgtgtaaccccatcatcagcggactgtaccagggtgccggtggtcccgggcctgggggcttcggggctcagggtcccaagggagggtctgggtcaggccccaccattgaggaggtagattaggggcctttccaagattgctgtttttgttttggagcttcaagactttgcatttcctagtatttctgtttgtcagttctcaatttcctgtgtttgcaatgttgaaattttttggtgaagtactgaacttgctttttttccggtttctacatgcagagatgaatttatactgccatcttacgactatttcttctttttaatacacttaactcaggccattttttaagttggttacttcaaagtaaataaactttaaaattcaagtga

SEQ ID NO: 9551 - DNA, 2483 bp, Homo sapiens
  source 1..2483: mol_type = unassigned DNA; mol_type = unassigned DNA
gagctcggtgattggctcagaagggaaaaggcgggtctccgtgacgacttataaaagcccaggggcaagcggtccggataacggctagcctgaggagctgctgcgacagtccactacctttttcgagagtgactcccgttgtcccaaggcttcccagagcgaacctgtgcggctgcaggcaccggcgcgtcgagtttccggcgtccggaaggaccgagctcttctcgcggatccagtgttccgtttccagcccccaatctcagagcggagccgacagagagcagggaaccggcatggccaaagccgcggcgatcggcatcgacctgggcaccacctactcctgcgtgggggtgttccaacacggcaaggtggagatcatcgccaacgaccagggcaaccgcaccacccccagctacgtggccttcacggacaccgagcggctcatcggggatgcggccaagaaccaggtggcgctgaacccgcagaacaccgtgtttgacgcgaagcggctgattggccgcaagttcggcgacccggtggtgcagtcggacatgaagcactggcctttccaggtgatcaacgacggagacaagcccaaggtgcaggtgagctacaagggggagaccaaggcattctaccccgaggagatctcgtccatggtgctgaccaagatgaaggagatcgccgaggcgtacctgggctacccggtgaccaacgcggtgatcaccgtgccggcctacttcaacgactcgcagcgccaggccaccaaggatgcgggtgtgatcgcggggctcaacgtgctgcggatcatcaacgagcccacggccgccgccatcgcctacggcctggacagaacgggcaagggggagcgcaacgtgctcatctttgacctgggcgggggcaccttcgacgtgtccatcctgacgatcgacgacggcatcttcgaggtgaaggccacggccggggacacccacctgggtggggaggactttgacaacaggctggtgaaccacttcgtggaggagttcaagagaaaacacaagaaggacatcagccagaacaagcgagccgtgaggcggctgcgcaccgcctgcgagagggccaagaggaccctgtcgtccagcacccaggccagcctggagatcgactccctgtttgagggcatcgacttctacacgtccatcaccagggcgaggttcgaggagctgtgctccgacctgttccgaagcaccctggagcccgtggagaaggctctgcgcgacgccaagctggacaaggcccagattcacgacctggtcctggtcgggggctccacccgcatccccaaggtgcagaagctgctgcaggacttcttcaacgggcgcgacctgaacaagagcatcaaccccgacgaggctgtggcctacggggcggcggtgcaggcggccatcctgatgggggacaagtccgagaacgtgcaggacctgctgctgctggacgtggctcccctgtcgctggggctggagacggccggaggcgtgatgactgccctgatcaagcgcaactccaccatccccaccaagcagacgcagatcttcaccacctactccgacaaccaacccggggtgctgatccaggtgtacgagggcgagagggccatgacgaaagacaacaatctgttggggcgcttcgagctgagcggcatccctccggcccccaggggcgtgccccagatcgaggtgaccttcgacatcgatgccaacggcatcctgaacgtcacggccacggacaagagcaccggcaaggccaacaagatcaccatcaccaacgacaagggccgcctgagcaaggaggagatcgagcgcatggtgcaggaggcggagaagtacaaagcggaggacgaggtgcagcgcgagagggtgtcagccaagaacgccctggagtcctacgccttcaacatgaagagcgccgtggaggatgaggggctcaagggcaagatcagcgaggcggacaagaagaaggtgctggacaagtgtcaagaggtcatctcgtggctggacgccaacaccttggccgagaaggacgagtttgagcacaagaggaaggagctggagcaggtgtgtaaccccatcatcagcggactgtaccagggtgccggtggtcccgggcctgggggcttcggggctcagggtcccaagggagggtctgggtcaggccccaccattgaggaggtagattaggggcctttccaagattgctgtttttgttttggagcttcaagactttgcatttcctagtatttctgtttgtcagttctcaatttcctgtgtttgcaatgttgaaattttttggtgaagtactgaacttgctttttttccggtttctacatgcagagatgaatttatactgccatcttacgactatttcttctttttaatacacttaactcaggccattttttaagttggttacttcaaagtaaataaactttaaaattcaagtga

SEQ ID NO: 9552 - DNA, 1909 bp, Homo sapiens; identical to SEQ ID NO: 9546
  source 1..1909: mol_type = unassigned DNA

SEQ ID NO: 9553 - DNA, 2483 bp, Homo sapiens
  source 1..2483: mol_type = unassigned DNA
gagctcggtgattggctcagaagggaaaaggcgggtctccgtgacgacttataaaagcccaggggcaagcggtccggataacggctagcctgaggagctgctgcgacagtccactacctttttcgagagtgactcccgttgtcccaaggcttcccagagcgaacctgtgcggctgcaggcaccggcgcgtcgagtttccggcgtccggaaggaccgagctcttctcgcggatccagtgttccgtttccagcccccaatctcagagccgagccgacagagagcagggaaccggcatggccaaagccgcggcgatcggcatcgacctgggcaccacctactcctgcgtgggggtgttccaacacggcaaggtggagatcatcgccaacgaccagggcaaccgcaccacccccagctacgtggccttcacggacaccgagcggctcatcggggatgcggccaagaaccaggtggcgctgaacccgcagaacaccgtgtttgacgcgaagcggctgatcggccgcaagttcggcgacccggtggtgcagtcggacatgaagcactggcctttccaggtgatcaacgacggagacaagcccaaggtgcaggtgagctacaagggggagaccaaggcattctaccccgaggagatctcgtccatggtgctgaccaagatgaaggagatcgccgaggcgtacctgggctacccggtgaccaacgcggtgatcaccgtgccggcctacttcaacgactcgcagcgccaggccaccaaggatgcgggtgtgatcgcggggctcaacgtgctgcggatcatcaacgagcccacggccgccgccatcgcctacggcctggacagaacgggcaagggggagcgcaacgtgctcatctttgacctgggcgggggcaccttcgacgtgtccatcctgacgatcgacgacggcatcttcgaggtgaaggccacggccggggacacccacctgggtggggaggactttgacaacaggctggtgaaccacttcgtggaggagttcaagagaaaacacaagaaggacatcagccagaacaagcgagccgtgaggcggctgcgcaccgcctgcgagagggccaagaggaccctgtcgtccagcacccaggccagcctggagatcgactccctgtttgagggcatcgacttctacacgtccatcaccagggcgaggttcgaggagctgtgctccgacctgttccgaagcaccctggagcccgtggagaaggctctgcgcgacgccaagctggacaaggcccagattcacgacctggtcctggtcgggggctccacccgcatccccaaggtgcagaagctgctgcaggacttcttcaacgggcgcgacctgaacaagagcatcaaccccgacgaggctgtggcctacggggcggcggtgcaggcggccatcctgatgggggacaagtccgagaacgtgcaggacctgctgctgctggacgtggctcccctgtcgctggggctggagacggccggaggcgtgatgactgccctgatcaagcgcaactccaccatccccaccaagcagacgcagatcttcaccacctactccgacaaccaacccggggtgctgatccaggtgtacgagggcgagagggccatgacgaaagacaacaatctgttggggcgcttcgagctgagcggcatccctccggcccccaggggcgtgccccagatcgaggtgaccttcgacatcgatgccaacggcatcctgaacgtcacggccacggacaagagcaccggcaaggccaacaagatcaccatcaccaacgacaagggccgcctgagcaaggaggagatcgagcgcatggtgcaggaggcggagaagtacaaagcggaggacgaggtgcagcgcgagagggtgtcagccaagaacgccctggagtcctacgccttcaacatgaagagcgccgtggaggatgaggggctcaagggcaagatcagcgaggccgacaagaagaaggtgctggacaagtgtcaagaggtcatctcgtggctggacgccaacaccttggccgagaaggacgagtttgagcacaagaggaaggagctggagcaggtgtgtaaccccatcatcagcggactgtaccagggtgccggtggtcccgggcctgggggcttcggggctcagggtcccaagggagggtctgggtcaggccccaccattgaggaggtagattaggggcctttccaagattgctgtttttgttttggagcttcaagactttgcatttcctagtatttctgtttgtcagttctcaatttcctgtgtttgcaatgttgaaattttttggtgaagtactgaacttgctttttttccggtttctacatgcagagatgaatttatactgccatcttacgactatttcttctttttaatacacttaactcaggccattttttaagttggttacttcaaagtaaataaactttaaaattcaagtga

SEQ ID NO: 9554 - DNA, 1909 bp, Homo sapiens; identical to SEQ ID NO: 9548
  source 1..1909: mol_type = unassigned DNA

SEQ ID NO: 9555 - DNA, 2521 bp, Homo sapiens
  source 1..2521: mol_type = unassigned DNA
ggaaaacggccagcctgaggagctgctgcgagggtccgcttcgtctttcgagagtgactcccgcggtcccaaggctttccagagcgaacctgtgcggctgcaggcaccggcgtgttgagtttccggcgttccgaaggactgagctcttgtcgcggatcccgtccgccgtttccagcccccagtctcagagcggagcccacagagcagggcaccggcatggccaaagccgcggcgatcggcatcgacctgggcaccacctactcctgcgtgggggtgttccaacacggcaaggtggagatcatcgccaacgaccagggcaaccgcaccacccccagctacgtggccttcacggacaccgagcggctcatcggggatgcggccaagaaccaggtggcgctgaacccgcagaacaccgtgtttgacgcgaagcggctgatcggccgcaagttcggcgacccggtggtgcagtcggacatgaagcactggcctttccaggtgatcaacgacggagacaagcccaaggtgcaggtgagctacaagggggagaccaaggcattctaccccgaggagatctcgtccatggtgctgaccaagatgaaggagatcgccgaggcgtacctgggctacccggtgaccaacgcggtgatcaccgtgccggcctacttcaacgactcgcagcgccaggccaccaaggatgcgggtgtgatcgcggggctcaacgtgctgcggatcatcaacgagcccacggccgccgccatcgcctacggcctggacagaacgggcaagggggagcgcaacgtgctcatctttgacctgggcgggggcaccttcgacgtgtccatcctgacgatcgacgacggcatcttcgaggtgaaggccacggccggggacacccacctgggtggggaggactttgacaacaggctggtgaaccacttcgtggaggagttcaagagaaaacacaagaaggacatcagccagaacaagcgagccgtgaggcggctgcgcaccgcctgcgagagggccaagaggaccctgtcgtccagcacccaggccagcctggagatcgactccctgtttgagggcatcgacttctacacgtccatcaccagggcgaggttcgaggagctgtgctccgacctgttccgaagcaccctggagcccgtggagaaggctctgcgcgacgccaagctggacaaggcccagattcacgacctggtcctggtcgggggctccacccgcatccccaaggtgcagaagctgctgcaagacttcttcaacgggcgcgacctgaacaagagcatcaaccccgacgaggctgtggcctacggggcggcggtgcaggcggccatcctgatgggggacaagtccgagaacgtgcaggacctgctgctgctggacgtggctcccctgtcgctggggctggagacggccggaggcgtgatgactgccctgatcaagcgcaactccaccatccccaccaagcagacgcagatcttcaccacctactccgacaaccaacccggggtgctgatccaggtgtacgagggcgagagggccatgacgaaagacaacaatctgttggggcgcttcgagctgagcggcatccctccggcccccaggggcgtgccccagatcgaggtgaccttcgacatcgatgccaacggcatcctgaacgtcacggccacggacaagagcaccggcaaggccaacaagatcaccatcaccaacgacaagggccgcctgagcaaggaggagatcgagcgcatggtgcaggaggcggagaagtacaaagcggaggacgaggtgcagcgcgagagggtgtcagccaagaacgccctggagtcctacgccttcaacatgaagagcgccgtggaggatgaggggctcaagggcaagatcagcgaggcggacaagaagaaggttctggacaagtgtcaagaggtcatctcgtggctggacgccaacaccttggccgagaaggacgagtttgagcacaagaggaaggagctggagcaggtgtgtaaccccatcatcagcggactgtaccagggtgccggtggtcccgggcctggcggcttcggggctcagggtcccaagggagggtctgggtcaggccctaccattgaggaggtggattaggggcctttgttctttagtatgtttgtctttgaggtggactgttgggactcaaggactttgctgctgttttcctatgtcatttctgcttcagctctttgctgcttcacttctttgtaaagttgtaacctgatggtaattagctggcttcattatttttgtagtacaaccgatatgttcattagaattctttgcatttaatgttgatactgtaagggtgtttcgttccctttaaatgaatcaacactgccaccttctgtacgagtttgtttgttttttttttttttttttttttttgcttggcgaaaacactacaaaggctgggaatgtatgtttttataatttgtttatttaaatatgaaaaataaaatgttaaactttt

SEQ ID NO: 9556 - DNA, 2521 bp, Homo sapiens
  source 1..2521: mol_type = unassigned DNA
ggaaaacggccagcctgaggagctgctgcgagggtccgcttcgtctttcgagagtgactcccgcggtcccaaggctttccagagcgaacctgtgcggctgcaggcaccggcgtgttgagtttccggcgttccgaaggactgagctcttgtcgcggatcccgtccgccgtttccagcccccagtctcagagcggagcccacagagcagggcaccggcatggccaaagccgcggcgatcggcatcgacctgggcaccacctactcctgcgtgggggtgttccaacacggcaaggtggagatcatcgccaacgaccagggcaaccgcaccacccccagctacgtggccttcacggacaccgagcggctcatcggggatgcggccaagaaccaggtggcgctgaacccgcagaacaccgtgtttgacgcgaagcggctgattggccgcaagttcggcgacccggtggtgcagtcggacatgaagcactggcctttccaggtgatcaacgacggagacaagcccaaggtgcaggtgagctacaagggggagaccaaggcattctaccccgaggagatctcgtccatggtgctgaccaagatgaaggagatcgccgaggcgtacctgggctacccggtgaccaacgcggtgatcaccgtgccggcctacttcaacgactcgcagcgccaggccaccaaggatgcgggtgtgatcgcggggctcaacgtgctgcggatcatcaacgagcccacggccgccgccatcgcctacggcctggacagaacgggcaagggggagcgcaacgtgctcatctttgacctgggcgggggcaccttcgacgtgtccatcctgacgatcgacgacggcatcttcgaggtgaaggccacggccggggacacccacctgggtggggaggactttgacaacaggctggtgaaccacttcgtggaggagttcaagagaaaacacaagaaggacatcagccagaacaagcgagccgtgaggcggctgcgcaccgcctgcgagagggccaagaggaccctgtcgtccagcacccaggccagcctggagatcgactccctgtttgagggcatcgacttctacacgtccatcaccagggcgaggttcgaggagctgtgctccgacctgttccgaagcaccctggagcccgtggagaaggctctgcgcgacgccaagctggacaaggcccagattcacgacctggtcctggtcgggggctccacccgcatccccaaggtgcagaagctgctgcaggacttcttcaacgggcgcgacctgaacaagagcatcaaccccgacgaggctgtggcctacggggcggcggtgcaggcggccatcctgatgggggacaagtccgagaacgtgcaggacctgctgctgctggacgtggctcccctgtcgctggggctggagacggccggaggcgtgatgactgccctgatcaagcgcaactccaccatccccaccaagcagacgcagatcttcaccacctactccgacaaccaacccggggtgctgatccaggtgtacgagggcgagagggccatgacgaaagacaacaatctgttggggcgcttcgagctgagcggcatccctccggcccccaggggcgtgccccagatcgaggtgaccttcgacatcgatgccaacggcatcctgaacgtcacggccacggacaagagcaccggcaaggccaacaagatcaccatcaccaacgacaagggccgcctgagcaaggaggagatcgagcgcatggtgcaggaggcggagaagtacaaagcggaggacgaggtgcagcgcgagagggtgtcagccaagaacgccctggagtcctacgccttcaacatgaagagcgccgtggaggatgaggggctcaagggcaagatcagcgaggcggacaagaagaaggttctggacaagtgtcaagaggtcatctcgtggctggacgccaacaccttggccgagaaggacgagtttgagcacaagaggaaggagctggagcaggtgtgtaaccccatcatcagcggactgtaccagggtgccggtggtcccgggcctggcggcttcggggctcagggtcccaagggagggtctgggtcaggccctaccattgaggaggtggattaggggcctttgttctttagtatgtttgtctttgaggtggactgttgggactcaaggactttgctgctgttttcctatgtcatttctgcttcagctctttgctgcttcacttctttgtaaagttgtaacctgatggtaattagctggcttcattatttttgtagtacaaccgatatgttcattagaattctttgcatttaatgttgatactgtaagggtgtttcgttccctttaaatgaatcaacactgccaccttctgtacgagtttgtttgttttttttttttttttttttttttgcttggcgaaaacactacaaaggctgggaatgtatgtttttataatttgtttatttaaatatgaaaaataaaatgttaaactttt

SEQ ID NO: 9557 - DNA, 2525 bp, Homo sapiens
  source 1..2525: mol_type = unassigned DNA
ggaaaacggccagcctgaggagctgctgcgagggtccgcttcgtctttcgagagtgactcccgcggtcccaaggctttccagagcgaacctgtgcggctgcaggcaccggcgtgttgagtttccggcgttccgaaggactgagctcttgtcgcggatcccgtccgccgtttccagcccccagtctcagagcggagcccacagagcagggcaccggcatggccaaagccgcggcgatcggcatcgacctgggcaccacctactcctgcgtgggggtgttccaacacggcaaggtggagatcatcgccaacgaccagggcaaccgcaccacccccagctacgtggccttcacggacaccgagcggctcatcggggatgcggccaagaaccaggtggcgctgaacccgcagaacaccgtgtttgacgcgaagcggctgatcggccgcaagttcggcgacccggtggtgcagtcggacatgaagcactggcctttccaggtgatcaacgacggagacaagcccaaggtgcaggtgagctacaagggggagaccaaggcattctaccccgaggagatctcgtccatggtgctgaccaagatgaaggagatcgccgaggcgtacctgggctacccggtgaccaacgcggtgatcaccgtgccggcctacttcaacgactcgcagcgccaggccaccaaggatgcgggtgtgatcgcggggctcaacgtgctgcggatcatcaacgagcccacggccgccgccatcgcctacggcctggacagaacgggcaagggggagcgcaacgtgctcatctttgacctgggcgggggcaccttcgacgtgtccatcctgacgatcgacgacggcatcttcgaggtgaaggccacggccggggacacccacctgggtggggaggactttgacaacaggctggtgaaccacttcgtggaggagttcaagagaaaacacaagaaggacatcagccagaacaagcgagccgtgaggcggctgcgcaccgcctgcgagagggccaagaggaccctgtcgtccagcacccaggccagcctggagatcgactccctgtttgagggcatcgacttctacacgtccatcaccagggcgaggttcgaggagctgtgctccgacctgttccgaagcaccctggagcccgtggagaaggctctgcgcgacgccaagctggacaaggcccagattcacgacctggtcctggtcgggggctccacccgcatccccaaggtgcagaagctgctgcaggacttcttcaacgggcgcgacctgaacaagagcatcaaccccgacgaggctgtggcctacggggcggcggtgcaggcggccatcctgatgggggacaagtccgagaacgtgcaggacctgctgctgctggacgtggctcccctgtcgctggggctggagacggccggaggcgtgatgactgccctgatcaagcgcaactccaccatccccaccaagcagacgcagatcttcaccacctactccgacaaccaacccggggtgctgatccaggtgtacgagggcgagagggccatgacgaaagacaacaatctgttggggcgcttcgagctgagcggcatccctccggcccccaggggcgtgccccagatcgaggtgaccttcgacatcgatgccaacggcatcctgaacgtcacggccacggacaagagcaccggcaaggccaacaagatcaccatcaccaacgacaagggccgcctgagcaaggaggagatcgagcgcatggtgcaggaggcggagaagtacaaagcggaggacgaggtgcagcgcgagagggtgtcagccaagaacgccctggagtcctacgccttcaacatgaagagcgccgtggaggatgaggggctcaagggcaagatcagcgaggcggacaagaagaaggttctggacaagtgtcaagaggtcatctcgtggctggacgccaacaccttggccgagaaggacgagtttgagcacaagaggaaggagctggagcaggtgtgtaaccccatcatcagcggactgtaccagggtgccggtggtcccgggcctgggggcttcggggctcagggtcccaagggagggtctgggtcaggccctaccattgaggaggtggattaggggcctttgttctttagtatgtttgtctttgaggtggactgttgggactcaaggactttgctgctgttttcctatgtcatttctgcttcagctctttgctgcttcacttctttgtaaagttaagttgtaacctgatggtaattagctggcttcattatttttgtagtacaaccgatatgttcattagaattctttgcatttaatgttgatactgtaagggtgtttcgttccctttaaatgaatcaacactgccaccttctgtacgagtttttttttttttttttttttttttttttttgcttggcgaaaacactacaaaggctgggaatgtatgtttttataatttgtttatttaaatatgaaaaataaaatgttaaactttt

SEQ ID NO: 9558 - DNA, 2348 bp, Homo sapiens
  source 1..2348: mol_type = unassigned DNA
ccccagtctcagagcggagcccacagagcagggcaccggcatggccaaagccgcggcgatcggcatcgacctgggcaccacctactcctgcgtgggggtgttccaacacggcaaggtggagatcatcgccaacgaccagggcaaccgcaccacccccagctacgtggccttcacggacaccgagcggctcatcggggatgcggccaagaaccaggtggcgctgaacccgcagaacaccgtgtttgacgcgaagcggctgatcggccgcaagttcggcgacccggtggtgcagtcggacatgaagcactggcctttccaggtgatcaacgacggagacaagcccaaggtgcaggtgagctacaagggggagaccaaggcattctaccccgaggagatctcgtccatggtgctgaccaagatgaaggagatcgccgaggcgtacctgggctacccggtgaccaacgcggtgatcaccgtgccggcctacttcaacgactcgcagcgccaggccaccaaggatgcgggtgtgatcgcggggctcaacgtgctgcggatcatcaacgagcccacggccgccgccatcgcctacggcctggacagaacgggcaagggggagcgcaacgtgctcatctttgacctgggcgggggcaccttcgacgtgtccatcctgacgatcgacgacggcatcttcgaggtgaaggccacggccggggacacccacctgggtggggaggactttgacaacaggctggtgaaccacttcgtggaggagttcaagagaaaacacaagaaggacatcagccagaacaagcgagccgtgaggcggctgcgcaccgcctgcgagagggccaagaggaccctgtcgtccagcacccaggccagcctggagatcgactccctgtttgagggcatcgacttctacacgtccatcaccagggcgaggttcgaggagctgtgctccgacctgttccgaagcaccctggagcccgtggagaaggctctgcgcgacgccaagctggacaaggcccagattcacgacctggtcctggtcgggggctccacccgcatccccaaggtgcagaagctgctgcaggacttcttcaacgggcgcgacctgaacaagagcatcaaccccgacgaggctgtggcctacggggcggcggtgcaggcggccatcctgatgggggacaagtccgagaacgtgcaggacctgctgctgctggacgtggctcccctgtcgctggggctggagacggccggaggcgtgatgactgccctgatcaagcgcaactccaccatccccaccaagcagacgcagatcttcaccacctactccgacaaccaacccggggtgctgatccaggtgtacgagggcgagagggccatgacgaaagacaacaatctgttggggcgcttcgagctgagcggcatccctccggcccccaggggcgtgccccagatcgaggtgaccttcgacatcgatgccaacggcatcctgaacgtcacggccacggacaagagcaccggcaaggccaacaagatcaccatcaccaacgacaagggccgcctgagcaaggaggagatcgagcgcatggtgcaggaggcggagaagtacaaagcggaggacgaggtgcagcgcgagagggtgtcagccaagaacgccctggagtcctacgccttcaacatgaagagcgccgtggaggatgaggggctcaagggcaagatcagcgaggcggacaagaagaaggttctggacaagtgtcaagaggtcatctcgtggctggacgccaacaccttggccgagaaggacgagtttgagcacaagaggaaggagctggagcaggtgtgtaaccccatcatcagcggactgtaccagggtgccggtggtcccgggcctgggggcttcggggctcagggtcccaagggagggtctgggtcaggccctaccattgaggaggtggattaggggcctttgttctttagtatgtttgtctttgaggtggactgttgggactcaaggactttgctgctgttttcctatgtcatttctgcttcagctctttgctgcttcacttctttgtaaagttaagttgtaacctgatggtaattagctggcttcattatttttgtagtacaaccgatatgttcattagaattctttgcatttaatgttgatactgtaagggtgtttcgttccctttaaatgaatcaacactgccaccttctgtacgagtttttttttttttttttttttttttttttttgcttggcgaaaacactacaaaggctgggaatgtatgtttttataatttgtttatttaaatatgaaaaataaaatgttaaacttt

SEQ ID NO: 9559 - DNA, 2515 bp, Homo sapiens
  source 1..2515: mol_type = unassigned DNA
ggaaaacggccagcctgaggagctgctgcgagggtccgcttcgtctttcgagagtgactcccgcggtcccaaggctttccagagcgaacctgtgcggctgcaggcaccggcgtgttgagtttccggcgttccgaaggactgagctcttgtcgcggatcccgtccgccgtttccagcccccagtctcagagcggagcccacagagcagggcaccggcatggccaaagccgcggcgatcggcatcgacctgggcaccacctactcctgcgtgggggtgttccaacacggcaaggtggagatcatcgccaacgaccagggcaaccgcaccacccccagctacgtggccttcacggacaccgagcggctcatcggggatgcggccaagaaccaggtggcgctgaacccgcagaacaccgtgtttgacgcgaagcggctgatcggccgcaagttcggcgacccggtggtgcagtcggacatgaagcactggcctttccaggtgatcaacgacggagacaagcccaaggtgcaggtgagctacaagggggagaccaaggcattctaccccgaggagatctcgtccatggtgctgaccaagatgaaggagatcgccgaggcgtacctgggctacccggtgaccaacgcggtgatcaccgtgccggcctacttcaacgactcgcagcgccaggccaccaaggatgcgggtgtgatcgcggggctcaacgtgctgcggatcatcaacgagcccacggccgccgccatcgcctacggcctggacagaacgggcaagggggagcgcaacgtgctcatctttgacctgggcgggggcaccttcgacgtgtccatcctgacgatcgacgacggcatcttcgaggtgaaggccacggccggggacacccacctgggtggggaggactttgacaacaggctggtgaaccacttcgtggaggagttcaagagaaaacacaagaaggacatcagccagaacaagcgagccgtgaggcggctgcgcaccgcctgcgagagggccaagaggaccctgtcgtccagcacccaggccagcctggagatcgactccctgtttgagggcatcgacttctacacgtccatcaccagggcgaggttcgaggagctgtgctccgacctgttccgaagcaccctggagcccgtggagaaggctctgcgcgacgccaagctggacaaggcccagattcacgacctggtcctggtcgggggctccacccgcatccccaaggtgcagaagctgctgcaagacttcttcaacgggcgcgacctgaacaagagcatcaaccccgacgaggctgtggcctacggggcggcggtgcaggcggccatcctgatgggggacaagtccgagaacgtgcaggacctgctgctgctggacgtggctcccctgtcgctggggctggagacggccggaggcgtgatgactgccctgatcaagcgcaactccaccatccccaccaagcagacgcagatcttcaccacctactccgacaaccaacccggggtgctgatccaggtgtacgagggcgagagggccatgacgaaagacaacaatctgttggggcgcttcgagctgagcggcatccctccggcccccaggggcgtgccccagatcgaggtgaccttcgacatcgatgccaacggcatcctgaacgtcacggccacggacaagagcaccggcaaggccaacaagatcaccatcaccaacgacaagggccgcctgagcaaggaggagatcgagcgcatggtgcaggaggcggagaagtacaaagcggaggacgaggtgcagcgcgagagggtgtcagccaagaacgccctggagtcctacgccttcaacatgaagagcgccgtggaggatgaggggctcaagggcaagatcagcgaggcggacaagaagaaggttctggacaagtgtcaagaggtcatctcgtggctggacgccaacaccttggccgagaaggacgagtttgagcacaagaggaaggagctggagcaggtgtgtaaccccatcatcagcggactgtaccagggtgccggtggtcccgggcctgggggcttcggggctcagggtcccaagggagggtctgggtcaggccctaccattgaggaggtggattaggggcctttgttctttagtatgtttgtctttgaggtggactgttgggactcaaggactttgctgctgttttcctatgtcatttctgcttcagctctttgctgcttcacttctttgtaaagttgtaacctgatggtaattagctggcttcattatttttgtagtacaaccgatatgttcattagaattctttgcatttaatgttgatactgtaagggtgtttcgttccctttaaatgaatcaacactgccaccttctgtacgagtttgttttttttttttttttttttttgcttggcgaaaacactacaaaggctgggaatgtatgtttttataatttgtttatttaaatatgaaaaataaaatgttaaactttt

SEQ ID NO: 9560 - DNA, 1929 bp, Homo sapiens
  source 1..1929: mol_type = unassigned DNA; mol_type = unassigned DNA
ggcatggccaaagccgcggcgatcggcatcgacctgggcaccacctactcctgcgtgggggtgttccaacacggcaaggtggagatcatcgccaacgaccagggcaaccgcaccacccccagctacgtggccttcacggacaccgagcggctcatcggggatgcggccaagaaccaggtggcgctgaacccgcagaacaccgtgtttgacgcgaagcggctgatcggccgcaagttcggcgacccggtggtgcagtcggacatgaagcactggcctttccaggtgatcaacgacggagacaagcccaaggtgcaggtgagctacaagggggagaccaaggcattctaccccgaggagatctcgtccatggtgctgaccaagatgaaggagatcgccgaggcgtacctgggctacccggtgaccaacgcggtgatcaccgtgccggcctacttcaacgactcgcagcgccaggccaccaaggatgcgggtgtgatcgcggggctcaacgtgctgcggatcatcaacgagcccacggccgccgccatcgcctacggcctggacagaacgggcaagggggagcgcaacgtgctcatctttgacctgggcgggggcaccttcgacgtgtccatcctgacgatcgacgacggcatcttcgaggtgaaggccacggccggggacacccacctgggtggggaggactttgacaacaggctggtgaaccacttcgtggaggagttcaagagaaaacacaagaaggacatcagccagaacaagcgagccgtgaggcggctgcgcaccgcctgcgagagggccaagaggaccctgtcgtccagcacccaggccagcctggagatcgactccctgtttgagggcatcgacttctacacgtccatcaccagggcgaggttcgaggagctgtgctccgacctgttccgaagcaccctggagcccgtggagaaggctctgcgcgacgccaagctggacaaggcccagattcacgacctggtcctggtcgggggctccacccgcatccccaaggtgcagaagctgctgcaagacttcttcaacgggcgcgacctgaacaagagcatcaaccccgacgaggctgtggcctacggggcggcggtgcaggcggccatcctgatgggggacaagtccgagaacgtgcaggacctgctgctgctggacgtggctcccctgtcgctggggctggagacggccggaggcgtgatgactgccctgatcaagcgcaactccaccatccccaccaagcagacgcagatcttcaccacctactccgacaaccaacccggggtgctgatccaggtgtacgagggcgagagggccatgacgaaagacaacaatctgttggggcgcttcgagctgagcggcatccctccggcccccaggggcgtgccccagatcgaggtgaccttcgacatcgatgccaacggcatcctgaacgtcacggccacggacaagagcaccggcaaggccaacaagatcaccatcaccaacgacaagggccgcctgagcaaggaggagatcgagcgcatggtgcaggaggcggagaagtacaaagcggaggacgaggtgcagcgcgagagggtgtcagccaagaacgccctggagtcctacgccttcaacatgaagagcgccgtggaggatgaggggctcaagggcaagatcagcgaggcggacaagaagaaggttctggacaagtgtcaagaggtcatctcgtggctggacgccaacaccttggccgagaaggacgagtttgagcacaagaggaaggagctggagcaggtgtgtaaccccatcatcagcggactgtaccagggtgccggtggtcccgggcctgggggcttcggggctcagggtcccaagggagggtctgggtcaggccctaccattgaggaggtggattag

SEQ ID NO: 9561 - DNA, 2524 bp, Homo sapiens
  source 1..2524: mol_type = unassigned DNA; mol_type = unassigned DNA
ggaaaacggccagcctgaggagctgctgcgagggtccgcttcgtctttcgagagtgactcccgcggtcccaaggctttccagagcgaacctgtgcggctgcaggcaccggcgtgttgagtttccggcgttccgaaggactgagctcttgtcgcggatcccgtccgccgtttccagcccccagtctcagagcggagcccacagagcagggcaccggcatggccaaagccgcggcgatcggcatcgacctgggcaccacctactcctgcgtgggggtgttccaacacggcaaggtggagatcatcgccaacgaccagggcaaccgcaccacccccagctacgtggccttcacggacaccgagcggctcatcggggatgcggccaagaaccaggtggcgctgaacccgcagaacaccgtgtttgacgcgaagcggctgatcggccgcaagttcggcgacccggtggtgcagtcggacatgaagcactggcctttccaggtgatcaacgacggagacaagcccaaggtgcaggtgagctacaagggggagaccaaggcattctaccccgaggagatctcgtccatggtgctgaccaagatgaaggagatcgccgaggcgtacctgggctacccggtgaccaacgcggtgatcaccgtgccggcctacttcaacgactcgcagcgccaggccaccaaggatgcgggtgtgatcgcggggctcaacgtgctgcggatcatcaacgagcccacggccgccgccatcgcctacggcctggacagaacgggcaagggggagcgcaacgtgctcatctttgacctgggcgggggcaccttcgacgtgtccatcctgacgatcgacgacggcatcttcgaggtgaaggccacggccggggacacccacctgggtggggaggactttgacaacaggctggtgaaccacttcgtggaggagttcaagagaaaacacaagaaggacatcagccagaacaagcgagccgtgaggcggctgcgcaccgcctgcgagagggccaagaggaccctgtcgtccagcacccaggccagcctggagatcgactccctgtttgagggcatcgacttctacacgtccatcaccagggcgaggttcgaggagctgtgctccgacctgttccgaagcaccctggagcccgtggagaaggctctgcgcgacgccaagctggacaaggcccagattcacgacctggtcctggtcgggggctccacccgcatccccaaggtgcagaagctgctgcaggacttcttcaacgggcgcgacctgaacaagagcatcaaccccgacgaggctgtggcctacggggcggcggtgcaggcggccatcctgatgggggacaagtccgagaacgtgcaggacctgctgctgctggacgtggctcccctgtcgctggggctggagacggccggaggcgtgatgactgccctgatcaagcgcaactccaccatccccaccaagcagacgcagatcttcaccacctactccgacaaccaacccggggtgctgatccaggtgtacgagggcgagagggccatgacgaaagacaacaatctgttggggcgcttcgagctgagcggcatccctccggcccccaggggcgtgccccagatcgaggtgaccttcgacatcgatgccaacggcatcctgaacgtcacggccacggacaagagcaccggcaaggccaacaagatcaccatcaccaacgacaagggccgcctgagcaaggaggagatcgagcgcatggtgcaggaggcggagaagtacaaagcggaggacgaggtgcagcgcgagagggtgtcagccaagaacgccctggagtcctacgccttcaacatgaagagcgccgtggaggatgaggggctcaagggcaagatcagcgaggcggacaagaagaaggttctggacaagtgtcaagaggtcatctcgtggctggacgccaacaccttggccgagaaggacgagtttgagcacaagaggaaggagctggagcaggtgtgtaaccccatcatcagcggactgtaccagggtgccggtggtcccgggcctggcggcttcggggctcagggtcccaagggagggtctgggtcaggccctaccattgaggaggtggattaggggcctttgttctttagtatgtttgtctttgaggtggactgttgggactcaaggactttgctgctgttttcctatgtcatttctgcttcagctctttgctgcttcacttctttgtaaagttaagttgtaacctgatggtaattagctggcttcattatttttgtagtacaaccgatatgttcattagaattctttgcatttaatgttgatactgtaagggtgtttcgttccctttaaatgaatcaacactgccaccttctgtacgagtttgtttgttttttttttttttttttttttgcttggcgaaaacactacaaaggctgggaatgtatgtttttataatttgtttatttaaatatgaaaaataaaatgttaaactttt

SEQ ID NO: 9562 - DNA, 2347 bp, Homo sapiens
  source 1..2347: mol_type = unassigned DNA; mol_type = unassigned DNA
ccccagtctcagagcggagcccacagagcagggcaccggcatggccaaagccgcggcgatcggcatcgacctgggcaccacctactcctgcgtgggggtgttccaacacggcaaggtggagatcatcgccaacgaccagggcaaccgcaccacccccagctacgtggccttcacggacaccgagcggctcatcggggatgcggccaagaaccaggtggcgctgaacccgcagaacaccgtgtttgacgcgaagcggctgatcggccgcaagttcggcgacccggtggtgcagtcggacatgaagcactggcctttccaggtgatcaacgacggagacaagcccaaggtgcaggtgagctacaagggggagaccaaggcattctaccccgaggagatctcgtccatggtgctgaccaagatgaaggagatcgccgaggcgtacctgggctacccggtgaccaacgcggtgatcaccgtgccggcctacttcaacgactcgcagcgccaggccaccaaggatgcgggtgtgatcgcggggctcaacgtgctgcggatcatcaacgagcccacggccgccgccatcgcctacggcctggacagaacgggcaagggggagcgcaacgtgctcatctttgacctgggcgggggcaccttcgacgtgtccatcctgacgatcgacgacggcatcttcgaggtgaaggccacggccggggacacccacctgggtggggaggactttgacaacaggctggtgaaccacttcgtggaggagttcaagagaaaacacaagaaggacatcagccagaacaagcgagccgtgaggcggctgcgcaccgcctgcgagagggccaagaggaccctgtcgtccagcacccaggccagcctggagatcgactccctgtttgagggcatcgacttctacacgtccatcaccagggcgaggttcgaggagctgtgctccgacctgttccgaagcaccctggagcccgtggagaaggctctgcgcgacgccaagctggacaaggcccagattcacgacctggtcctggtcgggggctccacccgcatccccaaggtgcagaagctgctgcaggacttcttcaacgggcgcgacctgaacaagagcatcaaccccgacgaggctgtggcctacggggcggcggtgcaggcggccatcctgatgggggacaagtccgagaacgtgcaggacctgctgctgctggacgtggctcccctgtcgctggggctggagacggccggaggcgtgatgactgccctgatcaagcgcaactccaccatccccaccaagcagacgcagatcttcaccacctactccgacaaccaacccggggtgctgatccaggtgtacgagggcgagagggccatgacgaaagacaacaatctgttggggcgcttcgagctgagcggcatccctccggcccccaggggcgtgccccagatcgaggtgaccttcgacatcgatgccaacggcatcctgaacgtcacggccacggacaagagcaccggcaaggccaacaagatcaccatcaccaacgacaagggccgcctgagcaaggaggagatcgagcgcatggtgcaggaggcggagaagtacaaagcggaggacgaggtgcagcgcgagagggtgtcagccaagaacgccctggagtcctacgccttcaacatgaagagcgccgtggaggatgaggggctcaagggcaagatcagcgaggcggacaagaagaaggttctggacaagtgtcaagaggtcatctcgtggctggacgccaacaccttggccgagaaggacgagtttgagcacaagaggaaggagctggagcaggtgtgtaaccccatcatcagcggactgtaccagggtgccggtggtcccgggcctggcggcttcggggctcagggtcccaagggagggtctgggtcaggccctaccattgaggaggtggattaggggcctttgttctttagtatgtttgtctttgaggtggactgttgggactcaaggactttgctgctgttttcctatgtcatttctgcttcagctctttgctgcttcacttctttgtaaagttaagttgtaacctgatggtaattagctggcttcattatttttgtagtacaaccgatatgttcattagaattctttgcatttaatgttgatactgtaagggtgtttcgttccctttaaatgaatcaacactgccaccttctgtacgagtttgtttgttttttttttttttttttttttgcttggcgaaaacactacaaaggctgggaatgtatgtttttataatttgtttatttaaatatgaaaaataaaatgttaaacttt

SEQ ID NO: 9563 - DNA, 4825 bp, Homo sapiens
  source 1..4825: mol_type = unassigned DNA; mol_type = unassigned DNA
ctttcgtagctctggtgctgcggctccgctctcgtcgcaacgagatctttcgagatcttctccgcccccgctaccggcgcctcctctgcggccactgagccggagccggcctgagcagcgctctcggttgcagtacccactggaaggacttaggcgctcgcgtggacaccgcaagcccctcagtagcctcggcccaagaggcctgctttccactcgctagccccgccgggggtccgtgtcctgtctcggtggccggacccgggcccgagcccgagcagtagccggcgccatgtcggtggtgggcatagacctgggcttccagagctgctacgtcgctgtggcccgcgccggcggcatcgagactatcgctaatgagtatagcgaccgctgcacgccggcttgcatttcttttggtcctaagaatcgttcaattggagcagcagctaaaagccaggtaatttctaatgcaaagaacacagtccaaggatttaaaagattccatggccgagcattctctgatccatttgtggaggcagaaaaatctaaccttgcatatgatattgtgcagttgcctacaggattaacaggtataaaggtgacatatatggaggaagagcgaaattttaccactgagcaagtgactgccatgcttttgtccaaactgaaggagacagccgaaagtgttcttaagaagcctgtagttgactgtgttgtttcggttccttgtttctatactgatgcagaaagacgatcagtgatggatgcaacacagattgctggtcttaattgcttgcgattaatgaatgaaaccactgcagttgctcttgcatatggaatctataagcaggatcttcctgccttagaagagaaaccaagaaatgtagtttttgtagacatgggccactctgcttatcaagtttctgtatgtgcatttaatagaggaaaactgaaagttctggccactgcatttgacacgacattgggaggtagaaaatttgatgaagtgttagtaaatcacttctgtgaagaatttgggaagaaatacaagctagacattaagtccaaaatccgtgcattattacgactctctcaggagtgtgagaaactcaagaaattgatgagtgcaaatgcttcagatctccctttgagcattgaatgttttatgaatgatgttgatgtatctggaactatgaatagaggcaaatttctggagatgtgcaatgatctcttagctagagtggagccaccacttcgtagtgttttggaacaaaccaagttaaagaaagaagatatttatgcagtggagatagttggtggtgctacacgaatccctgcggtaaaagagaagatcagcaaatttttcggtaaagaacttagtacaacattaaatgctgatgaagctgtcactcgaggctgtgcattgcagtgtgccatcttatcgcctgctttcaaagtcagagaattttctatcactgatgtagtaccatatccaatatctctgagatggaattctccagctgaagaagggtcaagtgactgtgaagtcttttccaaaaatcatgctgctcctttctctaaagttcttacattttatagaaaggaacctttcactcttgaggcctactacagctctcctcaggatttgccctatccagatcctgctatagctcagttttcagttcagaaagtcactcctcagtctgatggctccagttcaaaagtgaaagtcaaagttcgagtaaatgtccatggcattttcagtgtgtccagtgcatctttagtggaggttcacaagtctgaggaaaatgaggagccaatggaaacagatcagaatgcaaaggaggaagagaagatgcaagtggaccaggaggaaccacatgttgaagagcaacagcagcagacaccagcagaaaataaggcagagtctgaagaaatggagacctctcaagctggatccaaggataaaaagatggaccaaccaccccaagccaagaaggcaaaagtgaagaccagtactgtggacctgccaatcgagaatcagctattatggcagatagacagagagatgctcaacttgtacattgaaaatgagggtaagatgatcatgcaggataaactggagaaggagcggaatgatgctaagaacgcagtggaggaatatgtgtatgaaatgagagacaagcttagtggtgaatatgagaagtttgtgagtgaagatgatcgtaacagttttactttgaaactggaagatactgaaaattggttgtatgaggatggagaagaccagccaaagcaagtttatgttgataagttggctgaattaaaaaatctaggtcaacctattaagatacgtttccaggaatctgaagaacgaccaaaattatttgaagaactagggaaacagatccaacagtatatgaaaataatcagctctttcaaaaacaaggaggaccagtatgatcatttggatgctgctgacatgacaaaggtagaaaaaagcacaaatgaagcaatggagtggatgaataacaagctaaatctgcagaacaagcagagtttgaccatggatccagttgtcaagtcaaaagagattgaagctaaaattaaggagctgacaagtacttgtagccctataatttcaaagcccaaacccaaagtggaacctccaaaagaggaacaaaaaaatgcagagcagaatggaccagtggatggacaaggagacaacccaggcccccaggctgctgagcagggtacagacacagctgtgccttcggattcagacaagaagcttcctgaaatggacattgattgattccaacacttgtttctattaaaacagactattataaagctttaagttgtcaactttgttctaaatatcaactagcgcaagtgaatactgaagatttcttagtcagtttttaggggattttcggggaggggaaataggtaatgtatggagcattttcacttctaaatagttagatacagaaattaagtgcattgtatctttttcataatggtactatttagaagcccagttagtcttactgagcttatgcttcactcctttatgtttaaccatgtgtctacaagaataagtttgttttggaaagttgagctatagctacagctctagctatccagcagacttttcattatgacttacatggcaggagctctaattatgctttaaaaatctgttgtggagattgctttaaatgctccctgcctggtgtggggatggggtccccctctttgtgagggctggagcatggcacggcatggattaacacggcagaggaacaaaggtgtgctctgagcttcttcatatttcaccttcaccctcacctgtgttctcttccctctctcccaataaaagggctcccattataaatgccatgtacttctcttgggaaaatagacccccttgcctagagtaagttgttaactgagggctttaaacctggaggctcttcctgaaagtatgttcatgaataccccaagcatcaaggtctaaataattttcagaagattagaattgggtagatatactgttggatatagccatggtaaatttaactgaggaattaaatccttgttaattttggtgtaaagatttgtatcctggcctgtttattcaggtgggagatgttctgtataattttgaggtatagcttgaactcctagaacaagagttaaaagttctttttagctcattcacaatcacttgtgtgttaagtgttaatatctgtcatgaacctgccaatttgtacgtgttaagcagctgacagatgatgcaaaaaaaactaagatacactggattgtactggatgagtctgaaattagtgttaaagaagtgtggtgcctgatgttataacaacacctcattcttaactgtgtggccaatgtcaggtataccaaagcattcctctgactgctttttggggcagtgttgacaggagtgaggcattttggaaactccaagggaagcctgtgtttgaggccagagttggtacctgctttaagaaactgttacagggcttgttggtaatgttttgaatctttgtaaaaattgatattctgtataacagagtgcctctctgttacttttggcctatgttgttagaaataagatgctatcttgcatagttagaattaagcgtttgtccatctctagataacattgaaaagtttgagtgttacaggctctaaagtgcaatggagaacaattgcttaggaggaggaaggggaaagtatacttatgttggtgtgtaagcatgcatggaggcctcgaggcaccacaacaaggccaggttcttagcacatcctctgttctctacctgtcatgcttcaagagttccagctggcctgctgtgaagccagtagctattttaaaagtgctggctgcaggattaagccaaccctttacaactggcccagaccgtaatggccatttcttcttaaaaaaaaaaaaattttttttttttttttttttttttttttttttttttttggtgtgtgtgtgtgtgtgtgtggggaagggtgtgggtgctgggatgggggtgaatttcaagttgaaacacgatgatgtggtctgcttgctctctgcttagacaggctttaagaccaattggattttcatggaggccaggacagagagtggtaattgatggcttgtgtacagacaagcatttatccaggttgcgttatccaaactgatttgttaaagctccaggtcacgttcttacactaagaaaatcattcagtaaacatgagacaagtttaggaaaaactaataaaataaacctgtcttaaacttgaa

SEQ ID NO: 9564 - DNA, 552 bp, Homo sapiens
  source 1..552: mol_type = unassigned DNA; mol_type = unassigned DNA
ataaggatgtcatcacttatttagcctaacttctattactgaatctaattagatctagtttgcttctaatctgttagagatttgaaaacgggtaacccaggctaattagacttccaggttaaatagaaacacattgcggttctggccactgcatttgacacgacattgggaggtagaaaatttgatgaagtgttagtaaatcacttctgtgaagaatttgggaagaaatacaagctagacattaagtccaaaatccgtgcattattacgactctctcaggagtgtgagaaactcaagaaattgatgagtgcaaatgcttcagatctccctttgagcattgaatgttttatgaatgatgttgatgtatctggaactatgaatagaggcaaatttctggagatgtgcaatgatctcttagctagagtggagccaccacttcgtagtgttttggaacaaaccaagttaaagaaagaagatatttatgcagtggagatagttggtggtgctacacgaatccctgcggtaaaagagaagatcagcaaatttttcggt

SEQ ID NO: 9565 - DNA, 690 bp, Homo sapiens
  source 1..690: mol_type = unassigned DNA; mol_type = unassigned DNA
tcccctcctgaagtagcttcatatttccaaaggcctggagaaatatatttaacttcttatatatagcacacggagattaaatgtactttatcactagttttagtggaatcagtactctggatcgttgaactgccgtatgaagactgtgtattcttctgttaagaatctaggtcaacctattaagatacgtttccaggaatctgaagaacgaccaaaattatttgaagaactagggaaacagatccaacagtatatgaaaataatcagctctttcaaaaacaaggaggaccagtatgatcatttggatgctgctgacatgacaaaggtagaaaaaagcacaaatgaagcaatggagtggatgaataacaagctaaatctgcagaacaagcagagtttgaccatggatccagttgtcaagtcaaaagagattgaagctaaaattaaggagctgacaagtacttgtagccctataatttcaaagcccaaacccaaagtggaacctccaaaagaggaacaaaaaaatgcagagcagaatggaccagtggatggacaaggagacaacccaggcccccaggctgctgagcagggtacagacacagctgtgccttcggattcagacaagaagcttcctgaaatggacattgattgattccaacacttgtttctattaaaacagactattataaagct

SEQ ID NO: 9566 - DNA, 2204 bp, Homo sapiens
  source 1..2204: mol_type = unassigned DNA; mol_type = unassigned DNA
agccggcgccatgtcggtggtgggcatagacctgggcttccagagctgctacgtcgctgtggcccgcgccggcggcatcgagactatcgctaatgagtatagcgaccgctgcacgccggcttgcatttcttttggtcctaagaatcgttcaattggagcagcagctaaaagccaggtaatttctaatgcaaagaacacagtccaaggatttaaaagattccatggccgagcattctctgatccatttgtggaggcagaaaaatctaaccttgcatatgatattgtgcagttgcctacaggattaacaggtataaaggtgacatatatggaggaagagcgaaattttaccactgagcaagtgactgccatgcttttgtccaaactgaaggagacagccgaaagtgttcttaagaagcctgtagttgactgtgttgtttcggttccttgtttctatactgatgcagaaagacgatcagtgatggatgcaacacagattgctggtcttaattgcttgcgattaatgaatgaaaccactgcagttgctcttgcatatggaatctataagcaggatcttcctgccttagaagagaaaccaagaaatgtagtttttgtagacatgggccactctgcttatcaagtttctgtatgtgcatttaatagaggaaaactgaaagttctggccactgcatttgacacgacattgggaggtagaaaatttgatgaagtgttagtaaatcacttctgtgaagaatttgggaagaaatacaagctagacattaagtccaaaatccgtgcattattacgactctctcaggagtgtgagaaactcaagaaattgatgagtgcaaatgcttcagatctccctttgagcattgaatgttttatgaatgatgttgatgtatctggaactatgaatagaggcaaatttctggagatgtgcaatgatctcttagctagagtggagccaccacttcgtagtgttttggaacaaaccaagttaaagaaagaagatatttatgcagtggagatagttggtggtgctacacgaatccctgcggtaaaagagaagatcagcaaatttttcggtaaagaacttagtacaacattaaatgctgatgaagctgtcactcgaggctgtgcattgcagtgtgccatcttatcgcctgctttcaaagtcagagaattttctatcactgatgtagtaccatatccaatatctctgagatggaattctccagctgaagaagggtcaagtgactgtgaagtcttttccaaaaatcatgctgctcctttctctaaagttcttacattttatagaaaggaacctttcactcttgaggcctactacagctctcgttcttttgtctctcgtatgtccctagctcagttttcagttcagaaagtcctcctcagtctgatggctccagttcaaaagtgaaagtcaaagttcgagtaaatgtccatggcattttcagtgtgtccagtgcatctttagtggaggttcacaagtctgaggaaaatgaggagccaatggaaacagatcagaatgcaaaggaggaagagaagatgcaagtggaccaggaggaaccacatgttgaagagcaacagcagcagacaccagcagaaaataaggcagagtctgaagaaatggagacctctcaagctggatccaaggataaaaagatggaccaaccaccccaagccaagaaggcaaaagtgaagaccagtactgtggacctgccaatcgagaatcagctattatggcagatagacagagagatgctcaacttgtacattgaaaatgagggtaagatgatcatgcaggataaactggagaaggagcggaatgatgctaagaacgcagtggaggaatatgtgtatgaaatgagagacaagcttagtggtgaatatgagaagtttgtgagtgaagatgatcgtaacagttttactttgaaactggaagatactgaaaattggttgtatgaggatggagaagaccagccaaagcaagtttatgttgataagttggctgaattaaaaaatctaggtcaacctattaagatacgtttccaggaatctgaagaacgaccaaaattatttgaagaactagggaaacagatccaacagtatatgaaaataatcagctctttcaaaaacaaggaggaccagtatgatcatttggatgctgctgacatgacaaaggt

SEQ ID NO: 9567 - DNA, 2358 bp, Homo sapiens
  source 1..2358: mol_type = unassigned DNA; mol_type = unassigned DNA
caccgcaagcccctcagtagcctcggcccaagaggcctgctttccactcgctagccccgccgggggtccgtgtcctgtctcggtggccggacccgggcccgagcccgagcagtagccggcgccatgtcggtggtgggcatagacctgggcttccagagctgctacgtcgctgtggcccgcgccggcggcatcgagactatcgctaatgagtatagcgaccgctgcacgccggcttgcatttcttttggtcctaagaatcgttcaattggagcagcagctaaaagccaggtaatttctaatgcaaagaacacagtccaaggatttaaaagattccatggccgagcattctctgatccatttgtggaggcagaaaaatctaaccttgcatatgatattgtgcagttgcctacaggattaacaggtataaaggtgacatatatggaggaagagcgaaattttaccactgagcaagtgactgccatgcttttgtccaaactgaaggagacagccgaaagtgttcttaagaagcctgtagttgactgtgttgtttcggttccttgtttctatactgatgcagaaagacgatcagtgatggatgcaacacagattgctggtcttaattgcttgcgattaatgaatgaaaccactgcagttgctcttgcatatggaatctataagcaggatcttcctgccttagaagagaaaccaagaaatgtagtttttgtagacatgggccactctgcttatcaagtttctgtatgtgcatttaatagaggaaaactgaaagttctggccactgcatttgacacgacattgggaggtagaaaatttgatgaagtgttagtaaatcacttctgtgaagaatttgggaagaaatacaagctagacattaagtccaaaatccgtgcattattacgactctctcaggagtgtgagaaactcaagaaattgatgagtgcaaatgcttcagatctccctttgagcattgaatgttttatgaatgatgttgatgtatctggaactatgaatagaggcaaatttctggagatgtgcaatgatctcttagctagagtggagccaccacttcgtagtgttttggaacaaaccaagttaaagaaagaagatatttatgcagtggagatagttggtggtgctacacgaatccctgcggtaaaagagaagatcagcaaatttttcggtaaagaacttagtacaacattaaatgctgatgaagctgtcactcgaggctgtgcattgcagtgtgccatcttatcgcctgctttcaaagtcagagaattttctatcactgatgtagtaccatatccaatatctctgagatggaattctccagctgaagaagggtcaagtgactgtgaagtcttttccaaaaatcatgctgctcctttctctaaagttcttacattttatagaaaggaacctttcactcttgaggcctactacagctctcctcaggatttgccctatccagatcctgctatagctcagttttcagttcagaaagtcactcctcagtctgatggctccagttcaaaagtgaaagtcaaagttcgagtaaatgtccatggcattttcagtgtgtccagtgcatctttagtggaggttcacaagtctgaggaaaatgaggagccaatggaaacagatcagaatgcaaaggaggaagagaagatgcaagtggaccaggaggaaccacatgttgaagagcaacagcagcagacaccagcagaaaataaggcagagtctgaagaaatggagacctctcaagctggatccaaggataaaaagatggaccaaccaccccaagaaggcaaaagtgaagaccagtactgtggacctgccaatcgagaatcagctatttggcagatagacagagagatgctcaacttgtacattgaaaatgagggtaagatgatcatgcaggataaactggagaaggagcggaatgatgctaagaacgcagtggaggaatatgtgtatgaaatgagagacaagcttagtggtgaatatgagaagtttgtgagtgaagatgatcgtaacagttttactttgaaactggaagatactgaaaattggttgtatgaggatggagaagaccagccaaagcaagtttatgttgataagttggctgaattaaaaaatctaggtcaacctattaagatacgtttccaggaatctgaagaacgaccaaattatttgaagaactagggaaacagatccaacagtatatgaaaataatcagctctttcaaaaacaaggaggaccagtatgatcatttggatgctgctgacatgacaaaggtagaaaaaagcacaaatgaagcaatggagtggatgaataaca

SEQ ID NO: 9568 - DNA, 3020 bp, Homo sapiens
  source 1..3020: mol_type = unassigned DNA; mol_type = unassigned DNA
atgggcccctcggggaggcgaggcctgcgggcgagcccttctgagggcagggggtgagggggcggcgcccgccagccaggacagcatcctgccgccgtgacaagcacgcctccggttgccaaaacaacccaaaaatgtgcctcaaaacacgttcgcaaagccccgggccggccggtcgcctgcctctcacctagcccgaccgcccgacgtcctactgccgagcgagggcgagcaagccaatgagtcgcaatcccagcagcaatagcccagaagaggacacggttcccgtaccgaagggttcagtaccagcagcccgaccatcacgcggcgggatgtctgtggttggcattgacctcggctttctcaactgctacattgctgtcgcgagaagtggcggcatcgagaccatcgccaatgagtacagcgacaggtgtaccccggcctgtatatcattgggatcaagaactcgagccattggaaatgcagcaaagagccagatagtcacgaacgtaagaaatacaattcatggcttcaaaaagcttcatgggcgatcatttgatgatcccattgtgcaaactgaaaggatcaggcttccctatgaactgcagaaaatgcctaatggaagtgcaggagttaaggtgcggtacttagaggaagagagaccttttgcaattgagcaagttactggaatgctgttagccaagcttaaagagacttcagaaaatgctttgaagaaaccagtggctgactgtgtgatttcaattcctagcttttttactgatgccgagagaagatctgtgatggctgcagcccaggttgcaggcttaaattgtttaaggttgatgaatgaaactactgcagttgcactggcgtatggaatttataaacaggatcttcccccattagatgagaaaccaagaaatgtagtatttattgatatgggacattctgcctatcaggtcttggtttgtgcttttaacaaaggaaaacttaaagtcttggctactacctttgatccatatttgggtggcaggaactttgatgaggctttagtagactacttctgtgatgagttcaagaccaaatataagataaatgtgaaagaaaactctcgggccttgttgcgtttatatcaggaatgtgaaaaactaaagaagctaatgagtgcaaatgcatcagatcttccattgaacattgagtgtttcatgaatgaccttgatgtttctagtaaaatgaacagggctcaatttgaacaactgtgtgcttcccttttggccagggttgaaccacctttaaaagcagtaatggaacaagctaacttacaacgtgaagacattagtagtatagaaattgtaggaggagcaacacgaattcctgcagtgaaagaacaaatcactaaattctttcttaaagacataagtaccacattaaatgctgatgaagctgttgcaagaggatgtgcgttacagtgtgcgattctctcaccagcatttaaagtgcgtgaattttccataacagaccttgttccctattcaatcacattaaggtggaagacctcttttgaagatggaagtggggaatgtgaagttttctgtaagaaccatcctgccccattctcaaaagtcattactttccacaagaaggaaccatttgaactagaagcattttatactaatttacatgaagtgccttatcctgatgcaagaattgggagcttcactattcagaatgtttttccacagtctgatggtgatagttccaaagtgaaggttaaagttcgtgttaacatccatggaatcttcagtgtggctagcgcatcagtaattgagaagcaaaatttggaaggcgatcacagtgatgctccaatggagacagaaacttcatttaaaaatgaaaacaaagataatatggataaaatgcaggttgatcaagaagaagggcatcaaaaatgtcatgctgaacacactccagaagaggaaattgatcatacaggagccaaaacaaagtcagctgtctcagacaaacaagaccgattaaatcagacacttaaaaaaggaaaagtcaaaagtattgatctaccgatccagagtagcctatgtagacaactaggccaagatcttctcaacagctacattgaaaatgaggggaagatgatcatgcaagataagttagagaaagaaagaaatgatgctaagaatgccgttgaagaatatgtatatgattttagagacaggctgggcactgtctatgaaaaattcatcactccagaagacttgagtaaactgtctgcagtattggaagacacagaaaattggctttatgaagacggagaggaccaacctaaacaagtttatgtggataagcttcaagaactaaagaaatacggccagcctattcaaatgaagtacatggagcatgaagagagaccaaaagccttaaatgacttgggaaaaaagatccaacttgtcatgaaagtgatagaagcttatagaaacaaggatgaaagatatgatcatctggatcctactgaaatggaaaaggttgaaaaatgtatcagtgatgccatgagttggctgaatagtaagatgaatgcacagaacaaactaagtctcactcaagatcctgtggtaaaagtttcagaaatagtagcaaagtcaaaggaactggataatttctgtaaccccatcatttacaagcccaaaccaaaagcagaagttcctgaagacaaaccaaaagctaatagtgaacacaatggcccaatggatggacagagtggaactgaaactaaatcagattcaacaaaagacagctcacagcatactaaatcctctggagagatggaagtggactaagtcttaattttaccttcacattaattcaaaccgtgcaagtaaccacggggtccatcttttacatctggtacacacaacagacgctcagttgttcttaaccacttttgtcatttgttttttggagtagttttgaaaagtgttttatattgagtgcacttctgttcattt

SEQ ID NO: 9569 - DNA, 10790 bp, Homo sapiens
  source 1..10790: mol_type = unassigned DNA; mol_type = unassigned DNA
ttttccagatctttctcgaacccgcagcttcttgggcagccgttgcccgagtgctgacggaagcggccgaagtccgggcccggagctggctcgggcgcggagcggaggctcgcgcgcctcccgggcagccgagcgcgcaggcgcaggtcccagtaaccgccggttggaggcggccgaaccgcagtagggaaagacccaggctgcgggacgcggtgcaggctgcggcgctgacggcctctgctccttccgcgggtttccgactccctgccctagattttctgcttagcgacttggggtcccctctcgtttgcttctggtaggagtcgcaatcccagcagcaatagcccagaagaggacacggttcccgtaccgaagggttcagtaccagcagcccgaccatcacgcggcgggatgtctgtggttggcattgacctcggctttctcaactgctacattgctgtcgcgagaagtggcggcatcgagaccatcgccaatgagtacagcgacaggtgtaccccggcctgtatatcattgggatcaagaactcgagccattggaaatgcagcaaagagccagatagtcacgaacgtaagaaatacaattcatggcttcaaaaagcttcatgggcgatcatttgatgatcccattgtgcaaactgaaaggatcaggcttccctatgaactgcagaaaatgcctaatggaagtgcaggagttaaggtgcggtacttagaggaagagagaccttttgcaattgagcaagttactggaatgctgttagccaagcttaaagagacttcagaaaatgctttgaagaaaccagtggctgactgtgtgatttcaattcctagcttttttactgatgccgagagaagatctgtgatggctgcagcccaggttgcaggcttaaattgtttaaggttgatgaatgaaactactgcagttgcactggcgtatggaatttataaacaggatcttcccccattagatgagaaaccaagaaatgtagtatttattgatatgggacattctgcctatcaggtcttggtttgtgcttttaacaaaggaaaacttaaagtcttggctactacctttgatccatatttgggtggcaggaactttgatgaggctttagtagactacttctgtgatgagttcaagaccaaatataagataaatgtgaaagaaaactctcgggccttgttgcgtttatatcaggaatgtgaaaaactaaagaagctaatgagtgcaaatgcatcagatcttccattgaacattgagtgtttcatgaatgaccttgatgtttctagtaaaatgaacagggctcaatttgaacaactgtgtgcttcccttttggccagggttgaaccacctttaaaagcagtaatggaacaagctaacttacaacgtgaagacattagtagtatagaaattgtaggaggagcaacacgaattcctgcagtgaaagaacaaatcactaaattctttcttaaagacataagtaccacattaaatgctgatgaagctgttgcaagaggatgtgcgttacagtgtgcgattctctcaccagcatttaaagtgcgtgaattttccataacagaccttgttccctattcaatcacattaaggtggaagacctcttttgaagatggaagtggggaatgtgaagttttctgtaagaaccatcctgccccattctcaaaagtcattactttccacaagaaggaaccatttgaactagaagcattttatactaatttacatgaagtgccttatcctgatgcaagaattgggagcttcactattcagaatgtttttccacagtctgatggtgatagttccaaagtgaaggttaaagttcgtgttaacatccatggaatcttcagtgtggctagcgcatcagtaattgagaagcaaaatttggaaggcgatcacagtgatgctccaatggagacagaaacttcatttaaaaatgaaaacaaagataatatggataaaatgcaggttgatcaagaagaagggcatcaaaaatgtcatgctgaacacactccagaagaggaaattgatcatacaggagccaaaacaaagtcagctgtctcagacaaacaagaccgattaaatcagacacttaaaaaaggaaaagtcaaaagtattgatctaccgatccagagtagcctatgtagacaactaggccaagatcttctcaacagctacattgaaaatgaggggaagatgatcatgcaagataagttagagaaagaaagaaatgatgctaagaatgccgttgaagaatatgtatatgattttagagacaggctgggcactgtctatgaaaaattcatcactccagaagacttgagtaaactgtctgcagtattggaagacacagaaaattggctttatgaagacggagaggaccaacctaaacaagtttatgtggataagcttcaagaactaaagaaatacggccagcctattcaaatgaagtacatggagcatgaagagagaccaaaagccttaaatgacttgggaaaaaagatccaacttgtcatgaaagtgatagaagcttatagaaacaaggatgaaagatatgatcatctggatcctactgaaatggaaaaggttgaaaaatgtatcagtgatgccatgagttggctgaatagtaagatgaatgcacagaacaaactaagtctcactcaagatcctgtggtaaaagtttcagaaatagtagcaaagtcaaaggaactggataatttctgtaaccccatcatttacaagcccaaaccaaaagcagaagttcctgaagacaaaccaaaagctaatagtgaacacaatggcccaatggatggacagagtggaactgaaactaaatcagattcaacaaaagacagctcacagcatactaaatcctctggagagatggaagtggactaagtcttaattttaccttcacattaattcaaaccgtgcaagtaaccacggggtccatcttttacatctggtacacacaacagacgctcagttgttcttaaccacttttgtcatttgttttttggagtagttttgaaaagtgttttatattgagtgcacttctgttcatttccattgctgcttatatgcagtgttagccgaattagatttacaagacaatctaagctttccggataattttatatatcaaacatacaggatggatacatagttggcaacagtctaccttatttaaagcttctactgggataaacctcaattcctttattcaggaaaggatactttattgcattattgttgcagaagcatagatttaattgcatctttattttgaaaaacaaatgaaaattgatggggtttaaagctacagaggcactgacctttttctagttattgtattgctacaatttaaatattaaaacaaataagagctttctcaacaaattagtccatctcattgatgtaccacagaaatccaaagctttgctgtcatcacataaatgaattaaatcacatgtgaaagggaacacacccaattttatgttaaggtgaaaccagcagtttgcttcttttattagtaatgtggattgatgttttctcagagtaactcgttgtcttttcgcttgaaatttttgatcttgtcctgaagactagctgctgctaaaacaatgctagcctaaagatacaggagtctctgacaaaatgactttcatgttaaggggaaatgctgtttatctactcagacatgcatctgtgatgttcatagccttgtttcagttataatagttgtcttgtttttttcttaattgattttgttaataataccttaacacagggtaggaagaagtggcacagtgtattgcattatatacatttatcattgatttacctaatgttaccttgtagattaaacactattaagtggtaatacttgaaaaggagcacttataccataagtcttaggaaataatgtttgtaataaacttaactatgttacatatcaacaggcaaaaatatagaatgttacatagtgttgtgtgattaaattatagttcctgctgttaacattaccttttgaaaccttggctccagttttggtgcttcttatacaaattaaatgcgaaaagggactgtaaacttaagatgtattttaaggactttatctgtgcttcatcacccaacttgttcacattgttaatttctgtccagagacctgaaactgcttaagtatgggaacagactgaaatggtgtttcaacctgcaagagacagaagcatagacaagtatatgagcccttatgtccttaatgccaatcaactagattgacctaggttaaaatttcaaaaggctcattttctcccaaagctaaatctttatattaggaacaattaaatattgacttaagttgtaaaaattgagagtacaatatctttagggatagtcattatttctcacaactagttctctacgagagattttgtttctacaatgtagtcagcacttaatggagagtatggagtagtgcattttgcagggatttttattccgtcttttgaggggaagaatctcttttttgcattaaaaaatcatataaacttaatatatttttaaactctcctagtctttaaactttctcttaattctcttaaaatgaaataggtatatccaataggtgatgaaatacattttttacaaacatagatgctttttatttgtatgttgaatgtacagattcatttcaagaaaagcatgaagataatgaaagcaaatatgtaacaatacaagtagggactttagagcttctatttgggttaaaacatccactcacttggttaggagctatgcctcagaaacttcctgggagtaaatatgggaacaacttttctattaatacatctaaattttctagtatatcctgacattttccattcctgctctgaagtcacttttagttttgtgttttagtcagatagtaccactaatttttgtaattatataacacttcatttaataacttatatacatccaaatatatatactttttctacccaattattcaacttaaaagatttcaaaaacgatttagccttataatgtatttatttatttaattcattaatgaaagagagtgctctctttaatgcagctttgggtagacagtctaattcagtccaattttaatctgcattaaaatatgcaatgctagacaaagattttcaaaataaaaagctattatttcagaaattattttaaaagatgcatagtaaaacagtgttttcctatggtaagcaaataagaatgaagtttgtagggaatatttggaatgattaatataaattagtatactttggctctgtggaaaagtgtaaattgtggttttagaaaccaactcttgatagttgtactgtgattataaaaaacaattgttaaataatataatggaagtttgtgataattccttagcagtaatgtaaaattattaagttttggccaggcgctgtggctcacgcctgtaatcctagcactttgggaggccaaggcaggcagatcacctgaggtcaggagttcaagaccagcctggccaacatggtgaaaccctgtctctactaaaaatacaaaaaagtagccgggcgtggtggcatgtccctgtaatctcagctacccgggaggctcaggcaggagaatcgctggaacccaggaggcagaggctgccgttagctgagatcgtgctcctgcactccagcctgggcaacagaacaagactccgtctcaaaaaaaaaacaaaaattcttccaaaaaactagaaagagcacagcaaagaatttggctattgaaataacagataaacttgattttgaaaaggataacaaggctgggcacagtgactcacacctgtaatcctagcactttgagaggctaagaagggaggatcacttgaacccaggagttcaagaccagcctgagaaacatagtgagaccctgtctctaaaaaaataaaaacttagcaaggcatggtggtgcacacctgtagtcctagctactcaggaggctgaggtggaggatcacttaagcctgagaggtcaaggttgcaatgagccataatcataccactgcactccagcctgggcaacagagtgaggccctgtctcaaacacataaaaggcagtggcccacgcctgtaatcccagcactttgggaggccaaggcgggcagatcacgaggtcaggagatcaagaccatcctggctaacacggtgaaaccccgtctctactaaaaatacaaaaaattagctgggcatggtggcgggcgccggtagtcccagctactcaggaggctgaggcaggagaatggtgtgaacccaggaggcggaggttgcagtgagccgagatcgcgccactgcactccagcctgggcaacagagcaagactccatctcaaaaacaaaacaaaacaaaaacataaaaggaaaacaagacatttactaagaagagctaaaggaaagaattaaaggtttcttatgcttttttgggggggggtgtcaatttttagtatattaagagctaaaagaagtaaaggtttcttagactttttttgggagggaggcgtcaatttttagtatatttgtgattaattccatgatagaagtctttaaagagaattttggggctcaataatttaacataatgtcagtgttaaagcacttaatccaaattagcccatctttaactgttttgaaaaatctatatttattaaaggtagtagacatttgaatatagtaatcaaattaactgattttgttttcaccctaaatacatacaaccattcctccactttcataaatttgacaaataataagcctctcccattaggattttctgttttatagtaaatagttggtatttggtagtccacaattaaagtcattgcattaattttacaaattatagatttagaaatgattcttaagttattggtaaaatataactttctcagtttttaaaagtttacaaaatttttttttttgttttgagacagagtatggctttgttacccaggctggattgcaatggggtgatctaggctcactgcagcctccaccacctgagttcaagcgatttttctgcctcaacctctcctgagtagctgggactacaggtgcatgacaccacacccagctaatttttgtatttttatagagatggagttttgccatgttggccagcctggtcttgaactcttgaactcctgacctcaggtaatccacccacctcagactcccaaagtgctgggattacaggcgtgagccaccatacccggccaaaaatttttgcttttaaagttaatgttattttgtggttaaacttctaaagttttgaactgtaagcagaattttgttttgtgatattttattgtataaactgttaatgagaggcacagctaattgtacatatcaatatacatttaaaatctggtaacactggttaaatagcccttgatgacttttcatgtggcatgagagggatatgcttataaagcttaattctgatattatcctcttactacctacagtatgttttgcaaaaatcagtccacttagcaaactaatctttgtaaagcagtcagtttcagaagatactttttatcaaaaaagatggcaggtttaacattataccttttggtttttgcccaacatttgatttaatctaaagcaagaatataaaataattttaagaagcatataatttcttttgataaaaagtaacaaaaatttaatgcagatcaaagaccaaggcttgtaaccaaaacaagcaaaaagaaactttagctgtttaactatcacctctctaatttaaaatgcatgaaaattaatactttgtttttgttttttttttggaaacagtctcactctgtcacccaggctggagggcacaatctctgctcactgcaacctccacctcctgggctcaagcctcaagcaattctcctgcctcagcctcccaagtagctgggattacaggaacccaccaccacgcccagctaatttttgtatttttagtagatggggtttcatcatgttggccaggctggttttgaactcctgacttcaaatgatccacccacatccacctgccagagtgctgagattacaggcgtgagccaccgcacctggccaatgttcttttatatactcatgttttctaacaaaacagctttggatttataatgctgccagatgtcattacaattttttttctaaattcaaaggtaattattctaaacaataaaagggcacctggaattttcagaacattaaaaaactgaaaccacttagaagaaaagaagaaacctaaatgtctgtggaagtgatcagtattaagtgggtgatggctctttcatcttccttatccctaaagatacttccaacatattgttagagtaagtattaaaagaaaaagtaggtttgctgaaaaacattactaaatgacttggagctctccagtcaaagaaacaaagctaattgaaataatgtacatttggttcagtctgtcaggcaagtacaaatccataacaaaaaaaattaatagtatgctctttgctttggaatctctaatttacggtcatgccctaagtcacaggatgattattagggaaatgtcattgacacctgaaaattacctatcctgtaaaaagactggtgaaattcaacatgttttaaataatttaattgcattatagcatataaactataaatgaaaatgatctttgtctttcctttatcttgctttatcctcttatccaattctagactcttaaataatcactgtatttttctcaagtatttgttattttttattatcctttagatctttttgttcatggctctttaaaaatagttttactgataatccaatcacttggatagttaattttattactttttgtttcctttttaatatttattcttcccgttaagggttttttggctataaattcgtacttgataagctatgttatttctttgtgtaatttaatagtagcattctggagtagattctttttttgtattctggccttggaatactttaattccggaccaaaagaggtcaattttgtgagtattgcctattaagtaaacaacatccctcatttttaatccaaatatcaatttgacagaataacaagggtcagaaattcaaaatagctgttagacacctttgattctttgctgctctctggttatgtatgtgtgttgtgcatcttccttgttgttttagagtttcctaaattttttgcttctggggacttgagtatttttaaatgttcttaaaattatatgaatctacccagaatgtagatgtcaaaatgtaattagaggccccgtgcagtggctcacgcctgtaatcccagcactttgggaggccgaggcaggtggatcgcctgagctcaggagttcaagaccagcctgggcaacatggcaaaaccccgtctctactaaaaatacaaaaaattagctgggtgtggtggtgtgtgcctgtagtcccagctactcgggaggctgaggcaggagaatcgcttgaaccctggcgaaaccccatttctaaaatagaaaaatttagccgggtgtggtggtgtgtgcctatagtcccagctattcgggaggctgaggcaagagaattgcttgaacccgggaggtggaggtcgcagtgagctgagatcctgccactgcactccaacctgggggtaacagagcgagactctgtctcaaaaaaaaaaaaaagtgtaattagaaatggaaatctaggtaaaggaagctttaaaatgttgtattttttccctgaaataaacttttatgatttaatgtcttggaaaaagactcacatgaaaagtggcttttatatttggtaggataaagccattgtcctttaataccatagcaaatagaagcaatttttaatgaggttactgaattgtttagtattcctaatatggcatccaggtcatcttttcttttctccaaccattattaaaataacttgacactttgggaggccaagctgggcagatcacctgaggtcaggagtttgagaccagcctggccaacatggtgaaaccccatctctactaaaaaaaatacaaaaattagcggggccatggtgacgtgcacctgtaatcccagctactcgggaggctgaggtgggagaatagcttgaacctgggaggcagaggttgtggtgagccaagatcacgccactgcactccagcctgggtgacagagcaagactccatctcaagaaaaaaataaataaataataatttgtgtatgtgatgactgactctagtcattatggaaaataacttttggcagtttagttcctaatgttaacaattcctctttttaagagaggtactacatttgatttctcaatttctcagtttgttttcaatacaaacagcaaccactgaaatgcagaaaatggtaatcaagtgtgatgtttctataaaaataattgagattcacatgtaatagaccctttagctttaatgagcagacatgagaatggtttatgatcttaagttggtaacataggaatatgtatttgtcaattttagttcacaaacatatccataagaatgtttacacatggcagtatcaaagcatataaaatattttctatgtaagtaaattgcatctttatgctagtgaacaaagtagcaataaatgttcatttttggatggcagtacacattgttaacaatcgtgtaattataataaatatgtctacctactccttgaaccatgaa

SEQ ID NO: 9570 - DNA, 1822 bp, Homo sapiens
  source 1..1822: mol_type = unassigned DNA; mol_type = unassigned DNA
agtagggaaagacccaggctgcgggacgcggtgcaggctgcggcgctgacggcctctgctccttccgcgggtttccgactccctgccctagattttctgcttagcgacttggggtcccctctcgtttgcttctggtaggagtcgcaatcccagcagcaatagcccagaagaggacacggttcccgtaccgaagggttcagtaccagcagcccgaccatcacgcggcgggatgtctgtggttggcattgacctcggctttctcaactgctacattgctgtcgcgagaagtggcggcatcgagaccatcgccaatgagtacagcgacaggtgtaccccggcctgtatatcattgggatcaagaactcgagccattggaaatgcagcaaagagccagatagtcacgaacgtaagaaatacaattcatggcttcaaaaagcttcatgggcgatcatttgatgatcccattgtgcaaactgaaaggatcaggcttccctatgaactgcagaaaatgcctaatggaagtgcaggagttaagattcctagcttttttactgatgccgagagaagatctgtgatggctgcagcccaggttgcaggcttaaattgtttaaggttgatgaatgaaactactgcagttgcactggcgtatggaatttataaacaggatcttcccccattagatgagaaaccaagaaatgtagtatttattgatatgggacattctgcctatcaggtcttggtttgtgcttttaacaaaggaaaacttaaagtcttggctactacctttgatccatatttgggtggcaggaactttgatgaggctttagtagactacttctgtgatgagttcaagaccaaatataagataaatgtgaaagaaaactctcgggccttgttgcgtttatatcaggaatgtgaaaaactaaagaagctaatgagtgcaaatgcatcagatcttccattgaacattgagtgtttcatgaatgaccttgatgtttctagtaaaatgaacagggctcaatttgaacaactgtgtgcttcccttttggccagggttgaaccacctttaaaagcagtaatggaacaagctaacttacaacgtgaagacattagtagtatagaaattgtaggaggagcaacacgaattcctgcagtgaaagaacaaatcactaaattctttcttaaagacataagtaccacattaaatgctgatgaagctgttgcaagaggatgtgcgttacagtgtgcgattctctcaccagcatttaaagtgcgtgaattttccataacagaccttgttccctattcaatcacattaaggtggaagacctcttttgaagatggaagtggggaatgtgaagttttctgtaagaaccatcctgccccattctcaaaagtcattactttccacaagaaggaaccatttgaactagaagcattttatactaatttacatgaagtgccttatcctgatgcaagaattgggagcttcactattcagaatgtttttccacagtctgatggtgatagttccaaagtgaaggttaaagttcgtgttaacatccatggaatcttcagtgtggctagcgcatcagtaattgagaagcaaaatttggaaggcgatcacagtgatgctccaatggagacagaaacttcatttaaaaatgaaaacaaagataatatggataaaatgcaggttgatcaagaagaagggcatcaaaaatgtcatgctgaacacactccagaagaggaaattgatcatacaggagccaaaacaaagtcagctgtctcagacaaacaagaccgattaaatcagacactt

SEQ ID NO: 9571 - DNA, 2639 bp, Homo sapiens
  source 1..2639: mol_type = unassigned DNA; mol_type = unassigned DNA
aagtttgttggcaaggaatataatgaagtaattctgaaatatgaaaaactagttgctgcttataggctgctgttactggtaattttatgaggaaaccaactgtatgaaacctatattactttttatggaaagggcctgtatatcattgggatcaagaactcgagccattggaaatgcagcaaagagccagatagtcacgaacgtaagaaatacaattcatggcttcaaaaagcttcatgggcgatcatttgatgatcccattgtgcaaactgaaaggatcaggcttccctatgaactgcagaaaatgcctaatggaagtgcaggagttaaggtgcggtacttagaggaagagagaccttttgcaattgagcaagttactggaatgctgttagccaagcttaaagagacttcagaaaatgctttgaagaaaccagtggctgactgtgtgatttcaattcctagcttttttactgatgccgagagaagatctgtgatggctgcagcccaggttgcaggcttaaattgtttaaggttgatgaatgaaactactgcagttgcactggcgtatggaatttataaacaggatcttcccccattagatgagaaaccaagaaatgtagtatttattgatatgggacattctgcctatcaggtcttggtttgtgcttttaacaaaggaaaacttaaagtcttggctactacctttgatccatatttgggtggcaggaactttgatgaggctttagtagactacttctgtgatgagttcaagaccaaatataagataaatgtgaaagaaaactctcgggccttgttgcgtttatatcaggaatgtgaaaaactaaagaagctaatgagtgcaaatgcatcagatcttccattgaacattgagtgtttcatgaatgaccttgatgtttctagtaaaatgaacagggctcaatttgaacaactgtgtgcttcccttttggccagggttgaaccacctttaaaagcagtaatggaacaagctaacttacaacgtgaagacattagtagtatagaaattgtaggaggagcaacacgaattcctgcagtgaaagaacaaatcactaaattctttcttaaagacataagtaccacattaaatgctgatgaagctgttgcaagaggatgtgcgttacagtgtgcgattctctcaccagcatttaaagtgcgtgaattttccataacagaccttgttccctattcaatcacattaaggtggaagacctcttttgaagatggaagtggggaatgtgaagttttctgtaagaaccatcctgccccattctcaaaagtcattactttccacaagaaggaaccatttgaactagaagcattttatactaatttacatgaagtgccttatcctgatgcaagaattgggagcttcactattcagaatgtttttccacagtctgatggtgatagttccaaagtgaaggttaaagttcgtgttaacatccatggaatcttcagtgtggctagcgcatcagtaattgagaagcaaaatttggaaggcgatcacagtgatgctccaatggagacagaaacttcatttaaaaatgaaaacaaagataatatggataaaatgcaggttgatcaagaagaagggcatcaaaaatgtcatgctgaacacactccagaagaggaaattgatcatacaggagccaaaacaaagtcagctgtctcagacaaacaagaccgattaaatcagacacttaaaaaaggaaaagtcaaaagtattgatctaccgatccagagtagcctatgtagacaactaggccaagatcttctcaacagctacattgaaaatgaggggaagatgatcatgcaagataagttagagaaagaaagaaatgatgctaagaatgccgttgaagaatatgtatatgattttagagacaggctgggcactgtctatgaaaaattcatcactccagaagacttgagtaaactgtctgcagtattggaagacacagaaaattggctttatgaagacggagaggaccaacctaaacaagtttatgtggataagcttcaagaactaaagaaatacggccagcctattcaaatgaagtacatggagcatgaagagagaccaaaagccttaaatgacttgggaaaaaagatccaacttgtcatgaaagtgatagaagcttatagaaacaaggatgaaagatatgatcatctggatcctactgaaatggaaaaggttgaaaaatgtatcagtgatgccatgagttggctgaatagtaagatgaatgcacagaacaaactaagtctcactcaagatcctgtggtaaaagtttcagaaatagtagcaaagtcaaaggaactggataatttctgtaaccccatcatttacaagcccaaaccaaaagcagaagttcctgaagacaaaccaaaagctaatagtgaacacaatggcccaatggatggacagagtggaactgaaactaaatcagattcaacaaaagacagctcacagcatactaaatcctctggagagatggaagtggactaagtcttaattttaccttcacattaattcaaaccgtgcaagtaaccacggggtccatcttttacatctggtacacacaacagacgctcagttgttc

SEQ ID NO: 9572 - DNA, 648 bp, Homo sapiens
  source 1..648: mol_type = unassigned DNA; mol_type = unassigned DNA
agttttgccatggtaacacttgtggggcattcctttttgaacagtacccgttcccttgatgtctacaatatcacctttcttatagattcgcatatacgtggccaaaggaataactccatgttttctaaaaggcctagagaacatatatcgggtgcctctcctctttccctttgtgttcgtcattttggcgaattactggaagatggcggttccagccgaaaggcgattttcttttattctattttaagacagtttctccctttttttaaggttgctttttgtttttattaataattactatgcatctttcttccaaattgatcagaattcaaccactagactttaaactacttcatttaaggactgtggctttttctttcaatctttccatgtatcattttgtaatcgctttcttatttgaattgaggaagaggaaatgtctttatttgttagtgaaggataaaatgcaggttgatcaagaagaagggcatcaaaaatgtcatgctgaacacactccagaagaggaaattgatcatacaggagccaaaacaaagtcagctgtctcagacaaacaagaccgattaaatcagacacttaaaaaaggaaaagtcaaaagtattgatctaccgatccagagtagcctatgta

SEQ ID NO: 9573 - DNA, 2306 bp, Homo sapiens
  source 1..2306: mol_type = unassigned DNA; mol_type = unassigned DNA
ggtttgcctggcgcgcggggaagtggagccagcgttttctttcacccagttccctgcttagtccagtcccaccgtggttcttcagagctgttcttggcgtgcttccagtatggggcaaccatgtccaagggacctgcagttggtattgatcttggcaccacctactcttgtgtgggtgttttccagcacggaaaagtcgagataattgccaatgatcagggaaaccgaaccactccaagctatgtcgcctttacggacactgaacggttgatcggtgatgccgcaaagaatcaagttgcaatgaaccccaccaacacagtttttgatgccaaacgtctgattggacgcagatttgatgatgctgttgtccagtctgatatgaaacattggccctttatggtggtgaatgatgctggcaggcccaaggtccaagtagaatacaagggagagaccaaaagcttctatccagaggaggtgtcttctatggttctgacaaagatgaaggaaattgcagaagcctaccttgggaagactgttaccaatgctgtggtcacagtgccagcttactttaatgactctcagcgtcaggctaccaaagatgctggaactattgctggtctcaatgtacttagaattattaatgagccaactgctgctgctattgcttacggcttagacaaaaaggttggagcagaaagaaacgtgctcatctttgacctgggaggtggcacttttgatgtgtcaatcctcactattgaggatggaatctttgaggtcaagtctacagctggagacacccacttgggtggagaagattttgacaaccgaatggtcaaccattttattgctgagtttaagcgcaagcataagaaggacatcagtgagaacaagagagctgtaagacgcctccgtactgcttgtgaacgtgctaagcgtaccctctcttccagcacccaggccagtattgagatcgattctctctatgaaggaatcgacttctatacctccattacccgtgcccgatttgaagaactgaatgctgacctgttccgtggcaccctggacccagtagagaaagcccttcgagatgccaaactagacaagtcacagattcatgatattgtcctggttggtggttctactcgtatccccaagattcagaagcttctccaagacttcttcaatggaaaagaactgaataagagcatcaaccctgatgaagctgttgcttatggtgcagctgtccaggcagccatcttgtctggagacaagtctgagaatgttcaagatttgctgctcttggatgtcactcctctttcccttggtattgaaactgctggtggagtcatgactgtcctcatcaagcgtaataccaccattcctaccaagcagacacagaccttcactacctattctgacaaccagcctggtgtgcttattcaggtttatgaaggcgagcgtgccatgacaaaggataacaacctgcttggcaagtttgaactcacaggcatacctcctgcaccccgaggtgttcctcagattgaagtcacttttgacattgatgccaatggtatactcaatgtctctgctgtggacaagagtacgggaaaagagaacaagattactatcactaatgacaagggccgtttgagcaaggaagacattgaacgtatggtccaggaagctgagaagtacaaagctgaagatgagaagcagagggacaaggtgtcatccaagaattcacttgagtcctatgccttcaacatgaaagcaactgttgaagatgagaaacttcaaggcaagattaacgatgaggacaaacagaagattctggacaagtgtaatgaaattatcaactggcttgataagaatcagactgctgagaaggaagaatttgaacatcaacagaaagagctggagaaagtttgcaaccccatcatcaccaagctgtaccagagtgcaggaggcatgccaggaggaatgcctgggggatttcctggtggtggagctcctccctctggtggtgcttcctcagggcccaccattgaagaggttgattaagccaaccaagtgtagatgtagcattgttccacacatttaaaacatttgaaggacctaaattcgtagcaaattctgtggcagttttaaaaagttaagctgctatagtaagttactgggcattctcaatacttgaatatggaacatatgcacaggggaaggaaataacattgcactttataaacactgtattgtaagtggaaaatgcaatgtcttaaataaaactatttaaaattggcaccatacaa

SEQ ID NO: 9574 - DNA, 1826 bp, Homo sapiens
  source 1..1826: mol_type = unassigned DNA; mol_type = unassigned DNA
ctcattgaactcgcctgcagctcttgggttttttgtggcttccttcgttattggagccaggcctacaccccagcaaccatgtccaagggacctgcagttggtattgatcttggcaccacctactcttgtgtgggtgttttccagcacggaaaagtcgagataattgccaatgatcagggaaaccgaaccactccaagctatgtcgcctttacggacactgaacggttgatcggtgatgccgcaaagaatcaagttgcaatgaaccccaccaacacagtttttgatgccaaacgtctgattggacgcagatttgatgatgctgttgtccagtctgatatgaaacattggccctttatggtggtgaatgatgctggcaggcccaagcataagaaggacatcagtgagaacaagagagctgtaagacgcctccgtactgcttgtgaacgtgctaagcgtaccctctcttccagcacccaggccagtattgagatcgattctctctatgaaggaatcgacttctatacctccattacccgtgcccgatttgaagaactgaatgctgacctgttccgtggcaccctggacccagtagagaaagcccttcgagatgccaaactagacaagtcacagattcatgatattgtcctggttggtggttctactcgtatccccaagattcagaagcttctccaagacttcttcaatggaaaagaactgaataagagcatcaaccctgatgaagctgttgcttatggtgcagctgtccaggcagccatcttgtctggagacaagtctgagaatgttcaagatttgctgctcttggatgtcactcctctttcccttggtattgaaactgctggtggagtcatgactgtcctcatcaagcgtaataccaccattcctaccaagcagacacagaccttcactacctattctgacaaccagcctggtgtgcttattcaggtttatgaaggcgagcgtgccatgacaaaggataacaacctgcttggcaagtttgaactcacaggcatacctcctgcaccccgaggtgttcctcagattgaagtcacttttgacattgatgccaatggtatactcaatgtctctgctgtggacaagagtacgggaaaagagaacaagattactatcactaatgacaagggccgtttgagcaaggaagacattgaacgtatggtccaggaagctgagaagtacaaagctgaagatgagaagcagagggacaaggtgtcatccaagaattcacttgagtcctatgccttcaacatgaaagcaactgttgaagatgagaaacttcaaggcaagattaacgatgaggacaaacagaagattctggacaagtgtaatgaaattatcaactggcttgataagaatcagactgctgagaaggaagaatttgaacatcaacagaaagagctggagaaagtttgcaaccccatcatcaccaagctgtaccagagtgcaggaggcatgccaggaggaatgcctgggggatttcctggtggtggagctcctccctctggtggtgcttcctcagggcccaccattgaagaggttgattaagccaaccaagtgtagatgtagcattgttccacacatttaaaacatttgaaggacctaaattcgtagcaaattctgtggcagttttaaaaagttaagctgctatagtaagttactgggcattctcaatacttgaatatggaacatatgcacaggggaaggaaataacattgcactttataaacactgtattgtaagtggaaaatgcaatgtcttaaataaaactatttaaaattggcaccatacaa

SEQ ID NO: 9575 - DNA, 2463 bp, Homo sapiens
  source 1..2463: mol_type = unassigned DNA; mol_type = unassigned DNA
atcgtgaggcggagcgcggtggggtgggtgcggaagggggcgaggcccgaggagtggagccgggcttgtgattgggtcttgtaagggcagccgggcgtctattggccggggaagccgtaatggcaggcagcaggggcgggccccttctggaaggttctaagatagggtataagaggcagggtggcgggcggaaaccggtctcattgaactcgcctgcagctcttgggttttttgtggcttccttcgttattggagccaggcctacaccccagcaaccatgtccaagggacctgcagttggtattgatcttggcaccacctactcttgtgtgggtgttttccagcacggaaaagtcgagataattgccaatgatcagggaaaccgaaccactccaagctatgtcgcctttacggacactgaacggttgatcggtgatgccgcaaagaatcaagttgcaatgaaccccaccaacacagtttttgatgccaaacgtctgattggacgcagatttgatgatgctgttgtccagtctgatatgaaacattggccctttatggtggtgaatgatgctggcaggcccaaggtccaagtagaatacaagggagagaccaaaagcttctatccagaggaggtgtcttctatggttctgacaaagatgaaggaaattgcagaagcctaccttgggaagactgttaccaatgctgtggtcacagtgccagcttactttaatgactctcagcgtcaggctaccaaagatgctggaactattgctggtctcaatgtacttagaattattaatgagccaactgctgctgctattgcttacggcttagacaaaaaggttggagcagaaagaaacgtgctcatctttgacctgggaggtggcacttttgatgtgtcaatcctcactattgaggatggaatctttgaggtcaagtctacagctggagacacccacttgggtggagaagattttgacaaccgaatggtcaaccattttattgctgagtttaagcgcaagcataagaaggacatcagtgagaacaagagagctgtaagacgcctccgtactgcttgtgaacgtgctaagcgtaccctctcttccagcacccaggccagtattgagatcgattctctctatgaaggaatcgacttctatacctccattacccgtgcccgatttgaagaactgaatgctgacctgttccgtggcaccctggacccagtagagaaagcccttcgagatgccaaactagacaagtcacagattcatgatattgtcctggttggtggttctactcgtatccccaagattcagaagcttctccaagacttcttcaatggaaaagaactgaataagagcatcaaccctgatgaagctgttgcttatggtgcagctgtccaggcagccatcttgtctggagacaagtctgagaatgttcaagatttgctgctcttggatgtcactcctctttcccttggtattgaaactgctggtggagtcatgactgtcctcatcaagcgtaataccaccattcctaccaagcagacacagaccttcactacctattctgacaaccagcctggtgtgcttattcaggtttatgaaggcgagcgtgccatgacaaaggataacaacctgcttggcaagtttgaactcacaggcatacctcctgcaccccgaggtgttcctcagattgaagtcacttttgacattgatgccaatggtatactcaatgtctctgctgtggacaagagtacgggaaaagagaacaagattactatcactaatgacaagggccgtttgagcaaggaagacattgaacgtatggtccaggaagctgagaagtacaaagctgaagatgagaagcagagggacaaggtgtcatccaagaattcacttgagtcctatgccttcaacatgaaagcaactgttgaagatgagaaacttcaaggcaagattaacgatgaggacaaacagaagattctggacaagtgtaatgaaattatcaactggcttgataagaatcagactgctgagaaggaagaatttgaacatcaacagaaagagctggagaaagtttgcaaccccatcatcaccaagctgtaccagagtgcaggaggcatgccaggaggaatgcctgggggatttcctggtggtggagctcctccctctggtggtgcttcctcagggcccaccattgaagaggttgattaagccaaccaagtgtagatgtagcattgttccacacatttaaaacatttgaaggacctaaattcgtagcaaattctgtggcagttttaaaaagttaagctgctatagtaagttactgggcattctcaatacttgaatatggaacatatgcacaggggaaggaaataacattgcactttataaacactgtattgtaagtggaaaatgcaatgtcttaaataaaactatttaaaattggcaccatacaa

SEQ ID NO: 9576 - DNA, 2004 bp, Homo sapiens
  source 1..2004: mol_type = unassigned DNA; mol_type = unassigned DNA
atcgtgaggcggagcgcggtggggtgggtgcggaagggggcgaggcccgaggagtggagccgggcttgtgattgggtcttgtaagggcagccgggcgtctattggccggggaagccgtaatggcaggcagcaggggcgggccccttctggaaggttctaagatagggtataagaggcagggtggcgggcggaaaccggtctcattgaactcgcctgcagctcttgggttttttgtggcttccttcgttattggagccaggcctacaccccagcaaccatgtccaagggacctgcagttggtattgatcttggcaccacctactcttgtgtgggtgttttccagcacggaaaagtcgagataattgccaatgatcagggaaaccgaaccactccaagctatgtcgcctttacggacactgaacggttgatcggtgatgccgcaaagaatcaagttgcaatgaaccccaccaacacagtttttgatgccaaacgtctgattggacgcagatttgatgatgctgttgtccagtctgatatgaaacattggccctttatggtggtgaatgatgctggcaggcccaaggtccaagtagaatacaagggagagaccaaaagcttctatccagaggaggtgtcttctatggttctgacaaagatgaaggaaattgcagaagcctaccttgggaagactgttaccaatgctgtggtcacagtgccagcttactttaatgactctcagcgtcaggctaccaaagatgctggaactattgctggtctcaatgtacttagaattattaatgagccaactgctgctgctattgcttacggcttagacaaaaaggttggagcagaaagaaacgtgctcatctttgacctgggaggtggcacttttgatgtgtcaatcctcactattgaggatggaatctttgaggtcaagtctacagctggagacacccacttgggtggagaagattttgacaaccgaatggtcaaccattttattgctgagtttaagcgcaagcataagaaggacatcagtgagaacaagagagctgtaagacgcctccgtactgcttgtgaacgtgctaagcgtaccctctcttccagcacccaggccagtattgagatcgattctctctatgaaggaatcgacttctatacctccattacccgtgcccgatttgaagaactgaatgctgacctgttccgtggcaccctggacccagtagagaaagcccttcgagatgccaaactagacaagtcacagattcatgatattgtcctggttggtggttctactcgtatccccaagattcagaagcttctccaagacttcttcaatggaaaagaactgaataagagcatcaaccctgatgaagctgttgcttatggtgcagctgtccaggcagccatcttgtctggagacaagtctgagaatgttcaagatttgctgctcttggatgtcactcctctttcccttggtattgaaactgctggtggagtcatgactgtcctcatcaagcgtaataccaccattcctaccaagcagacacagaccttcactacctattctgacaaccagcctggtgtgcttattcaggtttatgaaggcgagcgtgccatgacaaaggataacaacctgcttggcaagtttgaactcacaggcatgccaggaggaatgcctgggggatttcctggtggtggagctcctccctctggtggtgcttcctcagggcccaccattgaagaggttgattaagccaaccaagtgtagatgtagcattgttccacacatttaaaacatttgaaggacctaaattcgtagcaaattctgtggcagttttaaaaagttaagctgctatagtaagttactgggcattctcaatacttgaatatggaacatatgcacaggggaaggaaataacattgcactttataaacactgtattgtaagtggaaaatgcaatgtcttaaataaaactatttaaaattggcaccatacaa

SEQ ID NO: 9577 - DNA, 2301 bp, Homo sapiens
  source 1..2301: mol_type = unassigned DNA; mol_type = unassigned DNA
acaccagaaaccagtgaatcttgacaattacacagtaatttacattttggtggggggggtgctccagctgttctttcaccagcattaatccatttgctggagtttgcatatatgtaagtataatagttaccaatctgtggtcttttccttattcctagactgttaccaatgctgtggtcacagtgccagcttactttaatgactctcagcgtcaggctaccaaagatgctggaactattgctggtctcaatgtacttagaattattaatgagccaactgctgctgctattgcttacggcttagacaaaaaggttggagcagaaagaaacgtgctcatctttgacctgggaggtggcacttttgatgtgtcaatcctcactattgaggatggaatctttgaggtcaagtctacagctggagacacccacttgggtggagaagattttgacaaccgaatggtcaaccattttattgctgagtttaagcgcaagcataagaaggacatcagtgagaacaagagagctgtaagacgcctccgtactgcttgtgaacgtgctaagcgtaccctctcttccagcacccaggccagtattgagatcgattctctctatgaaggaatcgacttctatacctccattacccgtgcccgatttgaagaactgaatgctgacctgttccgtggcaccctggacccagtagagaaagcccttcgagatgccaaactagacaagtcacagattcatgatattgtcctggttggtggttctactcgtatccccaagattcagaagcttctccaagacttcttcaatggaaaagaactgaataagagcatcaaccctgatgaagctgttgcttatggtgcagctgtccaggcagccatcttgtctggagacaagtctgagaatgttcaagatttgctgctcttggatgtcactcctctttcccttggtattgaaactgctggtggagtcatgactgtcctcatcaagcgtaataccaccattcctaccaagcagacacagaccttcactacctattctgacaaccagcctggtgtgcttattcaggtatgtttctgtacttctcttgtttggcttactgataacagataaagggaagtcttgactgactcgctatgatgatggattccaaaaccattcgtagtttccaccagaaagtcttatgttggccagttccttccttggatgtttgagcgaccattcttccttagcaggaccctagcactgtcacagacctggagtccattgtagtaatttgttttatttcctaccaaggtttatgaaggcgagcgtgccatgacaaaggataacaacctgcttggcaagtttgaactcacaggcatacctcctgcaccccgaggtgttcctcagattgaagtcacttttgacattgatgccaatggtatactcaatgtctctgctgtggacaagagtacgggaaaagagaacaagattactatcactaatgacaagggtaaggaggcactgtcatctggtcttgacagggataatggtatttcaattgagttactggtgcctaagggcgtctagctaagagaaactagagttacacatacacaggtaatttaaggcttttacttagagttaatttctttcctaggccgtttgagcaaggaagacattgaacgtatggtccaggaagctgagaagtacaaagctgaagatgagaagcagagggacaaggtgtcatccaagaattcacttgagtcctatgccttcaacatgaaagcaactgttgaagatgagaaacttcaaggcaagattaacgatgaggacaaacagaagattctggacaagtgtaatgaaattatcaactggcttgataagaatcagactgctgagaaggaagaatttgaacatcaacagaaagagctggagaaagtttgcaaccccatcatcaccaagctgtaccagagtgcaggaggcatgccaggaggaatgcctgggggatttcctggtggtggagctcctccctctggtggtgcttcctcagggcccaccattgaagaggttgattaagccaaccaagtgtagatgtagcattgttccacacatttaaaacatttgaaggacctaaattcgtagcaaattctgtggcagttttaaaaagttaagctgctatagtaagttactgggcattctcaatacttgaatatggaacatatgcacaggggaaggaaataacattgcactttataaacactgtattgtaagtggaaaatgcaatgtcttaaataaaactatttaaaattggcac

SEQ ID NO: 9578 - DNA, 2186 bp, Homo sapiens
  source 1..2186: mol_type = unassigned DNA; mol_type = unassigned DNA
cagcaaccatgtccaagggacctgcagttggtattgatcttggcaccacctactcttgtgtgggtgttttccagcacggaaaagtcgagataattgccaatgatcagggaaaccgaaccactccaagctatgtcgcctttacggacactgaacggttgatcggtgatgccgcaaagaatcaagttgcaatgaaccccaccaacacagtttttgatgccaaacgtctgattggacgcagatttgatgatgctgttgtccagtctgatatgaaacattggccctttatggtggtgaatgatgctggcaggcccaaggtccaagtagaatacaagggagagaccaaaagcttctatccagaggaggtgtcttctatggttctgacaaagatgaaggaaattgcagaagcctaccttgggaagactgttaccaatgctgtggtcacagtgccagcttactttaatgactctcagcgtcaggctaccaaagatgctggaactattgctggtctcaatgtacttagaattattaatgagccaactgctgctgctattgcttacggcttagacaaaaaggttggagcagaaagaaacgtgctcatctttgacctgggaggtggcacttttgatgtgtcaatcctcactattgaggatggaatctttgaggtcaagtctacagctggagacacccacttgggtggagaagattttgacaaccgaatggtcaaccattttattgctgagtttaagcgcaagcataagaaggacatcagtgagaacaagagagctgtaagacgcctccgtactgcttgtgaacgtgctaagcgtaccctctcttccagcacccaggccagtattgagatcgattctctctatgaaggaatcgacttctatacctccattacccgtgcccgatttgaagaactgaatgctgacctgttccgtggcaccctggacccagtagagaaagcccttcgagatgccaaactagacaagtcacagattcatgatattgtcctggttggtggttctactcgtatccccaagattcagaagcttctccaagacttcttcaatggaaaagaactgaataagagcatcaaccctgatgaagctgttgcttatggtgcagctgtccaggcagccatcttgtctggagacaagtctgagaatgttcaagatttgctgctcttggatgtcactcctctttcccttggtattgaaactgctggtggagtcatgactgtcctcatcaagcgtaataccaccattcctaccaagcagacacagaccttcactacctattctgacaaccagcctggtgtgcttattcaggtttatgaaggcgagcgtgccatgacaaaggataacaacctgcttggcaagtttgaactcacaggcatacctcctgcaccccgaggtgttcctcagattgaagtcacttttgacattgatgccaatggtatactcaatgtctctgctgtggacaagagtacgggaaaagagaacaagattactatcactaatgacaagggccgtttgagcaaggaagacattgaacgtatggtccaggaagctgagaagtacaaagctgaagatgagaagcagagggacaaggtgtcatccaagaattcacttgagtcctatgccttcaacatgaaagcaactgttgaagatgagaaacttcaaggcaagattaacgatgaggacaaacagaagattctggacaagtgtaatgaaattatcaactggcttgataagaatcagactgctgagaaggaagaatttgaacatcaacagaaagagctggagaaagtttgcaaccccatcatcaccaagctgtaccagagtgcaggaggcatgccaggaggaatgcctgggggatttcctggtggtggagctcctccctctggtggtgcttcctcagggcccaccattgaagaggttgattaagccaaccaagtgtagatgtagcattgttccacacatttaaaacatttgaaggacctaaattcgtagcaaattctgtggcagttttaaaaagttaagctgctatagtaagttactgggcattctcaatacttgaatatggaacatatgcacaggggaaggaaataacattgcactttataaacactgtattgtaagtggaaaatgcaatgtcttaaataaaactatttaaaattggca

SEQ ID NO: 9579 - DNA, 1884 bp, Homo sapiens
  source 1..1884: mol_type = unassigned DNA; mol_type = unassigned DNA
tacattttggtggggggggtgctccagctgttctttcaccagcattaatccatttgctggagtttgcatatatgtaagtataatagttaccaatctgtggtcttttccttattcctagactgttaccaatgctgtggtcacagtgccagcttactttaatgactctcagcgtcaggctaccaaagatgctggaactattgctggtctcaatgtacttagaattattaatgagccaactgctgctgctattgcttacggcttagacaaaaaggttggagcagaaagaaacgtgctcatctttgacctgggaggtggcacttttgatgtgtcaatcctcactattgaggatggaatctttgaggtcaagtctacagctggagacacccacttgggtggagaagattttgacaaccgaatggtcaaccattttattgctgagtttaagcgcaagcataagaaggacatcagtgagaacaagagagctgtaagacgcctccgtactgcttgtgaacgtgctaagcgtaccctctcttccagcacccaggccagtattgagatcgattctctctatgaaggaatcgacttctatacctccattacccgtgcccgatttgaagaactgaatgctgacctgttccgtggcaccctggacccagtagagaaagcccttcgagatgccaaactagacaagtcacagattcatgatattgtcctggttggtggttctactcgtatccccaagattcagaagcttctccaagacttcttcaatggaaaagaactgaataagagcatcaaccctgatgaagctgttgcttatggtgcagctgtccaggcagccatcttgtctggagacaagtctgagaatgttcaagatttgctgctcttggatgtcactcctctttcccttggtattgaaactgctggtggagtcatgactgtcctcatcaagcgtaataccaccattcctaccaagcagacacagaccttcactacctattctgacaaccagcctggtgtgcttattcaggtttatgaaggcgagcgtgccatgacaaaggataacaacctgcttggcaagtttgaactcacaggcatacctcctgcaccccgaggtgttcctcagattgaagtcacttttgacattgatgccaatggtatactcaatgtctctgctgtggacaagagtacgggaaaagagaacaagattactatcactaatgacaagggccgtttgagcaaggaagacattgaacgtatggtccaggaagctgagaagtacaaagctgaagatgagaagcagagggacaaggtgtcatccaagaattcacttgagtcctatgccttcaacatgaaagcaactgttgaagatgagaaacttcaaggcaagattaacgatgaggacaaacagaagattctggacaagtgtaatgaaattatcaactggcttgataagaatcagactgctgagaaggaagaatttgaacatcaacagaaagagctggagaaagtttgcaaccccatcatcaccaagctgtaccagagtgcaggaggcatgccaggaggaatgcctgggggatttcctggtggtggagctcctccctctggtggtgcttcctcagggcccaccattgaagaggttgattaagccaaccaagtgtagatgtagcattgttccacacatttaaaacatttgaaggacctaaattcgtagcaaattctgtggcagttttaaaaagttaagctgctatagtaagttactgggcattctcaatacttgaatatggaacatatgcacaggggaaggaaataacattgcactttataaacactgtattgtaagtggaaaatgcaatgtcttaaataaaactatttaaaattggc

SEQ ID NO: 9580 - DNA, 1924 bp, Homo sapiens
  source 1..1924: mol_type = unassigned DNA; mol_type = unassigned DNA
agcaaccatgtccaagggacctgcagttggtattgatcttggcaccacctactcttgtgtgggtgttttccagcacggaaaagtcgagataattgccaatgatcagggaaaccgaaccactccaagctatgtcgcctttacggacactgaacggttgatcggtgatgccgcaaagaatcaagttgcaatgaaccccaccaacacagtttttgatgccaaacgtctgattggacgcagatttgatgatgctgttgtccagtctgatatgaaacattggccctttatggtggtgaatgatgctggcaggcccaaggtccaagtagaatacaagggagagaccaaaagcttctatccagaggaggtgtcttctatggttctgacaaagatgaaggaaattgcagaagcctaccttgggaaggctaccaaagatgctggaactattgctggtctcaatgtacttagaattattaatgagccaactgctgctgctattgcttacggcttagacaaaaaggttggagcagaaagaaacgtgctcatctttgacctgggaggtggcacttttgatgtgtcaatcctcactattgaggatggaatctttgaggtcaagtctacagctggagacacccacttgggtggagaagattttgacaaccgaatggtcaaccattttattgctgagtttaagcgcaagcataagaaggacatcagtgagaacaagagagctgtaagacgcctccgtactgcttgtgaacgtgctaagcgtaccctctcttccagcacccaggccagtattgagatcgattctctctatgaaggaatcgacttctatacctccattacccgtgcccgatttgaagaactgaatgctgacctgttccgtggcaccctggacccagtagagaaagcccttcgagatgccaaactagacaagtcacagattcatgatattgtcctggttggtggttctactcgtatccccaagattcagaagcttctccaagacttcttcaatggaaaagaactgaataagagcatcaaccctgatgaagctgttgcttatggtgcagctgtccaggcagccatcttgtctggagacaagtctgagaatgttcaagatttgctgctcttggatgtcactcctctttcccttggtattgaaactgctggtggagtcatgactgtcctcatcaagcgtaataccaccattcctaccaagcagacacagaccttcactacctattctgacaaccagcctggtgtgcttattcaggtttatgaaggcgagcgtgccatgacaaaggataacaacctgcttggcaagtttgaactcacaggcatacctcctgcaccccgaggtgttcctcagattgaagtcacttttgacattgatgccaatggtatactcaatgtctctgctgtggacaagagtacgggaaaagagaacaagattactatcactaatgacaagggccgtttgagcaaggaagacattgaacgtatggtccaggaagctgagaagtacaaagctgaagatgagaagcagagggacaaggtgtcatccaagaattcacttgagtcctatgccttcaacatgaaagcaactgttgaagatgagaaacttcaaggcaagattaacgatgaggacaaacagaagattctggacaagtgtaatgaaattatcaactggcttgataagaatcagactgctgagaaggaagaatttgaacatcaacagaaagagctggagaaagtttgcaaccccatcatcaccaagctgtaccagagtgcaggaggcatgccaggaggaatgcctgggggatttcctggtggtggagctcctccctctggtggtgcttcctcagggcccaccattgaagaggttgattaagccaaccaagtgtagatgtagcattgttccaca

SEQ ID NO: 9581 - DNA, 963 bp, Homo sapiens
  source 1..963: mol_type = unassigned DNA; mol_type = unassigned DNA
ctaaaggcaggcaggcccaaggtgactcgctgtgatgagtgattgttaaacattcgtagtttccaccaaaagcttggctaatgatggcaacaccttccttggatgtctgagcgagtgatagttaaaacaggagctatgtactgggttttcttttaacttcttttaacgttaactttttgtttgctagctgtccaggcagccatcttgtctggagacaagtctgagaatgttcaagatttgctgctcttggatgtcactcctctttcccttggtattgaaactgctggtggagtcatgactgtcctcatcaagcgtaataccaccattcctaccaagcagacacagaccttcactacctattctgacaaccagcctggtgtgcttattcaggtttatgaaggcgagcgtgccatgacaaaggataacaacctgcttggcaagtttgaactcacaggcatacctcctgcaccccgaggtgttcctcagattgaagtcacttttgacattgatgccaatggtatactcaatgtctctgctgtggacaagagtacgggaaaagagaacaagattactatcactaatgacaagggccgtttgagcaaggaagacattgaacgtatggtccaggaagctgagaagtacaaagctgaagatgagaagcagagggacaaggtgtcatccaagaattcacttgagtcctatgccttcaacatgaaagcaactgttgaagatgagaaacttcaaggcaagattaacgatgaggacaaacagaagattctggacaagtgtaatgaaattatcaactggcttgataagaatcagactgctgagaaggaagaatttgaacatcaacagaaagagctggagaaagtttgcaaccccatcatcaccaagctgtaccagagtgcaggaggcatgccaggaggaatgcctgggggatttcctggtggtggagctcctccc

SEQ ID NO: 9582 - DNA, 740 bp, Homo sapiens
  source 1..740: mol_type = unassigned DNA; mol_type = unassigned DNA
actacctattctgacaaccagcctggtgtgcttattcaggtatgtttctgtacttctcttgtttggcttactgataacagataaagggaagtcttgactgactcgctatgatgatggattccaaaaccattcgtagtttccaccagaaagtcttatgttggccagttccttccttggatgtttgagcgaccattcttccttagcaggaccctagcactgtcacagacctggagtccattgtagtaatttgttttatttcctaccaaggtttatgaaggcgagcgtgccatgacaaaggataacaacctgcttggcaagtttgaactcacaggcatacctcctgcaccccgaggtgttcctcagattgaagtcacttttgacattgatgccaatggtatactcaatgtctctgctgtggacaagagtacgggaaaagagaacaagattactatcactaatgacaagggccgtttgagcaaggaagacattgaacgtatggtccaggaagctgagaagtacaaagctgaagatgagaagcagagggacaaggtgtcatccaagaattcacttgagtcctatgccttcaacatgaaagcaactgttgaagatgagaaacttcaaggcaagattaacgatgaggacaaacagaagattctggacaagtgtaatgaaattatcaactggcttgataagaatcagactgctgagaaggaagaatttgaacatcaacagaaagagct

SEQ ID NO: 9583 - DNA, 465 bp, Homo sapiens
  source 1..465: mol_type = unassigned DNA; mol_type = unassigned DNA
ggtctcattgaactcgcctgcagctcttgggttttttgtggcttccttcgttattggagccaggcctacaccccagcaaccatgtccaagggacctgcagttggtattgatcttggcaccacctactcttgtgtgggtgttttccagcacggaaaagtcgagataattgccaatgatcagggaaaccgaaccactccaagctatgtcgcctttacggacactgaacggttgatcggtgatgccgcaaagaatcaagttgcaatgaaccccaccaacacagtttttgatgccaaacgtctgattggacgcagatttgatgatgctgttgtccagtctgatatgaaacattggccctttatggtggtgaatgatgctggcagaccttcactacctattctgacaaccagcctggtgtgcttattcaggtttatgaaggcgagcgtgccatgacaaaggataacaacc

SEQ ID NO: 9584 - DNA, 504 bp, Homo sapiens
  source 1..504: mol_type = unassigned DNA; mol_type = unassigned DNA
tctcagcgtcaggctaccaaagatgctggaactattgctggtctcaatgtacttagaattattaatgagccaactgctgctgctattgcttacggcttagacaaaaagcacccaggccagtattgagatcgattctctctatgaaggaatcgacttctatacctccattacccgtgcccgatttgaagaactgaatgctgacctgttccgtggcaccctggacccagtagagaaagcccttcgagatgccaaactagacaagtcacagattcatgatattgtcctggttggtggttctactcgtatccccaagattcagaagcttctccaagacttcttcaatggaaaagaactgaataagagcatcaaccctgatgaagctgttgcttatggtgcagctgtccaggcagccatcttgtctggagacaagtctgagaatgttcaagatttgctgctcttggatgtcactcctctttcccttggtattgaaactgctggtggagt

SEQ ID NO: 9585 - DNA, 1509 bp, Homo sapiens
  source 1..1509: mol_type = unassigned DNA; mol_type = unassigned DNA
agcaggggcgggccccttctggaaggttctaagatagggtataagaggcagggtggcgggcggaaaccggtctcattgaactcgcctgcagctcttgggttttttgtggcttccttcgttattggagccaggcctacaccccagcaaccatgtccaagggacctgcagttggtattgatcttggcaccacctactcttgtgtgggtgttttccagcacggaaaagtcgagataattgccaatgatcagggaaaccgaaccactccaagctatgtcgcctttacggacactgaacggttgatcggtgatgccgcaaagaatcaagttgcaatgaaccccaccaacacagtttttgatgccaaacgtctgattggacgcagatttgatgatgctgttgtccagtctgatatgaaacattggccctttatggtggtgaatgatgctggcaggcccaaggtccaagtagaatacaagggagagaccaaaagcttctatccagaggaggtgtcttctatggttctgacaaagatgaaggaaattgcagaagcctaccttgggaagactgttaccaatgctgtggtcacagtgccagcttactttaatgactctcagcgtcaggctaccaaagatgctggaactattgctggtctcaatgtacttagaattattaatgagccaactgctgctgctattgcttacggcttagacaaaaaggttggagcagaaagaaacgtgctcatctttgacctgggaggtggcacttttgatgtgtcaatcctcactattgaggatggaatctttgaggtcaagtctacagctggagacacccacttgggtggagaagattttgacaaccgaatggtcaaccattttattgctgagtttaagcgcaagcataagaaggacatcagtgagaacaagagagctgtaagacgcctccgtactgcttgtgaacgtgctaagcgtaccctctcttccagcacccaggccagtattgagatcgattctctctatgaaggaatcgacttctatacctccattacccgtgcccgatttgaagaactgaatgctgacctgttccgtggcaccctggacccagtagagaaagcccttcgagatgccaaactagacaagtcacagattcatgatattgtcctggttggtggttctactcgtatccccaagattcagaagcttctccaagacttcttcaatggaaaagaactgaataagagcatcaaccctgatgaagctgttgcttatggtgcaggtaacaatggtatctcaattaaccctaaaggcaggcaggcccaaggtgactcgctgtgatgagtgattgttaaacattcgtagtttccaccaaaagcttggctaatgatggcaacaccttccttggatgtctgagcgagtgatagttaaaacaggagctatgtactgggttttcttttaacttcttttaacgttaactttttgtttgctagctgtccaggcagccatcttgtctggagac

SEQ ID NO: 9586 - DNA, 1112 bp, Homo sapiens
  source 1..1112: mol_type = unassigned DNA; mol_type = unassigned DNA
gcctgcagctcttgggttttttgtggcttccttcgttattggagccaggcctacaccccagcacggaaaagtcgagataattgccaatgatcagggaaaccgaaccactccaagctatgtcgcctttacggacactgaacggttgatcggtgatgccgcaaagaatcaagttgcaatgaaccccaccaacacagtttttgatgccaaacgtctgattggacgcagatttgatgatgctgttgtccagtctgatatgaaacattggccctttatggtggtgaatgatgctggcaggcccaaggtccaagtagaatacaagggagagaccaaaagcttctatccagaggaggtgtcttctatggttctgacaaagatgaaggaaattgcagaagcctaccttgggaagactgttaccaatgctgtggtcacagtgccagcttactttaatgactctcagcgtcaggctaccaaagatgctggaactattgctggtctcaatgtacttagaattattaatgagccaactgctgctgctattgcttacggcttagacaaaaaggttggagcagaaagaaacgtgctcatctttgacctgggaggtggcacttttgatgtgtcaatcctcactattgaggatggaatctttgaggtcaagtctacagctggagacacccacttgggtggagaagattttgacaaccgaatggtcaaccattttattgctgagtttaagcgcaagcataagaaggacatcagtgagaacaagagagctgtaagacgcctccgtactgcttgtgaacgtgctaagcgtaccctctcttccagcacccaggccagtattgagatcgattctctctatgaaggaatcgacttctatacctccattacccgtgcccgatttgaagaactgaatgctgacctgttccgtggcaccctggacccagtagagaaagcccttcgagatgccaaactagacaagtcacagattcatgatattgtcctggttggtggttctactcgtatccccaagattcagaagcttctccaagacttcttcaatggaaaagaactgaataagagcatcaaccctgatgaagctgttgcttatggtg

SEQ ID NO: 9587 - DNA, 1194 bp, Homo sapiens
  source 1..1194: mol_type = unassigned DNA; mol_type = unassigned DNA
ttccgtcttctcctgcccggctcccgcgcccaaacccctcccttcaggccccgcgcgattccgcccccagttctgtgccggccaagatcccggctagcgccgctatcattggttagttccaagtttgcccgcccctcttcctcctcctttttccgccccctccctcccgcggaagctgggggcgcatgcgtagaggtggacgctcccctcccccgcccggggtaactgaggactcccgcgcgcggactcgctgcgccccaccctccctttccccggggccgtccggagagcgggggcgagcttgaaagttccagaacgctgcgcaaccatgtccaagggacctgcagttggtattgatcttggcaccacctactcttgtgtgggtgttttccagcacggaaaagtcgagataattgccaatgatcagggaaaccgaaccactccaagctatgtcgcctttacggacactgaacggttgatcggtgatgccgcaaagaatcaagttgcaatgaaccccaccaacacagtttttgatgccaaacgtctgattggacgcagatttgatgatgctgttgtccagtctgatatgaaacattggccctttatggtggtgaatgatgctggcaggcccaaggtccaagtagaatacaagggagagaccaaaagcttctatccagaggaggtgtcttctatggttctgacaaagatgaaggaaattgcagaagcctaccttgggaagactgttaccaatgctgtggtcacagtgccagcttactttaatgactctcagcgtcaggctaccaaagatgctggaactattgctggtctcaatgtacttagaattattaatgagccaactgctgctgctattgcttacggcttagacaaaaaggtatgtaccatttgtgatgcaagttcggattattttaagattaatttgatccatcgtaaatttaaatgagattgtttttaacggcaggttggagcagaaagaaacgtgctcatctttgacctgggaggtggcacttttgatgtgtcaatcctcactattgaggatggaatctttgaggtcaagtctacagctggagacacccacttgggtggagaagattttgacaaccgaatggtcaaccattttattgctgagtttaagcgcaagcataagaaggacatcagtgagaacaagagagctgt

SEQ ID NO: 9588 - DNA, 583 bp, Homo sapiens
  source 1..583: mol_type = unassigned DNA; mol_type = unassigned DNA
ctcattgaactcgcctgcagctcttgggttttttgtggcttccttcgttattggagccaggcctacaccccagcaaccatgtccaagggacctgcagttggtattgatcttggcaccacctactcttgtgtgggtgttttccagcacggaaaagtcgagataattgccaatgatcagggaaaccgaaccactccaagctatgtcgcctttacggacactgaacggttgatcggtgatgccgcaaagaatcaagttgcaatgaaccccaccaacacagtttttgagaccaaaagcttctatccagaggaggtgtcttctatggttctgacaaagatgaaggaaattgcagaagcctaccttgggaagactgttaccaatgctgtggtcacagtgccagcttactttaatgactctcagcgtcaggctaccaaagatgctggaactattgctggtctcaatgtacttagaattattaatgagccaactgctgctgctattgcttacggcttagacaaaaaggttggagcagaaagaaacgtgctcatctttgacctgggaggtggcacttttgatgtgtcaatcc

SEQ ID NO: 9589 - DNA, 570 bp, Homo sapiens
  source 1..570: mol_type = unassigned DNA; mol_type = unassigned DNA
ctcattgaactcgcctgcagctcttgggttttttgtggcttccttcgttattggagccaggcctacaccccagcaaccatgtccaagggacctgcagttggtattgatcttggcaccacctactcttgtgtgggtgttttccagcacggaaaagtcgagataattgccaatgatcagggaaaccgaaccactccaagctatgtcgcctttacggacactgaacggttgatcggtgatgccgcaaagaatcaagttgcaatgaaccccaccaacacagtttttgactgttaccaatgctgtggtcacagtgccagcttactttaatgactctcagcgtcaggctaccaaagatgctggaactattgctggtctcaatgtacttagaattattaatgagccaactgctgctgctattgcttacggcttagacaaaaaggtatgtaccatttgtgatgcaagttcggattattttaagattaatttgatccatcgtaaatttaaatgagattgtttttaacggcaggttggagcagaaagaaacgtgctcatctttgacctgggaggtggcac

SEQ ID NO: 9590 - DNA, 1048 bp, Homo sapiens
  source 1..1048: mol_type = unassigned DNA; mol_type = unassigned DNA
accatttaaacctgtttattttataaacaacggggaaatgtagggcttgggctagttggggaaggactgagccaagaagccgaatctgttctagacggaggtgggaaggggcctaacggtcagggctcagagaagcggtttcgccttcttttccgcggagggatccagacacgaccgcgtcctgaggcggttctgaaaagccgggccccttaaacctctgcgtcgggggctgcctcccgacagttgccgtagggaaatgcaggtgctgggaggcctgccgagctaacccgccccaccccgcggcggcctggcggctccctccaatcccaatcctggggggccgtgagcgagcagccctagtggcaccctgaagccggaaccttcgccccagcccctcggggtcagcccttgtccaaagccacgctatgaaatacagattcgcgaaacccggggcacttagaggcccgtctggaacacgaagcaaccatgtccaagggacctgcagttggtattgatcttggcaccacctactcttgtgtgggtgttttccagcacggaaaagtcgagataattgccaatgatcagggaaaccgaaccactccaagctatgtcgcctttacggacactgaacggttgatcggtgatgccgcaaagaatcaagttgcaatgaaccccaccaacacagtttttgatgccaaacgtctgattggacgcagatttgatgatgctgttgtccagtctgatatgaaacattggccctttatggtggtgaatgatgctggcaggcccaaggtccaagtagaatacaagggagagaccaaaagcttctatccagaggaggtgtcttctatggttctgacaaagatgaaggaaattgcagaagcctaccttgggaagactgttaccaatgctgtggtcacagtgccagcttactttaatgactctcagcgtcaggctaccaaagatgctggaactattgctggtctcaatgtacttagaattattaatgagccaactgctgctgctattgcttacggcttagacaaaa

SEQ ID NO: 9591 - DNA, 588 bp, Homo sapiens
  source 1..588: mol_type = unassigned DNA; mol_type = unassigned DNA
agttctggacctcgcgcgtgcttagacaggagcaaccatgtccaagggacctgcagttggtattgatcttggcaccacctactcttgtgtgggtgttttccagcacggaaaagtcgagataattgccaatgatcagggaaaccgaaccactccaagctatgtcgcctttacggacactgaacggttgatcggtgatgccgcaaagaatcaagttgcaatgaaccccaccaacacagtttttgatgccaaacgtctgattggacgcagatttgatgatgctgttgtccagtctgatatgaaacattggccctttatggtggtgaatgatgctggcaggcccaaggtccaagtagaatacaagggagagaccaaaagcttctatccagaggaggtgtcttctatggttctgacaaagatgaaggaaattgcagaagcctaccttgggaagactgttaccaatgctgtggtcacagtgccagcttactttaatgactctcagcgtcaggctaccaaagatgctggaactattgctggtctcaatgtacttagaattattaatgagccaactgctgctgctattgcttacgg

SEQ ID NO: 9592 - DNA, 579 bp, Homo sapiens
  source 1..579: mol_type = unassigned DNA; mol_type = unassigned DNA
gctgcggtgagtgcgttatcgtgaggcggagcgcggtgggcaaccatgtccaagggacctgcagttggtattgatcttggcaccacctactcttgtgtgggtgttttccagcacggaaaagtcgagataattgccaatgatcagggaaaccgaaccactccaagctatgtcgcctttacggacactgaacggttgatcggtgatgccgcaaagaatcaagttgcaatgaaccccaccaacacagtttttgatgccaaacgtctgattggacgcagatttgatgatgctgttgtccagtctgatatgaaacattggccctttatggtggtgaatgatgctggcaggcccaaggtccaagtagaatacaagggagagaccaaaagcttctatccagaggaggtgtcttctatggttctgacaaagatgaaggaaattgcagaagcctaccttgggaagactgttaccaatgctgtggtcacagtgccagcttactttaatgactctcagcgtcaggctaccaaagatgctggaactattgctggtctcaatgtacttagaattattaatgagccaactgct

SEQ ID NO: 9593 - DNA, 674 bp, Homo sapiens
  source 1..674: mol_type = unassigned DNA; mol_type = unassigned DNA
gtgcagcctccacacaggcctgttgggcttgctgaggcttgggggttctgagaatctcgtcgaggcgagtgtgcggctccttctaccggcttaaagggcctcagttttcggtgggatggcagcggtatttggttgcagccggcaggacggaaatcaaccatgtccaagggacctgcagttggtattgatcttggcaccacctactcttgtgtgggtgttttccagcacggaaaagtcgagataattgccaatgatcagggaaaccgaaccactccaagctatgtcgcctttacggacactgaacggttgatcggtgatgccgcaaagaatcaagttgcaatgaaccccaccaacacagtttttgatgccaaacgtctgattggacgcagatttgatgatgctgttgtccagtctgatatgaaacattggccctttatggtggtgaatgatgctggcaggcccaaggtccaagtagaatacaagggagagaccaaaagcttctatccagaggaggtgtcttctatggttctgacaaagatgaaggaaattgcagaagcctaccttgggaagactgttaccaatgctgtggtcacagtgccagcttactttaatgactctcagcgtcaggctaccaaagatgctggaactattgctggtctcaatgtacttagaat

SEQ ID NO: 9594 - DNA, 536 bp, Homo sapiens
  source 1..536: mol_type = unassigned DNA; mol_type = unassigned DNA
gtctgggagcgtgcagcctccacacaggcctgttgggcttgctgaggcttgggggttctgagaatctcgtcgaggcgagtgtgcggctccttctaccggcttaaagggcctcagttttcgcaaccatgtccaagggacctgcagttggtattgatcttggcaccacctactcttgtgtgggtgttttccagcacggaaaagtcgagataattgccaatgatcagggaaaccgaaccactccaagctatgtcgcctttacggacactgaacggttgatcggtgatgccgcaaagaatcaagttgcaatgaaccccaccaacacagtttttgatgccaaacgtctgattggacgcagatttgatgatgctgttgtccagtctgatatgaaacattggccctttatggtggtgaatgatgctggcaggcccaaggtccaagtagaatacaagggagagaccaaaagcttctatccagaggaggtgtcttctatggttctgacaaagatgaaggaaattgcagaagcctaccttgggaag

SEQ ID NO: 9595 - DNA, 648 bp, Homo sapiens
  source 1..648: mol_type = unassigned DNA; mol_type = unassigned DNA
gggagacgcccggcggccgcgtggcgggggagggttgctgcatcggtttgcctggcgcgcggggaagtggagccagcgttttctttcacccagttccctgcttagtccagtcccaccgtggttcttcagagctgttcttggcgtgcttccagtatgggggtacattccggagtagttaaaagcccgttgactcccgggggcactggcacctggcgagggaggggaacagacagtgctcagttcgggcaaccatgtccaagggacctgcagttggtattgatcttggcaccacctactcttgtgtgggtgttttccagcacggaaaagtcgagataattgccaatgatcagggaaaccgaaccactccaagctatgtcgcctttacggacactgaacggttgatcggtgatgccgcaaagaatcaagttgcaatgaaccccaccaacacagtttttgatgccaaacgtctgattggacgcagatttgatgatgctgttgtccagtctgatatgaaacattggccctttatggtggtgaatgatgctggcaggcccaaggtccaagtagaatacaagggagagaccaaaagcttctatccagaggaggtgtcttctatggttctgacaaagatgaaggaaattgcagaag

SEQ ID NO: 9596 - DNA, 578 bp, Homo sapiens
  source 1..578: mol_type = unassigned DNA; mol_type = unassigned DNA
ctcattgaactcgcctgcagctcttgggttttttgtggcttccttcgttattggagccaggcctacaccccagcaaccatgtccaagggacctgcagttggtattgatcttggcaccacctactcttgtgtgggtgttttccagcacggaaaagtcgagataattgccaatgatcagggaaaccgaaccactccaagctatgtcgcctttacggacactgaacggttgatcggtgatgccgcaaagaatcaagttgcaatgaaccccaccaacacagtttttggtgagttcctaattttaaatgacagaacaaatataacagggctaggaagcacaaaagtttatgaaacgtgaggagggaactttttgattttagaaaaactgagctgagagacttgttatcaagtctgttataaaacaggttgtagaaacctttcaggctgaaatctggataacgtaggaggttgaagtttgaacctttgctacctatatggtagttgaattcacctacctatgaactgttaggtatttgagtaatcatggacttgagttttatcagaagagctatgaaattgaaa

SEQ ID NO: 9597 - DNA, 3321 bp, Homo sapiens
  source 1..3321: mol_type = unassigned DNA; mol_type = unassigned DNA
gtgaccaacccccgcccctcaccccacgtggttggaggtttccagaagcgctgccgccaccgcatcgcgcagctctttgccgtcggagcgcttgtttgctgcctcgtactcctccatttatccgccatgataagtgccagccgagctgcagcagcccgtctcgtgggcgccgcagcctcccggggccctacggccgcccgccaccaggatagctggaatggccttagtcatgaggcttttagacttgtttcaaggcgggattatgcatcagaagcaatcaagggagcagttgttggtattgatttgggtactaccaactcctgcgtggcagttatggaaggtaaacaagcaaaggtgctggagaatgccgaaggtgccagaaccaccccttcagttgtggcctttacagcagatggtgagcgacttgttggaatgccggccaagcgacaggctgtcaccaacccaaacaatacattttatgctaccaagcgtctcattggccggcgatatgatgatcctgaagtacagaaagacattaaaaatgttccctttaaaattgtccgtgcctccaatggtgatgcctgggttgaggctcatgggaaattgtattctccgagtcagattggagcatttgtgttgatgaagatgaaagagactgcagaaaattacttggggcacacagcaaaaaatgctgtgatcacagtcccagcttatttcaatgactcgcagagacaggccactaaagatgctggccagatatctggactgaatgtgcttcgggtgattaatgagcccacagctgctgctcttgcctatggtctagacaaatcagaagacaaagtcattgctgtatatgatttaggtggtggaacttttgatatttctatcctggaaattcagaaaggagtatttgaggtgaaatccacaaatggggataccttcttaggtggggaagactttgaccaggccttgctacggcacattgtgaaggagttcaagagagagacaggggttgatttgactaaagacaacatggcacttcagagggtacgggaagctgctgaaaaggctaaatgtgaactctcctcatctgtgcagactgacatcaatttgccctatcttacaatggattcttctggacccaagcatttgaatatgaagttgacccgtgctcaatttgaagggattgtcactgatctaatcagaaggactatcgctccatgccaaaaagctatgcaagatgcagaagtcagcaagagtgacataggagaagtgattcttgtgggtggcatgactaggatgcccaaggttcagcagactgtacaggatctttttggcagagccccaagtaaagctgtcaatcctgatgaggctgtggccattggagctgccattcagggaggtgtgttggccggcgatgtcacggatgtgctgctccttgatgtcactcccctgtctctgggtattgaaactctaggaggtgtctttaccaaacttattaataggaataccactattccaaccaagaagagccaggtattctctactgccgctgatggtcaaacgcaagtggaaattaaagtgtgtcagggtgaaagagagatggctggagacaacaaactccttggacagtttactttgattggaattccaccagcccctcgtggagttcctcagattgaagttacatttgacattgatgccaatgggatagtacatgtttctgctaaagataaaggcacaggacgtgagcagcagattgtaatccagtcttctggtggattaagcaaagatgatattgaaaatatggttaaaaatgcagagaaatatgctgaagaagaccggcgaaagaaggaacgagttgaagcagttaatatggctgaaggaatcattcacgacacagaaaccaagatggaagaattcaaggaccaattacctgctgatgagtgcaacaagctgaaagaagagatttccaaaatgagggagctcctggctagaaaagacagcgaaacaggagaaaatattagacaggcagcatcctctcttcagcaggcatcactgaagctgttcgaaatggcatacaaaaagatggcatctgagcgagaaggctctggaagttctggcactggggaacaaaaggaagatcaaaaggaggaaaaacagtaataatagcagaaattttgaagccagaaggacaacatatgaagcttaggagtgaagagacttcctgagcagaaatgggcgaacttcagtctttttactgtgtttttgcagtattctatatataatttccttaatttgtaaatttagtgaccattagctagtgatcatttaatggacagtgattctaacagtataaagttcacaatattctatgtccctagcctgtcatttttcagctgcatgtaaaaggaggtaggatgaattgatcattataaagatttaactattttatgctgaagtgaccatattttcaaggggtgaaaccatctcgcacacagcaatgaaggtagtcatccatagacttgaaatgagaccacatatggggatgagatccttctagttagcctagtactgctgtactggcctgtatgtacatggggtccttcaactgaggccttgcaagtcaagctggctgtgccatgtttgtagatggggcagaggaatctagaacaatgggaaacttagctatttatattaggtacagctattaaaacaaggtaggaatgaggctagacctttaacttccctaaggcatacttttctagctaccttctgccctgtgtctggcacctacatccttgatgattgttctcttacccattctggaatttttttttttttaaataaatacagaaagcatcttgatctcttgtttgtgaggggtgatgccctgagatttagcttcaagaatatgccatggctcatgcttcccatatttcccaaagagggaaatacaggatttgctaacactggttaaaaatgcaaattcaagatttggaagggctgttataatgaaataatgagcagtatcagcatgtgcaaatcttgtttgaaggattttattttctccccttagacctttggtacatttagaatcttgaaagtttctagatctctaacatgaaagtttctagatctctaacatgaaagtttttagatctctaacatgaaaaccaaggtggctattttcaggttgctttcagctccaagtagaaataaccagaattggcttacattaaagaaactgcatctagaaataagtcctaagatactatttctatggctcaaaaataaaaggaacccagatttctttcccta

SEQ ID NO: 9598 - DNA, 275 bp, Homo sapiens
  source 1..275: mol_type = unassigned DNA; mol_type = unassigned DNA
acaggggttgatttgactaaagacaacatggcacttcagagggtacgggaagctgctgaaaaggctaaatgtgaactctcctcatctgtgcagaggaatctagaacaatgggaaacttagctatttatattaggtacagctattaaaacaaggtaggaatgaggctagacctttaacttccctaaggcatacttttctagctaccttctgccctgtgtctggcacctacatccttgatgattgttctcttacccattctggaatttttttttttt

SEQ ID NO: 9599 - DNA, 1175 bp, Homo sapiens
  source 1..1175: mol_type = unassigned DNA; mol_type = unassigned DNA
aggcacaggacgtgagcagcagattgtaatccagtcttctggtggattaagcaaagatgatattgaaaatatggttaaaaatgcagagaaatatgctgaagaagaccggcgaaagaaggtgattacttcttgtcttctgaactttaatcttagtaaagctcagtcttgacagtgggagtttggggctgggcgcagtgtctcactcctgtaatcccagcactgtaagcccactgccaaggtgggcagatcgtttgaagccgggcgtggtggtgcacgcctgcagtcccagctacttgggaggctcaggcaggagaatcgcttgaacaagaaagtgggagagtttggacatgtcataggttgtgggtaagagaaaacctaagataatctattcttccttccccgttgtttataccttatgtttgcagtgcctttattatttcttctgttttccctgtcacaattctgatgttacaaaatctagcccaaatctctctcaaagccatcccagactctttcatgccactctgatttctccctcttactctatttttatctgtaactgtatgtaacacatagcttattgtctgagtatagacattcagcaaactttggttgattggaaagtcttcgtttaaacttctaatttctctaaggaacgagttgaagcagttaatatggctgaaggaatcattcacgacacagaaaccaagatggaagaattcaaggaccaattacctgctgatgagtgcaacaagctgaaagaagagatttccaaaatgagggagctcctggctagaaaagacagcgaaacaggagaaaatattagacaggcagcatcctctcttcagcaggcatcactgaagctgttcgaaatggcatacaaaaagatggcatctgagcgagaaggctctggaagttctggcactggggaacaaaaggaagatcaaaaggaggaaaaacagtaataatagcagaaattttgaagccagaaggacaacatatgaagcttaggagtgaagagacttcctgagcagaaatgggcgaacttcagtctttttactgtgtttttgcagtattctatatataatttccttaatttgtaaatttagtgaccattagctagtgatcatttaatggacagtgattctaacagtataaagttcacaatattctat

SEQ ID NO: 9600 - DNA, 482 bp, Homo sapiens
  source 1..482: mol_type = unassigned DNA; mol_type = unassigned DNA
aacgcaagtggaaattaaagtgtgtcagggtgaaagagagatggctggagacaacaaactccttggacagtttactttgattggaattccaccagcccctcgtggagttcctcagattgaagttacatttgacattgatgccaatgggatagtacatgtttctgctaaagataaaggcacaggacgtgagcagcagattgtaatccagtcttctggtggattaagcaaagatgatattgaaaatatggttaaaaatgcagagaaatatgctgaagaagaccggcgaaagaagagatttccaaaatgagggagctcctggctagaaaagacagcgaaacaggagaaaatattagacaggcagcatcctctcttcagcaggcatcactgaagctgttcgaaatggcatacaaaaagatggcatctgagcgagaaggctctggaagttctggcactggggaacaaaaggaagatcaaaaggagga

SEQ ID NO: 9601 - DNA, 1796 bp, Homo sapiens
  source 1..1796: mol_type = unassigned DNA; mol_type = unassigned DNA
agaagcgctgccgccaccgcatcgcgcagctctttgccgtcggagcgcttgtttgctgcctcgtactcctccatttatccgccatgataagtgccagccgagctgcagcagcccgtctcgtgggcgccgcagcctcccggggccctacggccgcccgccaccaggatacacactggttggtgactgagtcagttttttcttttttaggatagctggaatggccttagtcatgaggcttttagacttgtttcaaggcgggattatgcatcagaagcaatcaagggagcagttgttggtattgatttgggtactaccaactcctgcgtggcagttatggaaggtaaacaagcaaaggtgctggagaatgccgaaggtgccagaaccaccccttcagttgtggcctttacagcagatggtgagcgacttgttggaatgccggccaagcgacaggctgtcaccaacccaaacaatacattttatgctaccaagcgtctcattggccggcgatatgatgatcctgaagtacagaaagacattaaaaatgttccctttaaaattgtccgtgcctccaatggtgatgcctgggttgaggctcatgggaaattgtattctccgagtcagattggagcatttgtgttgatgaagatgaaagagactgcagaaaattacttggggcacacagcaaaaaatgctgtgatcacagtcccagcttatttcaatgactcgcagagacaggccactaaagatgctggccagatatctggactgaatgtgcttcgggtgattaatgagcccacagctgctgctcttgcctatggtctagacaaatcagaagacaaagtcattgctgtatatgatttaggtggtggaacttttgatatttctatcctggaaattcagaaaggagtatttgaggtgaaatccacaaatggggataccttcttaggtggggaagactttgaccaggccttgctacggcacattgtgaaggagttcaagagagagacaggggttgatttgactaaagacaacatggcacttcagagggtacgggaagctgctgaaaaggctaaatgtgaactctcctcatctgtgcagactgacatcaatttgccctatcttacaatggattcttctggacccaagcatttgaatatgaagttgacccgtgctcaatttgaagggattgtcactgatctaatcagaaggactatcgctccatgccaaaaagctatgcaagatgcagaagtcagcaagagtgacataggagaagtgattcttgtgggtggcatgactaggatgcccaaggttcagcagactgtacaggatctttttggcagagccccaagtaaagctgtcaatcctgatgaggctgtggccattggagctgccattcagggaggtgtgttggccggcgatgtcacggatgtgctgctccttgatgtcactcccctgtctctgggtattgaaactctaggaggtgtctttaccaaacttattaataggaataccactattccaaccaagaagagccaggtattctctactgccgctgatggtcaaacgcaagtggaaattaaagtgtgtcagggtgaaagagagatggctggagacaacaaactccttggacagtttactttgttgtaatccagtcttctggtggattaagcaaagatgatattgaaaatatggttaaaaatgcagagaaatatgctgaagaagaccggcgaaagaaggtgattacttcttgtcttctgaactttaatcttagtaaagctcagtcttgacagtgggag

SEQ ID NO: 9602 - DNA, 780 bp, Homo sapiens
  source 1..780: mol_type = unassigned DNA; mol_type = unassigned DNA
ttgatttgactaaagacaacatggcacttcagagggtacgggaagctgctgaaaaggctaaatgtgaactctcctcatctgtgcagactgacatcaatttgccctatcttacaatggattcttctggacccaagcatttgaatatgaagttgacccgtgctcaatttgaagggattgtcactgatctaatcagaaggactatcgctccatgccaaaaagctatgcaagatgcagaagtcagcaagagtgacataggagaagtgattcttgtgggtggcatgactaggatgcccaaggaaatatgcaaaaaaaaaaaaaatgaacctggaaaaaaaaggtcctggaccaggtggatgcctcatatattaagaaatccccgaggccgggtacagtggcttacgcctgtaatcccagcactttgggaggccaaggcgggcggatcacgaggttcagcagactgtacaggatctttttggcagagccccaagtaaagctgtcaatcctgatgaggctgtggccattggagctgccattcagggaggtgtgttggccggcgatgtcacggatgtgctgctccttgatgtcactcccctgtctctgggtattgaaactctaggaggtgtctttaccaaacttattaataggaataccactattccaaccaagaagagccaggtattctctactgccgctgatggtcaaacgcaagtggaaattaaagtgtgtcagggtgaaagagagatggctggagacaacaaactccttggacagtttactttg

SEQ ID NO: 9603 - DNA, 582 bp, Homo sapiens
  source 1..582: mol_type = unassigned DNA; mol_type = unassigned DNA
actgacatcaatttgccctatcttacaatggattcttctggacccaagcatttgaatatgaagttgacccgtgctcaatttgaagggattgtcactgatctaatcagaaggactatcgctccatgccaaaaagctatgcaagatgcagaagtcagcaagagtgacataggagaagtgattcttgtgggtggcatgactaggatgcccaaggttcagcagactgtacaggatctttttggcagagccccaagtaaagctgtcaatcctgatgaggctgtggccattggagctgccattcagggaggtgtgttggccggcgatgtcacggatgtgctgctccttgatgtcactcccctgtctctgggtattgaaactctaggaggtgtctttaccaaacttattaataggaataccactattccaaccaagaagagccaggtaagagccatcacttcctaccttgtcacatgggttttaggttctatgacggatgtaattgcagccactttcatgagttttttctagaaaacttcatttttatctgttttacagtttagaatattaaacagttaactgtgggtg

SEQ ID NO: 9604 - DNA, 887 bp, Homo sapiens
  source 1..887: mol_type = unassigned DNA; mol_type = unassigned DNA
cgtactcctccatttatccgccatgataagtgccagccgagctgcagcagcccgtctcgtgggcgccgcagcctcccggggccctacggccgcccgccaccaggatagctggaatggccttagtcatgaggcttttagacttgtttcaaggcgggattatgcatcagaagcaatcaagggagcagttgttggtattgatttgggtactaccaactcctgcgtggcagttatggaaggtgctggagaatgccgaaggtgccagaaccaccccttcagttgtggcctttacagcagatggtgagcgacttgttggaatgccggccaagcgacaggctgtcaccaacccaaacaatacattttatgctaccaagcgtctcattggccggcgatatgatgatcctgaagtacagaaagacattaaaaatgttccctttaaaattgtccgtgcctccaatggtgatgcctgggttgaggctcatgggaaattgtattctccgagtcagattggagcatttgtgttgatgaagatgaaagagactgcagaaaattacttggggcacacagcaaaaaatgctgtgatcacagtcccagcttatttcaatgactcgcagagacaggccactaaagatgctggccagatatctggactgaatgtgcttcgggtgattaatgagcccacagctgctgctcttgcctatggtctagacaaatcagaagacaaagtcattgctgtatatgatttaggtggtggaacttttgatatttctatcctggaaattcagaaaggagtatttgaggtgaaatccacaaatggggataccttcttaggtggggaagactttgaccaggccttgctacggcacattgtgaaggagttcaagagagag

SEQ ID NO: 9605 - DNA, 663 bp, Homo sapiens
  source 1..663: mol_type = unassigned DNA; mol_type = unassigned DNA
ccagaagcgctgccgccaccgcatcgcgcagctctttgccgtcggagcgcttgtttgctgcctcgtactcctccatttatccgccatgataagtgccagccgagctgcagcagcccgtctcgtgggcgccgcagcctcccggggccctacggccgcccgccaccaggatacacactggttggtgactgagtcagttttttcttttttaggatagctggaatggccttagtcatgaggcttttagacttgtttcaaggcgggattatgcatcagaagcaatcaagggagcagttgttggtattgatttgggtactaccaactcctgcgtggcagttatggaaggtaaacaagcaaaggtgctggagaatgccgaaggtgccagaaccaccccttcagttgtggcctttacagcagatggtgagcgacttgttggaatgccggccaagcgacaggctgtcaccaacccaaacaatacattttatgctaccaagcgtctcattggccggcgatatgatgatcctgaagtacagaaagacattaaaaatgttccctttaaaattgtccgtgcctccaatggtgatgcctgggttgaggctcatgggaaattgtattctccgagtcagattggagcatttgtgttgatgaagatgaaagagactgcag

SEQ ID NO: 9606 - DNA, 518 bp, Homo sapiens
  source 1..518: mol_type = unassigned DNA; mol_type = unassigned DNA
agaagcgctgccgccaccgcatcgcgcagctctttgccgtcggagcgcttgtttgctgcctcgtactcctccatttatccgccatgataagtgccagccgagctgcagcagcccgtctcgtgggcgccgcagcctcccggggccctacggccgcccgccaccagatcagaagcaatcaagggagcagttgttggtattgatttgggtactaccaactcctgcgtggcagttatggaaggtaaacaagcaaaggtgctggagaatgccgaaggtgccagaaccaccccttcagttgtggcctttacagcagatggtgagcgacttgttggaatgccggccaagcgacaggctgtcaccaacccaaacaatacattttatgctaccaagcgtctcattggccggcgatatgatgatcctgaagtacagaaagacattaaaaatgttccctttaaaattgtccgtgcctccaatggtgatgcctgggttgaggctcatgggaaattgtattctccgagtca

SEQ ID NO: 9607 - DNA, 584 bp, Homo sapiens
  source 1..584: mol_type = unassigned DNA; mol_type = unassigned DNA
ccgcgcgccctttagggtttgaattctccagtataggtcaggcgggaaggaaggtaacgggccttccatagttagcgctgccgggtcaagattttgcccaaggttttgcctccggcttgggccctgctgagtcacacccctcgcgatctagagtgtcatttcaaaattaccaggatagctggaatggccttagtcatgaggcttttagacttgtttcaaggcgggattatgcatcagaagcaatcaagggagcagttgttggtattgatttgggtactaccaactcctgcgtggcagttatggaaggtaaacaagcaaaggtgctggagaatgccgaaggtgccagaaccaccccttcagttgtggcctttacagcagatggtgagcgacttgttggaatgccggccaagcgacaggctgtcaccaacccaaacaatacattttatgctaccaagcgtctcattggccggcgatatgatgatcctgaagtacagaaagacattaaaaatgttccctttaaaattgtccgtgcctccaatggtgatgcctgggttgaggctcatgggaaattgtattctccgagt

SEQ ID NO: 9608 - DNA, 664 bp, Homo sapiens
  source 1..664: mol_type = unassigned DNA; mol_type = unassigned DNA
ggaggtttccagaagcgctgccgccaccgcatcgcgcagctctttgccgtcggagcgcttgtttgctgcctcgtactcctccatttatccgccatgataagtgccagccgagctgcagcagcccgtctcgtgggcgccgcagcctcccggggccctacggccgcccgccaccaggatagctggaatggccttagtcatgaggcttttagacttgtttcaaggcgggattatgcatcagaagcaatcaagggagcagttgttggtattgatttgggtactaccaactcctgcgtggcagttatggaaggtaaacaagcaaaggtgctggagaatgccgaaggtgccagaaccaccccttcagttgtggcctttacagcagatggtgagcgacttgttggaatgccggccaagcgacaggctgtcaccaacccaaacaatacattttatgctaccaagcgtctcattggccggcgatatgatgatcctgaagtacagaaagacatgtgagtaacagcaaaagttttttgcaaaaagcagttatttgcaagggccacacagaagagcctcagcatgttgatgaggatccctggagcaccttactttagtaattttacttattgtccctaggggaaatctgtaccactgccaaaagggtaatcccttt

SEQ ID NO: 9609 - DNA, 551 bp, Homo sapiens
  source 1..551: mol_type = unassigned DNA; mol_type = unassigned DNA
atttcaaaattaccaggtagtggtcctcatggcctgttctgtggctgaatggaaaggtttggccttgggggtgagggatgcagtctattgggaaagccactattttcagttttatttttggctcctctacagaatacagagtgtgtaaggatcccgttgatacggtgaaataaaataagaaagctctgagtcggaactccagttttcgtgcttagcaacattttctcaaaatctgtggtgatagctggaatggccttagtcatgaggcttttagacttgtttcaaggcgggattatgcatcagaagcaatcaagggagcagttgttggtattgatttgggtactaccaactcctgcgtggcagttatggaaggtaaacaagcaaaggtgctggagaatgccgaaggtgccagaaccaccccttcagttgtggcctttacagcagatggtgagcgacttgttggaatgccggccaagcgacaggctgtcaccaacccaaacaatacattttatgctaccaagcgtctcattggccggcgatatgatgatcct

SEQ ID NO: 9610 - DNA, 909 bp, Homo sapiens
  source 1..909: mol_type = unassigned DNA; mol_type = unassigned DNA
gctgggggaggagtgcatggggaggggcggccctcaaacgggtcattgccattaatagagacctcaaacaccgcctgctaaaaatacccgactggaggagcataaaagcgcagccgagcccagcgccccgcacttttctgagcagacgtccagagcagagtcagccagcatgaccgagcgccgcgtccccttctcgctcctgcggggccccagctgggaccccttccgcgactggtacccgcatagccgcctcttcgaccaggccttcgggctgccccggctgccggaggagtggtcgcagtggttaggcggcagcagctggccaggctacgtgcgccccctgccccccgccgccatcgagagccccgcagtggccgcgcccgcctacagccgcgcgctcagccggcaactcagcagcggggtctcggagatccggcacactgcggaccgctggcgcgtgtccctggatgtcaaccacttcgccccggacgagctgacggtcaagaccaaggatggcgtggtggagatcaccggcaagcacgaggagcggcaggacgagcatggctacatctcccggtgcttcacgcggaaatacacgctgccccccggtgtggaccccacccaagtttcctcctccctgtcccctgagggcacactgaccgtggaggcccccatgcccaagctagccacgcagtccaacgagatcaccatcccagtcaccttcgagtcgcgggcccagcttgggggcccagaagctgcaaaatccgatgagactgccgccaagtaaagccttagcccggatgcccacccctgctgccgccactggctgtgcctcccccgccacctgtgtgttcttttgatacatttatcttctgtttttctcaaataaagttcaaagcaaccacctgt

SEQ ID NO: 9611 - DNA, 1455 bp, Homo sapiens
  source 1..1455: mol_type = unassigned DNA; mol_type = unassigned DNA
gacgtccagagcagagtcagccagcatgaccgagcgccgcgtccccttctcgctcctgcggggccccagctgggaccccttccgcgactggtacccgcatagccgcctcttcgaccaggccttcgggctgccccggctgccggaggagtggtcgcagtggttaggcggcagcagctggccaggctacgtgcgccccctgccccccgccgccatcgagagccccgcagtggccgcgcccgcctacagccgcgcgctcagccggcaactcagcagcggggtctcggagatccggcacactgcggaccgctggcgcgtgtccctggatgtcaaccacttcgccccggacgagctgacggtcaagaccaaggatggcgtggtggagatcaccggtgagcccccctgctcctgcaggggagaggaggaggctagcagggcgggcagggccgggggcgtgcggttgaaacgggggtcccgggggcctggggagttaaacgttggcccagcaccgggaaaaacaggactcctgattcccttgctcaggaattgggagtgcgggtcgcttctaagggcgctttctgctctgtaatcccagcgctttgggaggccgagacgggaggatcgcttgaggccaggagttcaagactagcctgggcaacatagcgagacgcgcccccccgccccgaccccgcgccattacaaaaaaaaagcaaacaaaaatttttttaaagatcatcgatgaagagagaaaatgcgcttttctacagagtccccttcccacccacagccccatccccagataagcggggagttccctggcgcggtgccagtttctagccgctgagtgggcgtgtgcgcggctccaagtgcgcctgcgtactgctcactccccagctccgcgccctgctccgttcctcccaaaactctgaatcgaagaactttccggaagtttctgagagcccagaccggcgggcacgcccccatccccaaccccctctgttaatccctaccagcctgcagtcctggctgcttccaagcaggaggtggggcctctggcctagcggggccgaaaggcagtcccctcccccgcagtctgatttccctcttccccccaaaggcaagcacgaggagcggcaggacgagcatggctacatctcccggtgcttcacgcggaaatacacgctgccccccggtgtggaccccacccaagtttcctcctccctgtcccctgagggcacactgaccgtggaggcccccatgcccaagctagccacgcagtccaacgagatcaccatcccagtcaccttcgagtcgcgggcccagcttgggggcccagaagctgcaaaatccgatgagactgccgccaagtaaagccttagcccggatgcccacccctgctgccgccactggctgtgcctcccccgccacctgtgtgttcttttgatacatttatcttct

SEQ ID NO: 9612 - DNA, 527 bp, Homo sapiens
  source 1..527: mol_type = unassigned DNA; mol_type = unassigned DNA
agctccgcgccctgctccgttcctcccaaaactctgaatcgaagaactttccggaagtttctgagagcccagaccggcgggcacgcccccatccccaaccccctctgttaatccctaccagcctgcagtcctggctgcttccaagcaggaggcaagcacgaggagcggcaggacgagcatggctacatctcccggtgcttcacgcggaaatacacgctgccccccggtgtggaccccacccaagtttcctcctccctgtcccctgagggcacactgaccgtggaggcccccatgcccaagctagccacgcagtccaacgagatcaccatcccagtcaccttcgagtcgcgggcccagcttgggggcccagaagctgcaaaatccgatgagactgccgccaagtaaagccttagcccggatgcccacccctgctgccgccactggctgtgcctcccccgccacctgtgtgttcttttgatacatttatcttctgtttttctcaaataaagttcaaagcaaccacctgt

SEQ ID NO: 9613 - DNA, 2455 bp, Homo sapiens
  source 1..2455: mol_type = unassigned DNA; mol_type = unassigned DNA
agactaagccggccggagagggctgagcgcgctagcacaccctgcgcgggtagggaggggcggggctcgcgcgcagggtgtgcagattgcagggcccgggctgacgggaagtgggtgggagctgcctgcacacgcggtgccgcggggcgggagtagaggcggagggaggggacacgggctcattgcggtgtgcgccctgcactctgtccctcactcgccgccgacgacctgtctcgccgagcgcacgccttgccgccgccccgcagaaatgcttcggttacccacagtctttcgccagatgagaccggtgtccagggtactggctcctcatctcactcgggcttatgccaaagatgtaaaatttggtgcagatgcccgagccttaatgcttcaaggtgtagaccttttagccgatgctgtggccgttacaatggggccaaagggaagaacagtgattattgagcagagttggggaagtcccaaagtaacaaaagatggtgtgactgttgcaaagtcaattgacttaaaagataaatacaaaaacattggagctaaacttgttcaagatgttgccaataacacaaatgaagaagctggggatggcactaccactgctactgtactggcacgctctatagccaaggaaggcttcgagaagattagcaaaggtgctaatccagtggaaatcaggagaggtgtgatgttagctgttgatgctgtaattgctgaacttaaaaagcagtctaaacctgtgaccacccctgaagaaattgcacaggttgctacgatttctgcaaacggagacaaagaaattggcaatatcatctctgatgcaatgaaaaaagttggaagaaagggtgtcatcacagtaaaggatggaaaaacactgaatgatgaattagaaattattgaaggcatgaagtttgatcgaggctatatttctccatactttattaatacatcaaaaggtcagaaatgtgaattccaggatgcctatgttctgttgagtgaaaagaaaatttctagtatccagtccattgtacctgctcttgaaattgccaatgctcaccgtaagcctttggtcataatcgctgaagatgttgatggagaagctctaagtacactcgtcttgaataggctaaaggttggtcttcaggttgtggcagtcaaggctccagggtttggtgacaatagaaagaaccagcttaaagatatggctattgctactggtggtgcagtgtttggagaagagggattgaccctgaatcttgaagacgttcagcctcatgacttaggaaaagttggagaggtcattgtgaccaaagacgatgccatgctcttaaaaggaaaaggtgacaaggctcaaattgaaaaacgtattcaagaaatcattgagcagttagatgtcacaactagtgaatatgaaaaggaaaaactgaatgaacggcttgcaaaactttcagatggagtggctgtgctgaaggttggtgggacaagtgatgttgaagtgaatgaaaagaaagacagagttacagatgcccttaatgctacaagagctgctgttgaagaaggcattgttttgggagggggttgtgccctccttcgatgcattccagccttggactcattgactccagctaatgaagatcaaaaaattggtatagaaattattaaaagaacactcaaaattccagcaatgaccattgctaagaatgcaggtgttgaaggatctttgatagttgagaaaattatgcaaagttcctcagaagttggttatgatgctatggctggagattttgtgaatatggtggaaaaaggaatcattgacccaacaaaggttgtgagaactgctttattggatgctgctggtgtggcctctctgttaactacagcagaagttgtagtcacagaaattcctaaagaagagaaggaccctggaatgggtgcaatgggtggaatgggaggtggtatgggaggtggcatgttctaactcctagactagtgctttacctttattaatgaactgtgacaggaagcccaaggcagtgttcctcaccaataacttcagagaagtcagttggagaaaatgaagaaaaaggctggctgaaaatcactataaccatcagttactggtttcagttgacaaaatatataatggtttactgctgtcattgtccatgcctacagataatttattttgtatttttgaataaaaaacatttgtacattcctgatactgggtacaagagccatgtaccagtgtactgctttcaacttaaatcactgaggcatttttactactattctgttaaaatcaggattttagtgcttgccaccaccagatgagaagttaagcagcctttctgtggagagtgagaataattgtgtacaaagtagagaagtatccaattatgtgacaacctttgtgtaataaaaatttgtttaaagttaataa

SEQ ID NO: 9614 - DNA, 860 bp, Homo sapiens
  source 1..860: mol_type = unassigned DNA; mol_type = unassigned DNA
aggcctgagtcaccacgcccggccaggccaacagtttattaagaaggtaaacggatatggacaagtataattaatagaaaatagcctaaactgtctcagatacttcctgtcttaatttgatcaaaaattgctaggaagcaaaaaaaaaacaaaaaaacacaaaaaccaaaccagattacttagggagtcctaagtaatctagtaacagcttgaggggaattaaacagataggcatttttatttcatttaaatcttactatcaactattcttaacaggctaaaggttggtcttcaggttgtggcagtcaaggctccagggtttggtgacaatagaaagaaccagcttaaagatatggctattgctactggtggtgcagtgtttggagaagagggattgaccctgaatcttgaagacgttcagcctcatgacttaggaaaagttggagaggtcattgtgaccaaagacgatgccatgctcttaaaaggaaaaggtgacaaggctcaaattgaaaaacgtattcaagaaatcattgagcagttagatgtcacaactagtgaatatgaaaaggaaaaactgaatgaacggcttgcaaaactttcagatggagtggctgtgctgaaggttggtgggacaagtgatgttgaagtgaatgaaaagaaagacagagttacagatgcccttaatgctacaagagctgctgttgaagaaggcattgttttgggagggggttgtgccctccttcgatgcattccagccttggactcattgactccagctaatgaagatcaaaaaattggtatagaaattattaaaagaacactcaaaattccagcaatgaccattgctaagaatgcaggtg

SEQ ID NO: 9615 - DNA, 491 bp, Homo sapiens
  source 1..491: mol_type = unassigned DNA; mol_type = unassigned DNA
gaattagcctttgctgcatgaaatgaatccatcctaacttaaatgattattcaaataagcacttttgggattttttgcagaagtgtaattggatgtcctgggctgtttcatactctaccctgcatctcttatggccagaggggtctgtttttattaatctggcctgtaattccatgttttgtgttcaatgaaatccatatacctaattctttgacttttcataggatggaaaaacactgaatgatgaattagaaattattgaaggcatgaagtttgatcgaggctatatttctccatactttattaatacatcaaaaggtcagaaatgtgaattccaggatgcctatgttctgttgagtgaaaagaaaatttctagtatccagtccattgtacctgctcttgaaattgccaatgctcaccgtaagcctttggtcataatcgctgaagatgttgatggagaagctctaagtacactcgtcttgaataggtaa

SEQ ID NO: 9616 - DNA, 754 bp, Homo sapiens
  source 1..754: mol_type = unassigned DNA; mol_type = unassigned DNA
cggaagaaaaaaggagctgtttctaggcttttctaggcgcccagccgagaaatgcttcggttacccacagtctttcgccagatgagaccggtgtccagggtactggctcctcatctcactcgggcttatgccaaagatgtaaaatttggtgcagatgcccgagccttaatgcttcaaggtgtagaccttttagccgatgctgtggccgttacaatggggccaaagggaagaacagtgattattgagcagagttggggaagtcccaaagtaacaaaagatggtgtgactgttgcaaagtcaattgacttaaaagataaatacaaaaacattggagctaaacttgttcaagatgttgccaataacacaaatgaagaagctggggatggcactaccactgctactgtactggcacgctctatagccaaggaaggcttcgagaagattagcaaaggtgctaatccagtggaaatcaggagaggtgtgatgttagctgttgatgctgtaattgctgaacttaaaaagcagtctaaacctgtgaccacccctgaagaaattgcacaggttgctacgatttctgcaaacggagacaaagaaattggcaatatcatctctgatgcaatgaaaaaagttggaagaaagggtgtcatcacagatggaaaaacactgaatgatgaattagaaattattgaaggcatgaagtttgatcgaggctatatttctccatactttattaatacatcaaaaggtaagaaca

SEQ ID NO: 9617 - DNA, 648 bp, Homo sapiens
  source 1..648: mol_type = unassigned DNA; mol_type = unassigned DNA
gacacaacttacgttgagactttgaagtagttgctttattatgaagactgctcatttttaaaaatgtaaatcatccttagggtatgtctgatcctgttacatttttttcttctagggaagaacagtgattattgagcagagttggggaagtcccaaagtaacaaaagatggtgtgactgttgcaaagtcaattgacttaaaagataaatacaaaaacattggagctaaacttgttcaagatgttgccaataacacaaatgaagaagctggggatggcactaccactgctactgtactggcacgctctatagccaaggaaggcttcgagaagattagcaaaggtgctaatccagtggaaatcaggagaggtgtgatgttagctgttgatgctgtaattgctgaacttaaaaagcagtctaaacctgtgaccacccctgaagaaattgcacaggttgctacgatttctgcaaacggagacaaagaaattggcaatatcatctctgatgcaatgaaaaaagttggaagaaagggtgtcatcacagtaaaggatggaaaaacactgaatgatgaattagaaattattgaaggcatgaagtttgatcgaggctatatttctccatactttattaatacatcaaaaggtaagaa

SEQ ID NO: 9618 - DNA, 888 bp, Homo sapiens
  source 1..888: mol_type = unassigned DNA; mol_type = unassigned DNA
gaagactcggaggcggaagaaaaaaggagctgtttctaggcttttctaggcgcccagccgaggtgaaagaactaccccttcgtcccctcccggaaatgacgcgatttgacccttgagccgtagggagcgcggcattttctggaaagttctggaaccgagcgaggcccgggaactagactaagccggccggagagggctgagcgcgctagcacaccctgcgcggaaatgcttcggttacccacagtctttcgccagatgagaccggtgtccagggtactggctcctcatctcactcgggcttatgccaaagatgtaaaatttggtgcagatgcccgagccttaatgcttcaaggtgtagaccttttagccgatgctgtggccgttacaatggggccaaagggaagaacagtgattattgagcagagttggggaagtcccaaagtaacaaaagatggtgtgactgttgcaaagtcaattgacttaaaagataaatacaaaaacattggagctaaacttgttcaagatgttgccaataacacaaatgaagaagctggggatggcactaccactgctactgtactggcacgctctatagccaaggaaggcttcgagaagattagcaaaggtgctaatccagtggaaatcaggagaggtgtgatgttagctgttgatgctgtaattgctgaacttaaaaagcagtctaaacctgtgaccacccctgaagaaattgcacaggttgctacgatttctgcaaacggagacaaagaaattggcaatatcatctctgatgcaatgaaaaaagttggaagaaagggtgtcatcacagtaaaggatggaaaaacactgaatgatgaattagaaattattgaaggcatgaagtttgatcga

SEQ ID NO: 9619 - DNA, 619 bp, Homo sapiens
  source 1..619: mol_type = unassigned DNA; mol_type = unassigned DNA
gacctgtctcgccgagcgcacgccttgccgccgccccgcagaaatgcttcggttacccacagtctttcgccagatgagaccggtgtccagggtactggctcctcatctcactcgggcttatgccaaagatgtaaaatttggtgcagatgcccgagccttaatgcttcaagggaagaacagtgattattgagcagagttggggaagtcccaaagtaacaaaagatggtgtgactgttgcaaagtcaattgacttaaaagataaatacaaaaacattggagctaaacttgttcaagatgttgccaataacacaaatgaagaagctggggatggcactaccactgctactgtactggcacgctctatagccaaggaaggcttcgagaagattagcaaaggtgctaatccagtggaaatcaggagaggtgtgatgttagctgttgatgctgtaattgctgaacttaaaaagcagtctaaacctgtgaccacccctgaagaaattgcacaggttgctacgatttctgcaaacggagacaaagaaattggcaatatcatctctgatgcaatgaaaaaagttggaagaaagggtgtcatcacagtaaaggcaagtgtgtttgtatt

SEQ ID NO: 9620 - DNA, 853 bp, Homo sapiens
  source 1..853: mol_type = unassigned DNA; mol_type = unassigned DNA
gggacacgggctcattgcggtgtgcgccctgcactctgtccctcactcgccgccgacgacctgtctcgccgagcgcacgccttgccgccgccccgcagaaatgcttcggttacccacagtctttcgccagatgagaccggtgtccagggtactggctcctcatctcactcgggcttatgccaaagatgtaaaatttggtgcagatgcccgagccttaatgcttcaaggtgtagaccttttagccgatgctgtggccgttacaatggggccaaagggaagaacagtgattattgagcagagttggggaagtcccaaagtaacaaaagatggtgtgactgttgcaaagtcaattgacttaaaagataaatacaaaaacattggagctaaacttgttcaagatgttgccaataacacaaatgaagaagctggggatggcactaccactgctactgtactggcacgctctatagccaaggaaggcttcgagaagattagcaaaggtgctaatccagtggaaatcaggagaggtgtgatgttagctgttgatgctgtaattgctgaacttaaaaagcagtctaaacctgtgaccacccctgaagaaattgcacaggtaaggacttaacatgttacacgttttttaaaaaaaatttaatggcatgtgtgattttttttttcccttgatcacaccaatgtcagaataacaatactacccaatcatcaatattagaatcattgtttcttactgctaaaacctttgaaaagaattatgaccataatggttgtcatttagttctacatgtggttgtcattttagttctacatggctgtaaaatggattcatatgattgtgaaa

SEQ ID NO: 9621 - DNA, 714 bp, Homo sapiens
  source 1..714: mol_type = unassigned DNA; mol_type = unassigned DNA
gtctcgccgagcgcacgccttgccgccgccccgcagaaatgcttcggttacccacagtctttcgccagatgagaccggtgtccagggtactggctcctcatctcactcgggcttatgccaaagatgtaaaatttggtgcagatgcccgagccttaatgcttcaaggtgtagaccttttagccgatgctgtggccgttacaatggggccaaagggaagaacagtgattattgagcagagttggggaagtcccaaagtaacaaaagatggtgtgactgttgcaaagtcaattgacttaaaagataaatacaaaaacattggagctaaacttgttcaagatgttgccaataacacaaatgaagaagctggggatggcactaccactgctactgtactggcacgctctatagccaaggaaggcttcgagaagattagcaaaggtgctaatccagtggaaatcaggagaggtaggaatgtctgttgtcaccacagtgttctaaacttcagtgtgctttaaggcattgattccttggacctaaggaaagtgttaacttgaggaaattaatccttctctcattcctcctcttggcctggagaaatcttaaactgggttttcctttagcaagcttggctgtatggtgggtaggtactgttaggtaattttgatattttacttagttggtttcttttgtttttagagacagggtcttgctctg

SEQ ID NO: 9622 - DNA, 529 bp, Homo sapiens
  source 1..529: mol_type = unassigned DNA; mol_type = unassigned DNA
agtgatgaaaacttgctggaccagagaacagctccagggaaagcggcagggagaggtggtcaaagggaaacaaggaggagaatatcggcacccggatccggctagacaagctggatggcaggaaacggaaatgcttcggttacccacagtctttcgccagatgagaccggtgtccagggtactggctcctcatctcactcgggcttatgccaaagatgtaaaatttggtgcagatgcccgagccttaatgcttcaaggtgtagaccttttagccgatgctgtggccgttacaatggggccaaagggaagaacagtgattattgagcagagttggggaagtcccaaagtaacaaaagatggtgtgactgttgcaaagtcaattgacttaaaagataaatacaaaaacattggagctaaacttgttcaagatgttgccaataacacaaatgaagaagctggggatggcactaccactgctactgtactggcacgctctatagccaaggaaggcttcgagaagattagcaaa

SEQ ID NO: 9623 - DNA, 549 bp, Homo sapiens
  source 1..549: mol_type = unassigned DNA; mol_type = unassigned DNA
attgcggtgtgcgccctgcactctgtccctcactcgccgccgacgacctgtctcgccgagcgcacgccttgccgccgccccgcaggcagctgggataccgcgcctccagtcttgaccttgctgggggcgttcggaaagaaggacacgtgggctcgcgccgagtgggccgggccgccgcccccagcatcgcggccttgctggttgctctgatacagtagccttgggtggatccatggagacactttgctgagcggctttttgcaccaaatgcttcggttacccacagtctttcgccagatgagaccggtgtccagggtactggctcctcatctcactcgggcttatgccaaagatgtaaaatttggtgcagatgcccgagccttaatgcttcaaggtgtagaccttttagccgatgctgtggccgttacaatggggccaaagggaagaacagtgattattgagcagagttggggaagtcccaaagtaacaaaagatggtgtgactgttgcaaagtcaattgacttaaaagataaatacaaaaacattgga

SEQ ID NO: 9624 - DNA, 578 bp, Homo sapiens
  source 1..578: mol_type = unassigned DNA; mol_type = unassigned DNA
actcgccgccgacgacctgtctcgccgagcgcacgccttgccgccgccccgcaggcagctgggataccgcgcctccagtcttgaccttgctgggggcgttcggaaagaaggacacgtgggctcgcgccgagtgggccgggccgccgcccccagcatcgcggccttgctggttgctctgatacagtagccttgggtggatccatggagacactttgctgagcggctttttgcaccgtcaggaatacttttaacttccctggtcacttggatttgtaacttgcctctctccggctgacttggtttctcaggggccacagttggagtggaaatgcttcggttacccacagtctttcgccagatgagaccggtgtccagggtactggctcctcatctcactcgggcttatgccaaagatgtaaaatttggtgcagatgcccgagccttaatgcttcaaggtgtagaccttttagccgatgctgtggccgttacaatggggccaaagggaagaacagtgattattgagcagagttggggaagtcccaaagtaacaaaagatggtgtgactgttgcaaagtcaa

SEQ ID NO: 9625 - DNA, 533 bp, Homo sapiens
  source 1..533: mol_type = unassigned DNA; mol_type = unassigned DNA
ccctcactcgccgccgacgacctgtctcgccgagcgcacgccttgccgccgccccgcaggcagctgggataccgcgcctccagtcttgaccttgctgggggcgttcggaaagaaggacacgtgggctcgcgccgagtgggccgggccgccgcccccagcatcgcggccttgctggttgctctgatacagtagccttgggtggatccatggagacactttgctgagcggctttttgcaccgtcaggaatacttttaacttccctggtcacttggatttgtaacttgcctctctccggctgacttggtttctcaggggccacagttggagtgggtctgcccacaaggccgttttcgcgaaatgcttcggttacccacagtctttcgccagatgagaccggtgtccagggtactggctcctcatctcactcgggcttatgccaaagatgtaaaatttggtgcagatgcccgagccttaatgcttcaaggtgtagaccttttagccgatgctgtggccgttacaatggggccaaagg

SEQ ID NO: 9626 - DNA, 2299 bp, Homo sapiens
  source 1..2299: mol_type = unassigned DNA; mol_type = unassigned DNA
gccccgacgcgcaccgcgattcgccccaagggccctgcgcaggacgctgacgcgaagactcggaggcggaagaaaaaaggagctgtttctaggcttttctaggcgcccagccgagaaatgcttcggttacccacagtctttcgccagatgagaccggtgtccagggtactggctcctcatctcactcgggcttatgccaaagatgtaaaatttggtgcagatgcccgagccttaatgcttcaaggtgtagaccttttagccgatgctgtggccgttacaatggggccaaagggaagaacagtgattattgagcagagttggggaagtcccaaagtaacaaaagatggtgtgactgttgcaaagtcaattgacttaaaagataaatacaaaaacattggagctaaacttgttcaagatgttgccaataacacaaatgaagaagctggggatggcactaccactgctactgtactggcacgctctatagccaaggaaggcttcgagaagattagcaaaggtgctaatccagtggaaatcaggagaggtgtgatgttagctgttgatgctgtaattgctgaacttaaaaagcagtctaaacctgtgaccacccctgaagaaattgcacaggttgctacgatttctgcaaacggagacaaagaaattggcaatatcatctctgatgcaatgaaaaaagttggaagaaagggtgtcatcacagtaaaggatggaaaaacactgaatgatgaattagaaattattgaaggcatgaagtttgatcgaggctatatttctccatactttattaatacatcaaaaggtcagaaatgtgaattccaggatgcctatgttctgttgagtgaaaagaaaatttctagtatccagtccattgtacctgctcttgaaattgccaatgctcaccgtaagcctttggtcataatcgctgaagatgttgatggagaagctctaagtacactcgtcttgaataggctaaaggttggtcttcaggttgtggcagtcaaggctccagggtttggtgacaatagaaagaaccagcttaaagatatggctattgctactggtggtgcagtgtttggagaagagggattgaccctgaatcttgaagacgttcagcctcatgacttaggaaaagttggagaggtcattgtgaccaaagacgatgccatgctcttaaaaggaaaaggtgacaaggctcaaattgaaaaacgtattcaagaaatcattgagcagttagatgtcacaactagtgaatatgaaaaggaaaaactgaatgaacggcttgcaaaactttcagatggagtggctgtgctgaaggttggtgggacaagtgatgttgaagtgaatgaaaagaaagacagagttacagatgcccttaatgctacaagagctgctgttgaagaaggcattgttttgggagggggttgtgccctccttcgatgcattccagccttggactcattgactccagctaatgaagatcaaaaaattggtatagaaattattaaaagaacactcaaaattccagcaatgaccattgctaagaatgcaggtgttgaaggatctttgatagttgagaaaattatgcaaagttcctcagaagttggttatgatgctatggctggagattttgtgaatatggtggaaaaaggaatcattgacccaacaaaggttgtgagaactgctttattggatgctgctggtgtggcctctctgttaactacagcagaagttgtagtcacagaaattcctaaagaagagaaggaccctggaatgggtgcaatgggtggaatgggaggtggtatgggaggtggcatgttctaactcctagactagtgctttacctttattaatgaactgtgacaggaagcccaaggcagtgttcctcaccaataacttcagagaagtcagttggagaaaatgaagaaaaaggctggctgaaaatcactataaccatcagttactggtttcagttgacaaaatatataatggtttactgctgtcattgtccatgcctacagataatttattttgtatttttgaataaaaaacatttgtacattcctgatactgggtacaagagccatgtaccagtgtactgctttcaacttaaatcactgaggcatttttactactattctgttaaaatcaggattttagtgcttgccaccaccagatgagaagttaagcagcctttctgtggagagtgagaataattgtgtacaaagtagagaagtatccaattatgtgacaacctttgtgtaataaaaatttgtttaaagtt

SEQ ID NO: 9627 - DNA, 890 bp, Homo sapiens
  source 1..890: mol_type = unassigned DNA; mol_type = unassigned DNA
tacgagtctgaggcggagggagtaatggcaggacaagcgtttagaaagtttcttccactctttgaccgagtattggttgaaaggagtgctgctgaaactgtaaccaaaggaggcattatgcttccagaaaaatctcaaggaaaagtattgcaagcaacagtagtcgctgttggatcgggttctaaaggaaaggatttctataattggcctgatgaatcctttgatgaaatggacagtacactagctgttcaacagtatattcaacagaacataagagcagattgctccaatattgacaaaattcttgaaccacctgaaggccaagatgaaggtgtgtggaagtatgaacatttaaggcagttctgccttgagctaaatggacttgctgtcaaacttcagagtgaatgccatccagatacttgcactcaaatgacagcaactgaacaatggatttttctttgtgcagctcataaaactccaaaagagtgtcctgctatagactatactagacacacacttgatggtgctgcatgtcttctgaatagcaataaatattttcccagcagggttagcataaaggaatcatctgtagcgaaactaggatcagtatgccgtaggatttacagaatattttcacatgcttattttcatcatcggcagatatttgatgaatatgaaaatgaaacatttttgtgtcatcggtttactaagtttgtgatgaaatacaatttgatgtccaaggataacctgattgtaccaattttagaagaggaagtacagaattcagtttctggggaaagtgaagcatgaagggaatcataggaaaaatgtactgatcatataattaacattatgtactgtatatatcattttagacacatcaatcatgt

SEQ ID NO: 9628 - DNA, 5191 bp, Homo sapiens
  source 1..5191: mol_type = unassigned DNA; mol_type = unassigned DNA
gaggaagtgggacctccccttttgggtcggtagttcagcgccggcgccggtgtgcgagccgcggcagagtgaggcaggcaacccgaggtgcggagcgacctgcggaggctgagccccgctttctcccagggtttcttatcagccagccgccgctgtccccgggggagtaggaggctcctgacaggccgcggctgtctgtgtgtccttctgagtgtcagaggaacggccagaccccgcgggccggagcagaacgcggccagggcagaaagcggcggcaggagaagcaggcagggggccggaggacgcagaccgagacccgaggcggaggcggaccgcgagccggccatgtcggtggtggggttggacgtgggctcgcagagctgctacatcgcggtagcccgggccgggggcatcgagaccatcgccaatgagttcagcgaccggtgcaccccgtcagtcatatcatttggatcaaaaaatagaacaatcggagttgcagccaaaaatcagcaaatcactcatgcaaacaatacggtgtctaacttcaaaagatttcatggccgagcattcaatgaccccttcattcaaaaggagaaggaaaacttgagttacgatttggttccattgaaaaatggtggagttggaataaaggtaatgtacatgggtgaagaacatctatttagtgtggagcagataacagccatgttgttgactaagctgaaggaaactgctgaaaacagcctcaagaaaccagtaacagattgtgttatttcagtcccctccttctttacagatgctgagaggcgatctgtgttagatgctgcacagattgttggcctaaactgtttaagacttatgaatgacatgacagctgttgctttgaattacggaatttataagcaggatctcccaagcctggatgagaaacctcggatagtggtttttgttgatatgggacattcagcttttcaagtgtctgcttgtgcttttaacaagggaaaattgaaggtactgggaacagcttttgatcctttcttaggaggaaaaaacttcgatgaaaagttagtggaacatttttgtgcagaatttaaaactaagtacaagttggatgcaaaatccaaaatacgagcactcctacgtctgtatcaggaatgtgaaaaactgaaaaagctaatgagctctaacagcacagaccttccactgaatatcgaatgctttatgaatgataaagatgtttccggaaagatgaacaggtcacaatttgaagaactctgtgctgaacttctgcaaaagatagaagtacccctttattcactgttggaacaaactcatctcaaagtagaagatgtgagtgcagttgagattgttggaggcgctacacgaattccagctgtgaaggaaagaattgccaaattctttggaaaagatattagcacaacactcaatgcagatgaagcagtagccagaggatgtgcattacagtgtgcaatactttccccggcatttaaagttagagaattttccgtcacagatgcagttccttttccaatatctctgatctggaaccatgattcagaagatactgaaggtgttcatgaagtctttagtcgaaaccatgctgctcctttctccaaagttctcacctttctgagaagggggccttttgagctagaagctttctattctgatccccaaggagttccatatccagaagcaaaaataggccgctttgtagttcagaatgtttctgcacagaaagatggagaaaaatctagagtaaaagtcaaagtgcgagtcaacacccatggcattttcaccatctctacggcatctatggtggagaaagtcccaactgaggagaatgaaatgtcttctgaagctgacatggagtgtctgaatcagagaccaccagaaaacccagacactgataaaaatgtccagcaagacaacagtgaagctggaacacagccccaggtacaaactgatgctcaacaaacctcacagtctcccccttcacctgaacttacctcagaagaaaacaaaatcccagatgctgacaaagcaaatgaaaaaaaagttgaccagcctccagaagctaaaaagcccaaaataaaggtggtgaatgttgagctgcctattgaagccaacttggtctggcagttagggaaagaccttcttaacatgtatattgagacagagggtaagatgataatgcaagataaattggaaaaagaaaggaatgatgctaaaaatgcagttgaggaatatgtgtatgagttcagagacaagctgtgtggaccatatgaaaaatttatatgtgagcaggatcatcaaaattttttgagactcctcacagaaactgaagactggctgtatgaagaaggagaggaccaagctaaacaagcatatgttgacaagttggaagaattaatgaaaattggcactccagttaaagttcggtttcaggaagctgaagaacggccaaaaatgtttgaagaactaggacagaggctgcagcattatgccaagatagcagctgacttcagaaataaggatgagaaatacaaccatattgatgagtctgaaatgaaaaaagtggagaagtctgttaatgaagtgatggaatggatgaataatgtcatgaatgctcaggctaaaaagagtcttgatcaggatccagttgtacgtgctcaggaaattaaaacaaaaatcaaggaattgaacaacacatgtgaacccgttgtaacacaaccgaaaccaaaaattgaatcacccaaactggaaagaactccaaatggcccaaatattgataaaaaggaagaagatttagaagacaaaaacaattttggtgctgaacctccacatcagaatggtgaatgttaccctaatgagaaaaattctgttaatatggacttggactagataaccttaaattggcctattccttcaattaataaaatatttttgccatagtatgtgactctacataacatactgaaactatttatattttcttttttaaggatatttagaaattttgtgtattatatggaaaaagaaaaaaagcttaagtctgtagtctttatgatcctaaaagggaaaattgccttggtaactttcagattcctgtggaattgtgaattcatactaagctttctgtgcagtctcaccatttgcatcactgaggatgaaactgacttttgtcttttggagaaaaaaaactgtactgcttgttcaagagggctgtgattaaaatctttaagcatttgttcctgccaaggtagttttcttgcattttgctctccattcagcatgtgtgtgggtgtggatgtttataaacaagactaagtctgacttcataagggctttctaaaaccatttctgtccaagagaaaatgactttttgctttgatattaaaaattcaatgagtaaaacaaaagctagtcaaatgtgttagcagcatgcagaacaaaaactttaaactttctctctcactatacagtatattgtcatgtgaaagtgtggaatggaagaaatgtcgatcctgttgtaactgattgtgaacacttttatgagctttaaaataaagttcatcttatggtgtcatttctaaactgttgattttgtcactaatttaaaaaatgagatgagggagaatatgaattattctagcagaaatgaagttagtgtccagtttttcttttttactgcttatgttctctcttttctaagtgaaaatgtttttctcctgacagaaaaatagcatatgtttattacattaaagcattttaaaaatactataaagtgaataaaacttaaaatcttgccacccagaagaaaacattgttaacacttcgttatacatccttggagccttttacccctaatgatgggggtatatttgtgtgagtgtctatgttatagtgctgtaggctgtttttaaaaactctgtgccagggaaattagtaaatacagtcaagtgttgtaactgcataaatgtagtgagttcattataaagacgtacttaaaaataccaatcttgctattggtagatttaggtgtttctcatttttgctgttctaaataatgctgcaatgaatctatctggttgttttgtaagcacaaaattgaagtagtgttggaggtaggggagaagacacatgcacttaggataggtgacaaccagctcctcactagggtgcaacagtttattctttttttttttttggtagagctggggtttcgctatgttgcccaagttcgtcttgaactcctgggctcaagcaatctgtctgcctcagcctcccaaagtgctgggattacatggtgtgagccaccatgcccagccatttatgatcttgatgagggccaactttccctcttccacaagggattaatcttagaactatagccaatttattataagtactatttagctactctgtgctccacacatcacggagtaatatcttcaaactatgaggtttagtaacacttgactgctgaggtttatttcctcagctctgatgcttcctgggtgaagatgtaagttattaaattaactcaaattttaaagctaacacttcattccatctagaccaggtagctcgtcatttgtacgtctgataggtgcttcaacatctcagaattggcttatttttcatgcattgcatattgtactcatttgtaatattggaatgtaaaatgttcttactaagaatctttatgtcagctattcaacatttccctactttataatttctagctgctttaccatttagcaactttaaatttttatgcagttaatatgtttctttggtttttatgttttctgaatgtctttaatgcacattaatgtatacttagtagatacacatttacacattgagaagtgaagataggtttgtgttctgtgtacaattaggacatccattaaaaaagatttttaaaaactgtgaatgggaaaacatgtttttcctcctgtcctaaaatagaacctgatgacgggagggagcatcagtcagtctggcctaaatcagtgtactgcgcttttggatgcgggcaaaagtattgtcatgttgattactttataataacgtattaatatcattggctcaaacagttgtgatatatacctagtaatcatcgaggatctcaaagatatgcaccagtttgaataaatgctgttta

SEQ ID NO: 9629 - DNA, 812 bp, Homo sapiens
  source 1..812: mol_type = unassigned DNA; mol_type = unassigned DNA
gatgagaaatacaaccatattgatgagtctgaaatgaaaaaagtggagaagtctgttaatgaagtgatggaatggatgaataatgtcatgaatgctcaggctaaaaagagtcttgatcaggatccagttgtacgtgctcaggaaattaaaacaaaaatcaaggaattgaacaacacatgtgaacccgttgtaacacaaccgaaaccaaaaattgaatcacccaaactggaaagaactccaaatggcccaaatattgataaaaaggaagaagatttagaagacaaaaacaattttggtgctgaacctccacatcagaatgattcctgtggaattgtgaattcatactaagctttctgtgcagtctcaccatttgcatcactgaggatgaaactgacttttgtcttttggagaaaaaaaactgtactgcttgttcaagagggctgtgattaaaatctttaagcatttgttcctgccaaggtagttttcttgcattttgctctccattcagcatgtgtgtgggtgtggatgtttataaacaagactaagtctgacttcataagggctttctaaaaccatttctgtccaagagaaaatgactttttgctttgatattaaaaattcaatgagtaaaacaaaagctagtcaaatgtgttagcagcatgcagaacaaaaactttaaactttctctctcactatacagtatattgtcatgtgaaagtgtggaatggaagaaatgtcgatcctgttgtaactgattgtgaacacttttatgagctttaaaataaagttcatcttatggtgtcatttctaaa

SEQ ID NO: 9630 - DNA, 3570 bp, Homo sapiens
  source 1..3570: mol_type = unassigned DNA; mol_type = unassigned DNA
acacttctcccagcgggactacgattcccaacatgctctccggacagctggccggcctccccaccatcccggtgtctggggtctctgcaaaaatggggtctgtctccgcccgcccagcctccctttagcgttaaggatcggacaccacctcccggtagtaaattgtgactattccgagttttggagtcattcttcgttgcctgttttattagggcagcaaaacgcctgtggctagggcgggagtgggcggaggcaggtttgagccaatggcacgggagcggccctgtcgctgccatggcaacggcggccgttctccggggaccggctgcccattgggtagaatctttccagaaggctcgagaagaaggaagcggaagtggcacgtggaggggccggtggaggcgccggtcagtcatatcatttggatcaaaaaatagaacaatcggagttgcagccaaaaatcagcaaatcactcatgcaaacaatacggtgtctaacttcaaaagatttcatggccgagcattcaatgaccccttcattcaaaaggagaaggaaaacttgagttacgatttggttccattgaaaaatggtggagttggaataaaggtaatgtacatgggtgaagaacatctatttagtgtggagcagataacagccatgttgttgactaagctgaaggaaactgctgaaaacagcctcaagaaaccagtaacagattgtgttatttcagtcccctccttctttacagatgctgagaggcgatctgtgttagatgctgcacagattgttggcctaaactgtttaagacttatgaatgacatgacagctgttgctttgaattacggaatttataagcaggatctcccaagcctggatgagaaacctcggatagtggtttttgttgatatgggacattcagcttttcaagtgtctgcttgtgcttttaacaagggaaaattgaaggtactgggaacagcttttgatcctttcttaggaggaaaaaacttcgatgaaaagttagtggaacatttttgtgcagaatttaaaactaagtacaagttggatgcaaaatccaaaatacgagcactcctacgtctgtatcaggaatgtgaaaaactgaaaaagctaatgagctctaacagcacagaccttccactgaatatcgaatgctttatgaatgataaagatgtttccggaaagatgaacaggtcacaatttgaagaactctgtgctgaacttctgcaaaagatagaagtacccctttattcactgttggaacaaactcatctcaaagtagaagatgtgagtgcagttgagattgttggaggcgctacacgaattccagctgtgaaggaaagaattgccaaattctttggaaaagatattagcacaacactcaatgcagatgaagcagtagccagaggatgtgcattacagtgtgcaatactttccccggcatttaaagttagagaattttccgtcacagatgcagttccttttccaatatctctgatctggaaccatgattcagaagatactgaaggtgttcatgaagtctttagtcgaaaccatgctgctcctttctccaaagttctcacctttctgagaagggggccttttgagctagaagctttctattctgatccccaaggagttccatatccagaagcaaaaataggccgctttgtagttcagaatgtttctgcacagaaagatggagaaaaatctagagtaaaagtcaaagtgcgagtcaacacccatggcattttcaccatctctacggcatctatggtggagaaagtcccaactgaggagaatgaaatgtcttctgaagctgacatggagtgtctgaatcagagaccaccagaaaacccagacactgataaaaatgtccagcaagacaacagtgaagctggaacacagccccaggtacaaactgatgctcaacaaacctcacagtctcccccttcacctgaacttacctcagaagaaaacaaaatcccagatgctgacaaagcaaatgaaaaaaaagttgaccagcctccagaagctaaaaagcccaaaataaaggtggtgaatgttgagctgcctattgaagccaacttggtctggcagttagggaaagaccttcttaacatgtatattgagacagagggtaagatgataatgcaagataaattggaaaaagaaaggaatgatgctaaaaatgcagttgaggaatatgtgtatgagttcagagacaagctgtgtggaccatatgaaaaatttatatgtgagcaggatcatcaaaattttttgagactcctcacagaaactgaagactggctgtatgaagaaggagaggaccaagctaaacaagcatatgttgacaagttggaagaattaatgaaaattggcactccagttaaagttcggtttcaggaagctgaagaacggccaaaaatgtttgaagaactaggacagaggctgcagcattatgccaagatagcagctgacttcagaaataaggatgagaaatacaaccatattgatgagtctgaaatgaaaaaagtggagaagtctgttaatgaagtgatggaatggatgaataatgtcatgaatgctcaggctaaaaagagtcttgatcaggatccagttgtacgtgctcaggaaattaaaacaaaaatcaaggaattgaacaacacatgtgaacccgttgtaacacaaccgaaaccaaaaattgaatcacccaaactggaaagaactccaaatggcccaaatattgataaaaaggaagaagatttagaagacaaaaacaattttggtgctgaacctccacatcagaatggtgaatgttaccctaatgagaaaaattctgttaatatggacttggactagataaccttaaattggcctattccttcaattaataaaatatttttgccatagtatgtgactctacataacatactgaaactatttatattttcttttttaaggatatttagaaattttgtgtattatatggaaaaagaaaaaaagcttaagtctgtagtctttatgatcctaaaagggaaaattgccttggtaactttcagattcctgtggaattgtgaattcatactaagctttctgtgcagtctcaccatttgcatcactgaggatgaaactgacttttgtcttttggagaaaaaaaactgtactgcttgttcaagagggctgtgattaaaatctttaagcatttgttcctgccaaggtagttttcttgcattttgctctccattcagcatgtgtgtgggtgtggatgtttataaacaagactaagtctgacttcataagggctttctaaaaccatttctgtccaagagaaaatgactttttgctttgatattaaaaattcaatgagtaaaacaaaagctagtcaaatgtgttagcagcatgcagaacaaaaactttaaactttctctctcactatacagtatattgtcatgtgaaagtgtggaatggaagaaatgtcgatcctgttgtaactgattgtgaacacttttatgagctttaaaataaagttcatcttatggtgtcatttctaaa

SEQ ID NO: 9631 - DNA, 3480 bp, Homo sapiens
  source 1..3480: mol_type = unassigned DNA; mol_type = unassigned DNA
gaggaagtgggacctccccttttgggtcggtagttcagcgccggcgccggtgtgcgagccgcggcagagtgaggcaggcaacccgaggtgcggagcgacctgcggaggctgagccccgctttctcccagggtttcttatcagccagccgccgctgtccccgggggagtaggaggctcctgacaggccgcggctgtctgtgtgtccttctgagtgtcagaggaacggccagaccccgcgggccggagcagaacgcggccagggcagaaagcggcggcaggagaagcaggcagggggccggaggacgcagaccgagacccgaggcggaggcggaccgcgagccggccatgtcggtggtggggttggacgtgggctcgcagagctgctacatcgcggtagcccgggccgggggcatcgagaccatcgccaatgagttcagcgaccggtgcaccccgtcagtcatatcatttggatcaaaaaatagaacaatcggagttgcagccaaaaatcagcaaatcactcatgcaaacaatacggtgtctaacttcaaaagatttcatggccgagcattcaatgaccccttcattcaaaaggagaaggaaaacttgagttacgatttggttccattgaaaaatggtggagttggaataaaggtaatgtacatgggtgaagaacatctatttagtgtggagcagataacagccatgttgttgactaagctgaaggaaactgctgaaaacagcctcaagaaaccagtaacagattgtgttatttcagtcccctccttctttacagatgctgagaggcgatctgtgttagatgctgcacagattgttggcctaaactgtttaagacttatgaatgacatgacagctgttgctttgaattacggaatttataagcaggatctcccaagcctggatgagaaacctcggatagtggtttttgttgatatgggacattcagcttttcaagtgtctgcttgtgcttttaacaagggaaaattgaaggtactgggaacagcttttgatcctttcttaggaggaaaaaacttcgatgaaaagttagtggaacatttttgtgcagaatttaaaactaagtacaagttggatgcaaaatccaaaatacgagcactcctacgtctgtatcaggaatgtgaaaaactgaaaaagctaatgagctctaacagcacagaccttccactgaatatcgaatgctttatgaatgataaagatgtttccggaaagatgaacaggtcacaatttgaagaactctgtgctgaacttctgcaaaagatagaagtacccctttattcactgttggaacaaactcatctcaaagtagaagatgtgagtgcagttgagattgttggaggcgctacacgaattccagctgtgaaggaaagaattgccaaattctttggaaaagatattagcacaacactcaatgcagatgaagcagtagccagaggatgtgcattacagtgtgcaatactttccccggcatttaaagttagagaattttccgtcacagatgcagttccttttccaatatctctgatctggaaccatgattcagaagatactgaaggtgttcatgaagtctttagtcgaaaccatgctgctcctttctccaaagttctcacctttctgagaagggggccttttgagctagaagctttctattctgatccccaaggagttccatatccagaagcaaaaataggccgctttgtagttcagaatgtttctgcacagaaagatggagaaaaatctagagtaaaagtcaaagtgcgagtcaacacccatggcattttcaccatctctacggcatctatggtggagaaagtcccaactgaggagaatgaaatgtcttctgaagctgacatggagtgtctgaatcagagaccaccagaaaacccagacactgatgcaaatgaaaaaaaagttgaccagcctccagaagctaaaaagcccaaaataaaggtggtgaatgttgagctgcctattgaagccaacttggtctggcagttagggaaagaccttcttaacatgtatattgagacagagggtaagatgataatgcaagataaattggaaaaagaaaggaatgatgctaaaaatgcagttgaggaatatgtgtatgagttcagagacaagctgtgtggaccatatgaaaaatttatatgtgagcaggatcatcaaaattttttgagactcctcacagaaactgaagactggctgtatgaagaaggagaggaccaagctaaacaagcatatgttgacaagttggaagaattaatgaaaattggcactccagttaaagttcggtttcaggaagctgaagaacggccaaaaatgtttgaagaactaggacagaggctgcagcattatgccaagatagcagctgacttcagaaataaggatgagaaatacaaccatattgatgagtctgaaatgaaaaaagtggagaagtctgttaatgaagtgatggaatggatgaataatgtcatgaatgctcaggctaaaaagagtcttgatcaggatccagttgtacgtgctcaggaaattaaaacaaaaatcaaggaattgaacaacacatgtgaacccgttgtaacacaaccgaaaccaaaaattgaatcacccaaactggaaagaactccaaatggcccaaatattgataaaaaggaagaagatttagaagacaaaaacaattttggtgctgaacctccacatcagaatggtgaatgttaccctaatgagaaaaattctgttaatatggacttggactagataaccttaaattggcctattccttcaattaataaaatatttttgccatagtatgtgactctacataacatactgaaactatttatattttcttttttaaggatatttagaaattttgtgtattatatggaaaaagaaaaaaagcttaagtctgtagtctttatgatcctaaaagggaaaattgccttggtaactttcagattcctgtggaattgtgaattcatactaagctttctgtgcagtctcaccatttgcatcactgaggatgaaactgacttttgtcttttggagaaaaaaaactgtactgcttgttcaagagggctgtgattaaaatctttaagcatttgttcctgccaaggtagttttcttgcattttgctctccattcagcatgtgtgtgggtgtggatgtttataaacaagactaagtctgacttcataagggctttctaaaaccatttctgtccaagagaaaatgactttttgctttgatattaaaaattcaatgagtaaaacaaaagctagtcaaatgtgttagcagcatgcagaacaaaaactttaaactttctctctcactatacagtatattgtcatgtgaaagtgtggaatggaagaaatgtcgatcctgttgtaactgattgtgaacacttttatgagctttaaaataaagttcatcttatggtgtcatttct

SEQ ID NO: 9632 - DNA, 3488 bp, Homo sapiens
  source 1..3488: mol_type = unassigned DNA; mol_type = unassigned DNA
gaggaagtgggacctccccttttgggtcggtagttcagcgccggcgccggtgtgcgagccgcggcagagtgaggcaggcaacccgaggtgcggagcgacctgcggaggctgagccccgctttctcccagggtttcttatcagccagccgccgctgtccccgggggagtaggaggctcctgacaggccgcggctgtctgtgtgtccttctgagtgtcagaggaacggccagaccccgcgggccggagcagaacgcggccagggcagaaagcggcggcaggagaagcaggcagggggccggaggacgcagaccgagacccgaggcggaggcggaccgcgagccggccatgtcggtggtggggttggacgtgggctcgcagagctgctacatcgcggtagcccgggccgggggcatcgagaccatcgccaatgagttcagcgaccggtgcaccccgtcagtcatatcatttggatcaaaaaatagaacaatcggagttgcagccaaaaatcagcaaatcactcatgcaaacaatacggtgtctaacttcaaaagatttcatggccgagcattcaatgaccccttcattcaaaaggagaaggaaaacttgagttacgatttggttccattgaaaaatggtggagttggaataaagtcccctccttctttacagatgctgagaggcgatctgtgttagatgctgcacagattgttggcctaaactgtttaagacttatgaatgacatgacagctgttgctttgaattacggaatttataagcaggatctcccaagcctggatgagaaacctcggatagtggtttttgttgatatgggacattcagcttttcaagtgtctgcttgtgcttttaacaagggaaaattgaaggtactgggaacagcttttgatcctttcttaggaggaaaaaacttcgatgaaaagttagtggaacatttttgtgcagaatttaaaactaagtacaagttggatgcaaaatccaaaatacgagcactcctacgtctgtatcaggaatgtgaaaaactgaaaaagctaatgagctctaacagcacagaccttccactgaatatcgaatgctttatgaatgataaagatgtttccggaaagatgaacaggtcacaatttgaagaactctgtgctgaacttctgcaaaagatagaagtacccctttattcactgttggaacaaactcatctcaaagtagaagatgtgagtgcagttgagattgttggaggcgctacacgaattccagctgtgaaggaaagaattgccaaattctttggaaaagatattagcacaacactcaatgcagatgaagcagtagccagaggatgtgcattacagtgtgcaatactttccccggcatttaaagttagagaattttccgtcacagatgcagttccttttccaatatctctgatctggaaccatgattcagaagatactgaaggtgttcatgaagtctttagtcgaaaccatgctgctcctttctccaaagttctcacctttctgagaagggggccttttgagctagaagctttctattctgatccccaaggagttccatatccagaagcaaaaataggccgctttgtagttcagaatgtttctgcacagaaagatggagaaaaatctagagtaaaagtcaaagtgcgagtcaacacccatggcattttcaccatctctacggcatctatggtggagaaagtcccaactgaggagaatgaaatgtcttctgaagctgacatggagtgtctgaatcagagaccaccagaaaacccagacactgataaaaatgtccagcaagacaacagtgaagctggaacacagccccaggtacaaactgatgctcaacaaacctcacagtctcccccttcacctgaacttacctcagaagaaaacaaaatcccagatgctgacaaagcaaatgaaaaaaaagttgaccagcctccagaagctaaaaagcccaaaataaaggtggtgaatgttgagctgcctattgaagccaacttggtctggcagttagggaaagaccttcttaacatgtatattgagacagagggtaagatgataatgcaagataaattggaaaaagaaaggaatgatgctaaaaatgcagttgaggaatatgtgtatgagttcagagacaagctgtgtggaccatatgaaaaatttatatgtgagcaggatcatcaaaattttttgagactcctcacagaaactgaagactggctgtatgaagaaggagaggaccaagctaaacaagcatatgttgacaagttggaagaattaatgaaaattggcactccagttaaagttcggtttcaggaagctgaagaacggccaaaaatgtttgaagaactaggacagaggctgcagcattatgccaagatagcagctgacttcagaaataaggatgagaaatacaaccatattgatgagtctgaaatgaaaaaagtggagaagtctgttaatgaagtgatggaatggatgaataatgtcatgaatgctcaggctaaaaagagtcttgatcaggatccagttgtacgtgctcaggaaattaaaacaaaaatcaaggaattgaacaacacatgtgaacccgttgtaacacaaccgaaaccaaaaattgaatcacccaaactggaaagaactccaaatggcccaaatattgataaaaaggaagaagatttagaagacaaaaacaattttggtgctgaacctccacatcagaatggtgaatgttaccctaatgagaaaaattctgttaatatggacttggactagataaccttaaattggcctattccttcaattaataaaatatttttgccatagtatgtgactctacataacatactgaaactatttatattttcttttttaaggatatttagaaattttgtgtattatatggaaaaagaaaaaaagcttaagtctgtagtctttatgatcctaaaagggaaaattgccttggtaactttcagattcctgtggaattgtgaattcatactaagctttctgtgcagtctcaccatttgcatcactgaggatgaaactgacttttgtcttttggagaaaaaaaactgtactgcttgttcaagagggctgtgattaaaatctttaagcatttgttcctgccaaggtagttttcttgcattttgctctccattcagcatgtgtgtgggtgtggatgtttataaacaagactaagtctgacttcataagggctttctaaaaccatttctgtccaagagaaaatgactttttgctttgatattaaaaattcaatgagtaaaacaaaagctagtcaaatgtgttagcagcatgcagaacaaaaactttaaactttctctctcactatacagtatattgtcatgtgaaagtgtggaatggaagaaatgtcgatcctgttgtaactgattgtgaacacttttatgagctttaaaataaagttcatcttatggtgtcatttct

SEQ ID NO: 9633 - DNA, 4381 bp, Homo sapiens
  source 1..4381: mol_type = unassigned DNA; mol_type = unassigned DNA
agtttaaaaaatttttttttatctactgaactgtagataggtgatcatttatcaaatattgctttaagcctgtactatttgaatgtgttaggctaggtattgtggatatacagaggtgattacagcatctctttcttgagcttttggtagtttattatgattacagatgaacaaaaaatcagttaaggaaaaaaatcagtttttatgctgaaaagttttactcatatttctgttaggtttttggaaaactgttaaatattggtaaaaatatgtttttaggtatacatgtttagaaatacagttgtttaaagttcagaaaaaaactttttaaggttgatcagctatttagctcagatctaaaaattggtaggaactatagttgctgtagttgtatattaaattcttaatttttttggataagcggtgtcctagcaggttgtggttaaaatgtaagtattgcataatgagtctgatactgtctgtgatacgtggttatgtttcactgtattcacgccatatgttttgtctagcacatctccatatattgaaaagtgatagagcattgttctgaaatcagaaagagagtaataattaattccaagaaaatcagtgtgaagtcaggtataaaaggaatgtaatgtgttcacctttaattgtttcaagttaatagtcaagcttcctgcatgtgtaattttatgtaacagtgagattcctaagaaaatgtgaaccaaagaattgaaacatacttattttttgtagttgctttgaattacggaatttataagcaggatctcccaagcctggatgagaaacctcggatagtggtttttgttgatatgggacattcagcttttcaagtgtctgcttgtgcttttaacaagggaaaattgaaggtaaagtcatacattggaactcagtgtccaaaacacgttaagtgttgtgactttaagctactgagcctctttactaggctttttcttcttggtaatgaagagttttattttaggtaaagatgttaacaggaaacggttgctaaggttgagctccataaagatgatgtaattgtcttagcatactcttaagtgttcttgtttaggaaagaaaaggctttttacagttattttctatgtagtcatttaaaagtcaaaaatatcttagagatttattcctgactgatttggatttcatgttataatttaaatatagtcttgagtctcttagtctttcattgtttgagtagtaatatttaagattctagttacaaatgtgattgaaaataaccagactatttgttgtttcaaccaaattaggtactgggaacagcttttgatcctttcttaggaggaaaaaacttcgatgaaaagttagtggaacatttttgtgcagaatttaaaactaagtacaagttggatgcaaaatccaaaatacgagcactcctacgtctgtatcaggaatgtgaaaaactgaaaaagctaatgagctctaacagcacagaccttccactgaatatcgaatgctttatgaatgataaagatgtttccggaaagatgaacaggtcacaatttgaagaactctgtgctgaacttctgcaaaagatagaagtacccctttattcactgttggaacaaactcatctcaaagtagaagatgtgagtgcagttgagattgttggaggcgctacacgaattccagctgtgaaggaaagaattgccaaattctttggaaaagatattagcacaacactcaatgcagatgaagcagtagccagaggatgtgcattacagtgtgcaatactttccccggcatttaaagttagagaattttccgtcacagatgcagttccttttccaatatctctgatctggaaccatgattcagaagatactgaaggtgttcatgaagtctttagtcgaaaccatgctgctcctttctccaaagttctcacctttctgagaagggggccttttgagctagaagctttctattctgatccccaaggagttccatatccagaagcaaaaataggccgctttgtagttcagaatgtttctgcacagaaagatggagaaaaatctagagtaaaagtcaaagtgcgagtcaacacccatggcattttcaccatctctacggcatctatggtggagaaagtcccaactgaggagaatgaaatgtcttctgaagctgacatggagtgtctgaatcagagaccaccagaaaacccagacactgataaaaatgtccagcaagacaacagtgaagctggaacacagccccaggtacaaactgatgctcaacaaacctcacagtctcccccttcacctgaacttacctcagaagaaaacaaaatcccagatgctgacaaagcaaatgaaaaaaaagttgaccagcctccagaagctaaaaagcccaaaataaaggtggtgaatgttgagctgcctattgaagccaacttggtctggcagttagggaaagaccttcttaacatgtatattgagacagaggtaagtacttcaattaaatatttttattttgaaatatgtttagtttcttggccctgatatctatatttctagtagataaatggccataattctttctcatcccaagttttatatagttttagggataggatgaagacaaaactaacgaattttgcagtttaattttttttaacaaaaaaatctttctgcttgatataacatgattggctgagttcttgtgaaaaaattggatggcaataaatcataacagagcacagtacagttggaatttcacggcacactaaatatttctattagaatacattgtatttttttagtagtctgaaattctagaataatatgtgaaataattgagatttggtttttccatactgaggtgggaacatcgtatttaggagtttatttaacaataaactgtagtccatttatttatctttgatttaaaaatgtggcagagtggtgtgactgttatacattggccagtattaatctgaatatggataaccatttgtatacaagaaaacaaaattacatttaagcagtagcttgattttttttttttttttttagcattaaatatgaagtctgtgtaatcggttacaatgttaaaaaaatcaaacttcagcctgagtatttagaaaatggaaatgtctgtttggtttgtaggaagagtttgacaaggtataagttggaactgtgttaacactaaaatttgttttgtatcattttttttaaaccccagagtctacatatttagaatttagcttgagttaactagaagactggaattaacctttcctgtttcctgacagggtaagatgataatgcaagataaattggaaaaagaaaggaatgatgctaaaaatgcagttgaggaatatgtgtatgagttcagagacaagctgtgtggaccatatgaaaaatttatatgtgagcaggatcatcaaaattttttgagactcctcacagaaactgaagactggctgtatgaagaaggagaggaccaagctaaacaagcatatgttgacaagttggaagaattaatgaaaattggcactccagttaaagttcggtttcaggaagctgaagaacggccaaaaatgtttgaagaactaggacagaggctgcagcattatgccaagatagcagctgacttcagaaataaggatgagaaatacaaccatattgatgagtctgaaatgaaaaaagtggagaagtctgttaatgaagtgatggaatggatgaataatgtcatgaatgctcaggctaaaaagagtcttgatcaggatccagttgtacgtgctcaggaaattaaaacaaaaatcaaggaattgaacaacacatgtgaacccgttgtaacacaaccgaaaccaaaaattgaatcacccaaactggaaagaactccaaatggcccaaatattgataaaaaggaagaagatttagaagacaaaaacaattttggtgctgaacctccacatcagaatggtgaatgttaccctaatgagaaaaattctgttaatatggacttggactagataaccttaaattggcctattccttcaattaataaaatatttttgccatagtatgtgactctacataacatactgaaactatttatattttcttttttaaggatatttagaaattttgtgtattatatggaaaaagaaaaaaagcttaagtctgtagtctttatgatcctaaaagggaaaattgccttggtaactttcagattcctgtggaattgtgaattcatactaagctttctgtgcagtctcaccatttgcatcactgaggatgaaactgacttttgtcttttggagaaaaaaaactgtactgcttgttcaagagggctgtgattaaaatctttaagcatt

SEQ ID NO: 9634 - DNA, 333 bp, Homo sapiens
  source 1..333: mol_type = unassigned DNA; mol_type = unassigned DNA
gagaatacctctttgttttgttgtgaaaaattctgaagtacgagtgccactaatattgtcatattttgtgttaaggatcatcaaaattttttgagactcctcacagaaactgaagactggctgtatgaagaaggagaggaccaagctaaacaagcatatgttgacaagttggaagaattaatgaaaattggcactccagttaaagttcggtttcaggaagctgaagaacggccaaaaatgtttgaagaactaggacagaggctgcagcattatgccaagatagcagctgacttcagaaataaggatgagaaatacaaccatattgatgagtct

SEQ ID NO: 9635 - DNA, 1034 bp, Homo sapiens
  source 1..1034: mol_type = unassigned DNA; mol_type = unassigned DNA
agaaggctcgagaagaaggaagcggaagtggcacgtggaggggccggtggaggcgccggtcagtcatatcatttggatcaaaaaatagaacaatcggagttgcagccaaaaatcagcaaatcactcatgcaaacaatacggtgtctaacttcaaaagatttcatggccgagcattcaatgaccccttcattcaaaaggagaaggaaaacttgagttacgatttggttccattgaaaaatggtggagttggaataaaggtaatgtacatgggtgaagaacatctatttagtgtggagcagataacagccatgttgttgactaagctgaaggaaactgctgaaaacagcctcaagaaaccagtaacagattgtgttatttcagtaagtataattcagcaaggcagtgtgttttatttcatttttgcgttctttgtattacttttaagtatgaaatgtgggaaagctgttctttagttactagagaccgtgttctactggactgtattaacatgtgttccagagcattacaaagtagatttgagtgatatttttagccagaagcggcaaaggttcttgactggaaatcaaaatctcttgtgagactttttgaaaatacagattttgactggttccatttgtgagtattctaatacagttagttgctgcactatcaggcttgtacatttaacacaggagcttttcacaggtgaaagaattctaccctccgttgagaaaccagtgtattaggagttttaaaacgtagcttaccagtagtgacaaaacctaaatttttaacactagcaagcctgttaccttcagtggacaattactagttagactatcaaagggtacttgaaatggacaaaagtcatcttttatttggacaccaaaaaggtaaattctgctcacccaggtgtcttgggtcacttcttgataggttgtggggtatgcttttggacttaaatacagcatggtctttgctctatagtatgagcaacgtggccggctgagatcagtcagcaacaagcctttatg

SEQ ID NO: 9636 - DNA, 4987 bp, Homo sapiens
  source 1..4987: mol_type = unassigned DNA; mol_type = unassigned DNA
acacttctcccagcgggactacgattcccaacatgctctccggacagctggccggcctccccaccatcccggtgtctggggtctctgcaaaaatggggtctgtctccgcccgcccagcctccctttagcgttaaggatcggacaccacctcccggtagtaaattgtgactattccgagttttggagtcattcttcgttgcctgttttattagggcagcaaaacgcctgtggctagggcgggagtgggcggaggcaggtttgagccaatggcacgggagcggccctgtcgctgccatggcaacggcggccgttctccggggaccggctgcccattgggtagaatctttccagaaggctcgagaagaaggaagcggaagtggcacgtggaggggccggtggaggcgccggtcagtcatatcatttggatcaaaaaatagaacaatcggagttgcagccaaaaatcagcaaatcactcatgcaaacaatacggtgtctaacttcaaaagatttcatggccgagcattcaatgaccccttcattcaaaaggagaaggaaaacttgagttacgatttggttccattgaaaaatggtggagttggaataaaggtaatgtacatgggtgaagaacatctatttagtgtggagcagataacagccatgttgttgactaagctgaaggaaactgctgaaaacagcctcaagaaaccagtaacagattgtgttatttcagtactgggaacagcttttgatcctttcttaggaggaaaaaacttcgatgaaaagttagtggaacatttttgtgcagaatttaaaactaagtacaagttggatgcaaaatccaaaatacgagcactcctacgtctgtatcaggaatgtgaaaaactgaaaaagctaatgagctctaacagcacagaccttccactgaatatcgaatgctttatgaatgataaagatgtttccggaaagatgaacaggtcacaatttgaagaactctgtgctgaacttctgcaaaagatagaagtacccctttattcactgttggaacaaactcatctcaaagtagaagatgtgagtgcagttgagattgttggaggcgctacacgaattccagctgtgaaggaaagaattgccaaattctttggaaaagatattagcacaacactcaatgcagatgaagcagtagccagaggatgtgcattacagtgtgcaatactttccccggcatttaaagttagagaattttccgtcacagatgcagttccttttccaatatctctgatctggaaccatgattcagaagatactgaaggtgttcatgaagtctttagtcgaaaccatgctgctcctttctccaaagttctcacctttctgagaagggggccttttgagctagaagctttctattctgatccccaaggagttccatatccagaagcaaaaataggccgctttgtagttcagaatgtttctgcacagaaagatggagaaaaatctagagtaaaagtcaaagtgcgagtcaacacccatggcattttcaccatctctacggcatctatggtggagaaagtcccaactgaggagaatgaaatgtcttctgaagctgacatggagtgtctgaatcagagaccaccagaaaacccagacactgataaaaatgtccagcaagacaacagtgaagctggaacacagccccaggtacaaactgatgctcaacaaacctcacagtctcccccttcacctgaacttacctcagaagaaaacaaaatcccagatgctgacaaagcaaatgaaaaaaaagttgaccagcctccagaagctaaaaagcccaaaataaaggtggtgaatgttgagctgcctattgaagccaacttggtctggcagttagggaaagaccttcttaacatgtatattgagacagagggtaagatgataatgcaagataaattggaaaaagaaaggaatgatgctaaaaatgcagttgaggaatatgtgtatgagttcagagacaagctgtgtggaccatatgaaaaatttatatgtgagcaggatcatcaaaattttttgagactcctcacagaaactgaagactggctgtatgaagaaggagaggaccaagctaaacaagcatatgttgacaagttggaagaattaatgaaaattggcactccagttaaagttcggtttcaggaagctgaagaacggccaaaaatgtttgaagaactaggacagaggctgcagcattatgccaagatagcagctgacttcagaaataaggatgagaaatacaaccatattgatgagtctgaaatgaaaaaagtggagaagtctgttaatgaagtgatggaatggatgaataatgtcatgaatgctcaggctaaaaagagtcttgatcaggatccagttgtacgtgctcaggaaattaaaacaaaaatcaaggaattgaacaacacatgtgaacccgttgtaacacaaccgaaaccaaaaattgaatcacccaaactggaaagaactccaaatggcccaaatattgataaaaaggaagaagatttagaagacaaaaacaattttggtgctgaacctccacatcagaatggtgaatgttaccctaatgagaaaaattctgttaatatggacttggactagataaccttaaattggcctattccttcaattaataaaatatttttgccatagtatgtgactctacataacatactgaaactatttatattttcttttttaaggatatttagaaattttgtgtattatatggaaaaagaaaaaaagcttaagtctgtagtctttatgatcctaaaagggaaaattgccttggtaactttcagattcctgtggaattgtgaattcatactaagctttctgtgcagtctcaccatttgcatcactgaggatgaaactgacttttgtcttttggagaaaaaaaactgtactgcttgttcaagagggctgtgattaaaatctttaagcatttgttcctgccaaggtagttttcttgcattttgctctccattcagcatgtgtgtgggtgtggatgtttataaacaagactaagtctgacttcataagggctttctaaaaccatttctgtccaagagaaaatgactttttgctttgatattaaaaattcaatgagtaaaacaaaagctagtcaaatgtgttagcagcatgcagaacaaaaactttaaactttctctctcactatacagtatattgtcatgtgaaagtgtggaatggaagaaatgtcgatcctgttgtaactgattgtgaacacttttatgagctttaaaataaagttcatcttatggtgtcatttctaaactgttgattttgtcactaatttaaaaaatgagatgagggagaatatgaattattctagcagaaatgaagttagtgtccagtttttcttttttactgcttatgttctctcttttctaagtgaaaatgtttttctcctgacagaaaaatagcatatgtttattacattaaagcattttaaaaatactataaagtgaataaaacttaaaatcttgccacccagaagaaaacattgttaacacttcgttatacatccttggagccttttacccctaatgatgggggtatatttgtgtgagtgtctatgttatagtgctgtaggctgtttttaaaaactctgtgccagggaaattagtaaatacagtcaagtgttgtaactgcataaatgtagtgagttcattataaagacgtacttaaaaataccaatcttgctattggtagatttaggtgtttctcatttttgctgttctaaataatgctgcaatgaatctatctggttgttttgtaagcacaaaattgaagtagtgttggaggtaggggagaagacacatgcacttaggataggtgacaaccagctcctcactagggtgcaacagtttattctttttttttttttggtagagctggggtttcgctatgttgcccaagttcgtcttgaactcctgggctcaagcaatctgtctgcctcagcctcccaaagtgctgggattacatggtgtgagccaccatgcccagccatttatgatcttgatgagggccaactttccctcttccacaagggattaatcttagaactatagccaatttattataagtactatttagctactctgtgctccacacatcacggagtaatatcttcaaactatgaggtttagtaacacttgactgctgaggtttatttcctcagctctgatgcttcctgggtgaagatgtaagttattaaattaactcaaattttaaagctaacacttcattccatctagaccaggtagctcgtcatttgtacgtctgataggtgcttcaacatctcagaattggcttatttttcatgcattgcatattgtactcatttgtaatattggaatgtaaaatgttcttactaagaatctttatgtcagctattcaacatttccctactttataatttctagctgctttaccatttagcaactttaaatttttatgcagttaatatgtttctttggtttttatgttttctgaatgtctttaatgcacattaatgtatacttagtagatacacatttacacattgagaagtgaagataggtttgtgttctgtgtacaattaggacatccattaaaaaagatttttaaaaactgtgaatgggaaaacatgtttttcctcctgtcctaaaatagaacctgatgacgggagggagcatcagtcagtctggcctaaatcagtgtactgcgcttttggatgcgggcaaaagtattgtcatgttgattactttataataacgtattaatatcattggctcaaacagttgtgatatatacctagtaatcatcgaggatctcaaagatatgcaccagtttgaataaatgctgtttaaagattaaattttacaattcattttaaattgtcattttgtgacaatatttctaaacaacgtccatttttaataac

SEQ ID NO: 9637 - DNA, 2021 bp, Homo sapiens
  source 1..2021: mol_type = unassigned DNA; mol_type = unassigned DNA
atttggtcaaagccttctcctcaagcagtacttcaccctcctgcactagacgcctccagggagctggagcggagcagggctcggtgggccagctcttagcaacccaggtctaagacccggtgtggagaggaacaaccacagacgcggcggcttagctaggcgctctggaagtgcaggggaggcgcccgcctgccttggctgccgcacccatgacctctagtttcagctgtgaacctgggcggaggaataattgaggaactcacggaactatcaactggggacaaacctgcgatcgccacggtccttccgccctctccttcgtccgctccatgcccaagagctgcgctccggagctggggcgaggagagccatggaggaaccgggtgctcagtgcgctccaccgccgcccgcgggctccgagacctgggttcctcaagccaacttatcctctgctccctcccaaaactgcagcgccaaggactacatttaccaggactccatctccctaccctggaaagtactgctggttatgctattggcgctcatcaccttggccaccacgctctccaatgcctttgtgattgccacagtgtaccggacccggaaactgcacaccccggctaactacctgatcgcctctctggcggtcaccgacctgcttgtgtccatcctggtgatgcccatcagcaccatgtacactgtcaccggccgctggacactgggccaggtggtctgtgacttctggctgtcgtcggacatcacttgttgcactgcctccatcctgcacctctgtgtcatcgccctggaccgctactgggccatcacggacgccgtggagtactcagctaaaaggactcccaagagggcggcggtcatgatcgcgctggtgtgggtcttctccatctctatctcgctgccgcccttcttctggcgtcaggctaaggccgaagaggaggtgtcggaatgcgtggtgaacaccgaccacatcctctacacggtctactccacggtgggtgctttctacttccccaccctgctcctcatcgccctctatggccgcatctacgtagaagcccgctcccggattttgaaacagacgcccaacaggaccggcaagcgcttgacccgagcccagctgataaccgactcccccgggtccacgtcctcggtcacctctattaactcgcgggttcccgacgtgcccagcgaatccggatctcctgtgtatgtgaaccaagtcaaagtgcgagtctccgacgccctgctggaaaagaagaaactcatggccgctagggagcgcaaagccaccaagaccctagggatcattttgggagcctttattgtgtgttggctacccttcttcatcatctccctagtgatgcctatctgcaaagatgcctgctggttccacctagccatctttgacttcttcacatggctgggctatctcaactccctcatcaaccccataatctataccatgtccaatgaggactttaaacaagcattccataaactgatacgttttaagtgcacaagttgacttgccgtttgcagtggggtcgcctaagcgacctttggggaccaagttgtgtctggttccacaggtaggtcgaatcttctttcgcggtttctgggtcccagcgaggctctctctcctgggcaagggcaatggatcctgagaagccagaatagtcctgagagagagctctgaaaggagaagtgttgaaactaaatgtagagcttccctgcccaggaggaggctcacttcctcccctcaagccccgggctcagcactgaccctgcggcagccaatcccaaagggggttgcaacttttaaaaattgataatggaagggaatccctgccctgctttggtatcgtggataatgcccactagaagcagtgtacttgtaattgttgtctgaagcctgtctgagacagatctacatacagcctggcagtacttgaactagacgcttaatgccctgtgtttttggggggagaactttgtgttacagc

SEQ ID NO: 9638 - DNA, 4835 bp, Homo sapiens
  source 1..4835: mol_type = unassigned DNA; mol_type = unassigned DNA
ccagccccgggagaacagcatgtacaccagcctcagtgttacagagtgtgggtacatcaaggtgaatggtgagcagaaactataacctgttagtccttctacacctcatctgctacaagttctggcttagacatggatattctttgtgaagaaaatacttctttgagctcaactacgaactccctaatgcaattaaatgatgacaccaggctctacagtaatgactttaactccggagaagctaacacttctgatgcatttaactggacagtcgactctgaaaatcgaaccaacctttcctgtgaagggtgcctctcaccgtcgtgtctctccttacttcatctccaggaaaaaaactggtctgctttactgacagccgtagtgattattctaactattgctggaaacatactcgtcatcatggcagtgtccctagagaaaaagctgcagaatgccaccaactatttcctgatgtcacttgccatagctgatatgctgctgggtttccttgtcatgcccgtgtccatgttaaccatcctgtatgggtaccggtggcctctgccgagcaagctttgtgcagtctggatttacctggacgtgctcttctccacggcctccatcatgcacctctgcgccatctcgctggaccgctacgtcgccatccagaatcccatccaccacagccgcttcaactccagaactaaggcatttctgaaaatcattgctgtttggaccatatcagtaggtatatccatgccaataccagtctttgggctacaggacgattcgaaggtctttaaggaggggagttgcttactcgccgatgataactttgtcctgatcggctcttttgtgtcatttttcattcccttaaccatcatggtgatcacctactttctaactatcaagtcactccagaaagaagctactttgtgtgtaagtgatcttggcacacgggccaaattagcttctttcagcttcctccctcagagttctttgtcttcagaaaagctcttccagcggtcgatccatagggagccagggtcctacacaggcaggaggactatgcagtccatcagcaatgagcaaaaggcatgcaaggtgctgggcatcgtcttcttcctgtttgtggtgatgtggtgccctttcttcatcacaaacatcatggccgtcatctgcaaagagtcctgcaatgaggatgtcattggggccctgctcaatgtgtttgtttggatcggttatctctcttcagcagtcaacccactagtctacacactgttcaacaagacctataggtcagccttttcacggtatattcagtgtcagtacaaggaaaacaaaaaaccattgcagttaattttagtgaacacaataccggctttggcctacaagtctagccaacttcaaatgggacaaaaaaagaattcaaagcaagatgccaagacaacagataatgactgctcaatggttgctctaggaaagcagcattctgaagaggcttctaaagacaatagcgacggagtgaatgaaaaggtgagctgtgtgtgataggctagttgccgtggcaactgtggaaggcacactgagcaagttttcacctatctggaaaaaaaaaaatatgagattggaaaaaattagacaagtctagtggaaccaacgatcatatctgtatgcctcattttattctgtcaatgaaaagcggggttcaatgctacaaaatgtgtgcttggaaaatgttctgacagcatttcagctgtgagctttctgatacttatttataacattgtaaatgatatgtctttaaaatgattcacttttattgtataattatgaagccctaagtaaatctaaattaacttctattttcaagtggaaaccttgctgctatgctgttcattgatgacatgggattgagttggttacctattgctgtaaataaaaatagctataaatagtgaaaattttattgaatataatggcctcttaaaaattatctttaaaacttactatggtatatattttgaaaggagaaaaaaaaagccactaaggtcagtgttataaaatctgtattgctaagataattaaatgaaatacttgacaacatttttcattcctgctttttcatagataccattttgaaatattcacaaggttgctggcatttgctgcatttcaagttaattctcagaagtgaaaaagacttcaaatgttattcaataactattgctgctttctcttctacttcttgtgctttactctgaatttccagtgtggtcttgtttaatatttgttcctctaggtaaactagcaaaaggatgatttaacattaccaaatgcctttctagcaattgcttctctaaaacagcactatcgaggtatttggtaacttgctgtgaaatgactgcatcatgcatgcactcttttgagcagtaaatgtatattgatgtaactgtgtcaggattgaggatgaactcaggtttccggctactgacagtggtagagtcctaggacatctctgtaaaaagcaggtgactttcctatgacactcatcaggtaaactgatgctttcagatccatcggtttatactatttattaaaaccattctgcttggttccacaatcatctattgagtgtacatttatgtgtgaagcaaatttctagatatgagaaatataaaaataattaaaacaaaatccttgccttcaaacgaaatggctcggccaggcacggaggctcgtgcatgtaatcctagcactttgggaggctgagatgggaggatcacttgaggccaagagtttgagaccaacctgggtaacaaagtgagacctccctgtctctacaaaaaaaatcaaaaaattatctgatccttgtggcacacaactgtggtcccagctacaggggaggctgagacgcaaggatcacttgagcccagaagctcaaggctgcagtgagccaagttcacaccactgccatttcctcctgggcaacagagtgagaccctatcacaaaaaaaaagaaagaaaaaaagaaaatgactaaactgaaatggtcttagtcaaaaaatatatacagacttatttttagaatcatttcaacttatttccttcttacctggttcagaaacaagtttgtttcaactgtgagagtagttttaaaaataagttttcctgattggttaccaataaacaccaaacaaataaaggagggggaaaatatcacttgaggcttaacattgcaattaatttagaaatacgcacctcaatctcaagccagtttataactaccatagttttgagcaaaatttttcttctatttctccaaaaactcactcatttcagtattactcattgacactgggctccctaatagaaaagcagatattataatatttcattgaaatggttactaaagagaaaaagagattaacaacagttaatccaccttgatattataacactcaaggttaaattgcatgttgttattagaatcaatgttatatatatgattacaatgctgaagcatttctattgaatgagaaatagtgtttgccctaaacctttgggaaaaaaatacagatttgaaaactaaagaatgtgggaagtgtcattgtgtaatttggaaatgcataaaattctcattatgtcctcatagatatgttgaaagatggttcactgtttcaaagatagaatgtataatatgctgctagtaccaaggctgcatttgaactgaactactccttatgatataccatactaactgatgaaaatataaatgttaaaatgtctccactctaatgtattttgccttcacttgtaactctgcacatttcattatatattagggaaaagattacagattctacccccatatactcaatcttgatcagaatgtacattaatgttgcctgatagatgtcttttgactacctatatattacaaatgtgtatgtgtttttttcttccataagtatctattcaagtgtatactgtataggcaaatgtgtagctgtatatatgtacagacatgttctcatgcactttattcaatatttatatatttatatggacgaaaagcaagtcaatgaaaacactcagtatatacacatgtgtgcatgtttgtatcatgtttatttaaatgtgaattcatgttctaatatttctatgaccttccattgctgcaaagcagattaaagtgtaacaaaaatatcagctctttaaataaactggaaattaatctaattttgtggaagaactttaagacaagtctatgaggatggcgaaaacaatggtccacatatatagtttcttgatcctaaataaaatggtacctttgggccctttgtttagtctggcaattttctgactactatggctttttaaacagactcacacctaagtgaaacacagttgtcaaatgatttatggatctgtgattaaaggattcacttttaatgaatactattaaaacggagtaacaaaccttgctctactttaagttgaatgatagattcctctatattcaaaaaaaagcaattaactgccataattagggaaaactgtttaaagcatactgcatttacttggccacagcgccatctcatggtaattttttaaagtgctaccgtagccaaattgaactaagtcactgtactgctttcagcaaagggtgctcctcccatttgtgcatcaatgagacatatttataaagtgctaaattattctgtgccatatgtaacaaatacagtgaagattattttatgaacttattttaatcaaggcgatgctaaaagttttcaagaaaggataaataactgtaaataaagtagactcaaaaa

SEQ ID NO: 9639 - DNA, 509 bp, Homo sapiens
  source 1..509: mol_type = unassigned DNA; mol_type = unassigned DNA
tttaactccggagaagctaacacttctgatgcatttaactggacagtcgactctgaaaatcgaaccaacctttcctgtgaagggtgcctctcaccgtcgtgtctctccttacttcatctccaggaaaaaaactggtctgctttactgacagccgtagtgattattctaactattgctggaaacatactcgtcatcatggcagtgtccctagagaaaaagctgcagaatgccaccaactatttcctgatgtcacttgccatagctgatatgctgctgggtttccttgtcatgcccgtgtccatgttaaccatcctgtatggtgagtggcattagtttcccagctatattcgcactggtaataaagagcatgtgcatgccaccagcagatgagatggggctcagggggcaaacaaactataaatagaagtctttgtttatagactagagcctactatgttacttatattttactcttaaaatgggatttcacataaaaatcagacagtcta

SEQ ID NO: 9640 - DNA, 4689 bp, Homo sapiens
  source 1..4689: mol_type = unassigned DNA; mol_type = unassigned DNA
ctgatgaaatgaacgagacagtcagagagctactccattcccgtggaaaccaggagtcccttggtgcagacagctcttcctactttcccatgcagttcttttgtgcgactttgaggggctcgtgaatgatttctaaatgtgtgcctgctgaggcgagccgcacagggagggaggaacccagccgagccgtgccagaggaagccaacaggatcctagcagtgcgggagctggctcagctcttgcatgcagtttttgaagtcagcaaaacagaaaccaaattactatcatattatgctggtggaagatcaagaagaggggactctacaccagtttaattactgtgagagatgcagcgagtcacagaataacaaatgtatctcatgtgtggaccctgaagacaaatggtaccggtggcctctgccgagcaagctttgtgcagtctggatttacctggacgtgctcttctccacggcctccatcatgcacctctgcgccatctcgctggaccgctacgtcgccatccagaatcccatccaccacagccgcttcaactccagaactaaggcatttctgaaaatcattgctgtttggaccatatcagtaggtatatccatgccaataccagtctttgggctacaggacgattcgaaggtctttaaggaggggagttgcttactcgccgatgataactttgtcctgatcggctcttttgtgtcatttttcattcccttaaccatcatggtgatcacctactttctaactatcaagtcactccagaaagaagctactttgtgtgtaagtgatcttggcacacgggccaaattagcttctttcagcttcctccctcagagttctttgtcttcagaaaagctcttccagcggtcgatccatagggagccagggtcctacacaggcaggaggactatgcagtccatcagcaatgagcaaaaggcatgcaaggtgctgggcatcgtcttcttcctgtttgtggtgatgtggtgccctttcttcatcacaaacatcatggccgtcatctgcaaagagtcctgcaatgaggatgtcattggggccctgctcaatgtgtttgtttggatcggttatctctcttcagcagtcaacccactagtctacacactgttcaacaagacctataggtcagccttttcacggtatattcagtgtcagtacaaggaaaacaaaaaaccattgcagttaattttagtgaacacaataccggctttggcctacaagtctagccaacttcaaatgggacaaaaaaagaattcaaagcaagatgccaagacaacagataatgactgctcaatggttgctctaggaaagcagcattctgaagaggcttctaaagacaatagcgacggagtgaatgaaaaggtgagctgtgtgtgataggctagttgccgtggcaactgtggaaggcacactgagcaagttttcacctatctggaaaaaaaaaaatatgagattggaaaaaattagacaagtctagtggaaccaacgatcatatctgtatgcctcattttattctgtcaatgaaaagcggggttcaatgctacaaaatgtgtgcttggaaaatgttctgacagcatttcagctgtgagctttctgatacttatttataacattgtaaatgatatgtctttaaaatgattcacttttattgtataattatgaagccctaagtaaatctaaattaacttctattttcaagtggaaaccttgctgctatgctgttcattgatgacatgggattgagttggttacctattgctgtaaataaaaatagctataaatagtgaaaattttattgaatataatggcctcttaaaaattatctttaaaacttactatggtatatattttgaaaggagaaaaaaaaagccactaaggtcagtgttataaaatctgtattgctaagataattaaatgaaatacttgacaacatttttcattcctgctttttcatagataccattttgaaatattcacaaggttgctggcatttgctgcatttcaagttaattctcagaagtgaaaaagacttcaaatgttattcaataactattgctgctttctcttctacttcttgtgctttactctgaatttccagtgtggtcttgtttaatatttgttcctctaggtaaactagcaaaaggatgatttaacattaccaaatgcctttctagcaattgcttctctaaaacagcactatcgaggtatttggtaacttgctgtgaaatgactgcatcatgcatgcactcttttgagcagtaaatgtatattgatgtaactgtgtcaggattgaggatgaactcaggtttccggctactgacagtggtagagtcctaggacatctctgtaaaaagcaggtgactttcctatgacactcatcaggtaaactgatgctttcagatccatcggtttatactatttattaaaaccattctgcttggttccacaatcatctattgagtgtacatttatgtgtgaagcaaatttctagatatgagaaatataaaaataattaaaacaaaatccttgccttcaaacgaaatggctcggccaggcacggaggctcgtgcatgtaatcctagcactttgggaggctgagatgggaggatcacttgaggccaagagtttgagaccaacctgggtaacaaagtgagacctccctgtctctacaaaaaaaatcaaaaaattatctgatccttgtggcacacaactgtggtcccagctacaggggaggctgagacgcaaggatcacttgagcccagaagctcaaggctgcagtgagccaagttcacaccactgccatttcctcctgggcaacagagtgagaccctatcacaaaaaaaaagaaagaaaaaaagaaaatgactaaactgaaatggtcttagtcaaaaaatatatacagacttatttttagaatcatttcaacttatttccttcttacctggttcagaaacaagtttgtttcaactgtgagagtagttttaaaaataagttttcctgattggttaccaataaacaccaaacaaataaaggagggggaaaatatcacttgaggcttaacattgcaattaatttagaaatacgcacctcaatctcaagccagtttataactaccatagttttgagcaaaatttttcttctatttctccaaaaactcactcatttcagtattactcattgacactgggctccctaatagaaaagcagatattataatatttcattgaaatggttactaaagagaaaaagagattaacaacagttaatccaccttgatattataacactcaaggttaaattgcatgttgttattagaatcaatgttatatatatgattacaatgctgaagcatttctattgaatgagaaatagtgtttgccctaaacctttgggaaaaaaatacagatttgaaaactaaagaatgtgggaagtgtcattgtgtaatttggaaatgcataaaattctcattatgtcctcatagatatgttgaaagatggttcactgtttcaaagatagaatgtataatatgctgctagtaccaaggctgcatttgaactgaactactccttatgatataccatactaactgatgaaaatataaatgttaaaatgtctccactctaatgtattttgccttcacttgtaactctgcacatttcattatatattagggaaaagattacagattctacccccatatactcaatcttgatcagaatgtacattaatgttgcctgatagatgtcttttgactacctatatattacaaatgtgtatgtgtttttttcttccataagtatctattcaagtgtatactgtataggcaaatgtgtagctgtatatatgtacagacatgttctcatgcactttattcaatatttatatatttatatggacgaaaagcaagtcaatgaaaacactcagtatatacacatgtgtgcatgtttgtatcatgtttatttaaatgtgaattcatgttctaatatttctatgaccttccattgctgcaaagcagattaaagtgtaacaaaaatatcagctctttaaataaactggaaattaatctaattttgtggaagaactttaagacaagtctatgaggatggcgaaaacaatggtccacatatatagtttcttgatcctaaataaaatggtacctttgggccctttgtttagtctggcaattttctgactactatggctttttaaacagactcacacctaagtgaaacacagttgtcaaatgatttatggatctgtgattaaaggattcacttttaatgaatactattaaaacggagtaacaaaccttgctctactttaagttgaatgatagattcctctatattcaaaaaaaagcaattaactgccataattagggaaaactgtttaaagcatactgcatttacttggccacagcgccatctcatggtaattttttaaagtgctaccgtagccaaattgaactaagtcactgtactgctttcagcaaagggtgctcctcccatttgtgcatcaatgagacatatttataaagtgctaaattattctgtgccatatgtaacaaatacagtgaagattattttatgaacttattttaatcaaggcgatgctaaaagttttcaagaaaggataaataactgtaaataaagtagactc

SEQ ID NO: 9641 - DNA, 5429 bp, Homo sapiens
  source 1..5429: mol_type = unassigned DNA; mol_type = unassigned DNA
ctgatgaaatgaacgagacagtcagagagctactccattcccgtggaaaccaggagtcccttggtgcagacagctcttcctactttcccatgcagttcttttgtgcgactttgaggggctcgtgaatgatttctaaatgtgtgcctgctgaggcgagccgcacagggagggaggaacccagccgagccgtgccagaggaagccaacaggatcctagcagtgcgggagctggctcagctcttgcatgcagtttttgaagtcagcaaaacagaaaccaaattactatcatattatgctggtggaagatcaagaagaggggactctacaccagtttaattactgtgagagatgcagcgagtcacagaataacaaatgtatctcatgtgtggaccctgaagacaaatgacatttatcttcccgagcgctcaaaaaaaaccctgcaacctctatgctaaaagttcattctgcttttttgtcctcggtttggtgagaaaataataaaaccaaacagtggactctcctaaaattgtgaatgaagaaaacttacagccaccacagttcagttctttaactatcattgtaataatggaagacaaaaatccagccccgggagaacagcatgtacaccagcctcagtgttacagagtgtgggtacatcaaggtgaatggtgagcagaaactataacctgttagtccttctacacctcatctgctacaagttctggcttagacatggatattctttgtgaagaaaatacttctttgagctcaactacgaactccctaatgcaattaaatgatgacaccaggctctacagtaatgactttaactccggagaagctaacacttctgatgcatttaactggacagtcgactctgaaaatcgaaccaacctttcctgtgaagggtgcctctcaccgtcgtgtctctccttacttcatctccaggaaaaaaactggtctgctttactgacagccgtagtgattattctaactattgctggaaacatactcgtcatcatggcagtgtccctagagaaaaagctgcagaatgccaccaactatttcctgatgtcacttgccatagctgatatgctgctgggtttccttgtcatgcccgtgtccatgttaaccatcctgtatgggtaccggtggcctctgccgagcaagctttgtgcagtctggatttacctggacgtgctcttctccacggcctccatcatgcacctctgcgccatctcgctggaccgctacgtcgccatccagaatcccatccaccacagccgcttcaactccagaactaaggcatttctgaaaatcattgctgtttggaccatatcagtaggtatatccatgccaataccagtctttgggctacaggacgattcgaaggtctttaaggaggggagttgcttactcgccgatgataactttgtcctgatcggctcttttgtgtcatttttcattcccttaaccatcatggtgatcacctactttctaactatcaagtcactccagaaagaagctactttgtgtgtaagtgatcttggcacacgggccaaattagcttctttcagcttcctccctcagagttctttgtcttcagaaaagctcttccagcggtcgatccatagggagccagggtcctacacaggcaggaggactatgcagtccatcagcaatgagcaaaaggcatgcaaggtgctgggcatcgtcttcttcctgtttgtggtgatgtggtgccctttcttcatcacaaacatcatggccgtcatctgcaaagagtcctgcaatgaggatgtcattggggccctgctcaatgtgtttgtttggatcggttatctctcttcagcagtcaacccactagtctacacactgttcaacaagacctataggtcagccttttcacggtatattcagtgtcagtacaaggaaaacaaaaaaccattgcagttaattttagtgaacacaataccggctttggcctacaagtctagccaacttcaaatgggacaaaaaaagaattcaaagcaagatgccaagacaacagataatgactgctcaatggttgctctaggaaagcagcattctgaagaggcttctaaagacaatagcgacggagtgaatgaaaaggtgagctgtgtgtgataggctagttgccgtggcaactgtggaaggcacactgagcaagttttcacctatctggaaaaaaaaaaatatgagattggaaaaaattagacaagtctagtggaaccaacgatcatatctgtatgcctcattttattctgtcaatgaaaagcggggttcaatgctacaaaatgtgtgcttggaaaatgttctgacagcatttcagctgtgagctttctgatacttatttataacattgtaaatgatatgtctttaaaatgattcacttttattgtataattatgaagccctaagtaaatctaaattaacttctattttcaagtggaaaccttgctgctatgctgttcattgatgacatgggattgagttggttacctattgctgtaaataaaaatagctataaatagtgaaaattttattgaatataatggcctcttaaaaattatctttaaaacttactatggtatatattttgaaaggagaaaaaaaaagccactaaggtcagtgttataaaatctgtattgctaagataattaaatgaaatacttgacaacatttttcattcctgctttttcatagataccattttgaaatattcacaaggttgctggcatttgctgcatttcaagttaattctcagaagtgaaaaagacttcaaatgttattcaataactattgctgctttctcttctacttcttgtgctttactctgaatttccagtgtggtcttgtttaatatttgttcctctaggtaaactagcaaaaggatgatttaacattaccaaatgcctttctagcaattgcttctctaaaacagcactatcgaggtatttggtaacttgctgtgaaatgactgcatcatgcatgcactcttttgagcagtaaatgtatattgatgtaactgtgtcaggattgaggatgaactcaggtttccggctactgacagtggtagagtcctaggacatctctgtaaaaagcaggtgactttcctatgacactcatcaggtaaactgatgctttcagatccatcggtttatactatttattaaaaccattctgcttggttccacaatcatctattgagtgtacatttatgtgtgaagcaaatttctagatatgagaaatataaaaataattaaaacaaaatccttgccttcaaacgaaatggctcggccaggcacggaggctcgtgcatgtaatcctagcactttgggaggctgagatgggaggatcacttgaggccaagagtttgagaccaacctgggtaacaaagtgagacctccctgtctctacaaaaaaaatcaaaaaattatctgatccttgtggcacacaactgtggtcccagctacaggggaggctgagacgcaaggatcacttgagcccagaagctcaaggctgcagtgagccaagttcacaccactgccatttcctcctgggcaacagagtgagaccctatcacaaaaaaaaagaaagaaaaaaagaaaatgactaaactgaaatggtcttagtcaaaaaatatatacagacttatttttagaatcatttcaacttatttccttcttacctggttcagaaacaagtttgtttcaactgtgagagtagttttaaaaataagttttcctgattggttaccaataaacaccaaacaaataaaggagggggaaaatatcacttgaggcttaacattgcaattaatttagaaatacgcacctcaatctcaagccagtttataactaccatagttttgagcaaaatttttcttctatttctccaaaaactcactcatttcagtattactcattgacactgggctccctaatagaaaagcagatattataatatttcattgaaatggttactaaagagaaaaagagattaacaacagttaatccaccttgatattataacactcaaggttaaattgcatgttgttattagaatcaatgttatatatatgattacaatgctgaagcatttctattgaatgagaaatagtgtttgccctaaacctttgggaaaaaaatacagatttgaaaactaaagaatgtgggaagtgtcattgtgtaatttggaaatgcataaaattctcattatgtcctcatagatatgttgaaagatggttcactgtttcaaagatagaatgtataatatgctgctagtaccaaggctgcatttgaactgaactactccttatgatataccatactaactgatgaaaatataaatgttaaaatgtctccactctaatgtattttgccttcacttgtaactctgcacatttcattatatattagggaaaagattacagattctacccccatatactcaatcttgatcagaatgtacattaatgttgcctgatagatgtcttttgactacctatatattacaaatgtgtatgtgtttttttcttccataagtatctattcaagtgtatactgtataggcaaatgtgtagctgtatatatgtacagacatgttctcatgcactttattcaatatttatatatttatatggacgaaaagcaagtcaatgaaaacactcagtatatacacatgtgtgcatgtttgtatcatgtttatttaaatgtgaattcatgttctaatatttctatgaccttccattgctgcaaagcagattaaagtgtaacaaaaatatcagctctttaaataaactggaaattaatctaattttgtggaagaactttaagacaagtctatgaggatggcgaaaacaatggtccacatatatagtttcttgatcctaaataaaatggtacctttgggccctttgtttagtctggcaattttctgactactatggctttttaaacagactcacacctaagtgaaacacagttgtcaaatgatttatggatctgtgattaaaggattcacttttaatgaatactattaaaacggagtaacaaaccttgctctactttaagttgaatgatagattcctctatattcaaaaaaaagcaattaactgccataattagggaaaactgtttaaagcatactgcatttacttggccacagcgccatctcatggtaattttttaaagtgctaccgtagccaaattgaactaagtcactgtactgctttcagcaaagggtgctcctcccatttgtgcatcaatgagacatatttataaagtgctaaattattctgtgccatatgtaacaaatacagtgaagattattttatgaacttattttaatcaaggcgatgctaaaagttttcaagaaaggataaataactgtaaataaagtagactc

SEQ ID NO: 9642 - DNA, 3288 bp, Homo sapiens
  source 1..3288: mol_type = unassigned DNA; mol_type = unassigned DNA
acccgcgcgaggtaggcgctctggtgcttgccgaggacgcttccttcctcagatgcaccgatcttcccgatactgcctttggagcggctagattgctagccttggctgctccattggcctgccttgccccttacctgccgattgcatatgaactcttcttctgtctgtacatcgttgtcgtcggagtcgtcgcgatcgtcgtggcgctcgtgtgatggccttcgtccgtttagagtagtgtagttagttaggggccaacgaagaagaaagaagacgcgattagtgcagagatgctggaggtggtcagttactaagctagagtaagatagcggagcgaaaagagccaaacctagccggggggcgcacggtcacccaaaggaggtcgactcgccggcgcttcctatcgcgccgagctccctccattcctctccctccgccgaggcgcgaggttgcggcgcgcagcgcagcgcagctcagcgcaccgactgccgcgggctccgctgggcgattgcagccgagtccgtttctcgtctagctgccgccgcggcgaccgctgcctggtcttcctcccggacgctagtgggttatcagctaacacccgcgagcatctataacataggccaactgacgccatccttcaaaaacaactgtctgggaaaaaaagaataaaaagtagtgtgagagcagaaaacgtgattgaaacacgaccaatctttcttcagtgccaaagggtggaaaagaaaggatgatatgatgaacctagcctgttaatttcgtcttctcaattttaaactttggttgcttaagactgaagcaatcatggtgaacctgaggaatgcggtgcattcattccttgtgcacctaattggcctattggtttggcaatctgatatttctgtgagcccagtagcagctatagtaactgacattttcaatacctccgatggtggacgcttcaaattcccagacggggtacaaaactggccagcactttcaatcgtcatcataataatcatgacaataggtggcaacatccttgtgatcatggcagtaagcatggaaaagaaactgcacaatgccaccaattacttcttaatgtccctagccattgctgatatgctagtgggactacttgtcatgcccctgtctctcctggcaatcctttatgattatgtctggccactacctagatatttgtgccccgtctggatttctttagatgttttattttcaacagcgtccatcatgcacctctgcgctatatcgctggatcggtatgtagcaatacgtaatcctattgagcatagccgtttcaattcgcggactaaggccatcatgaagattgctattgtttgggcaatttctataggtgtatcagttcctatccctgtgattggactgagggacgaagaaaaggtgttcgtgaacaacacgacgtgcgtgctcaacgacccaaatttcgttcttattgggtccttcgtagctttcttcataccgctgacgattatggtgattacgtattgcctgaccatctacgttctgcgccgacaagctttgatgttactgcacggccacaccgaggaaccgcctggactaagtctggatttcctgaagtgctgcaagaggaatacggccgaggaagagaactctgcaaaccctaaccaagaccagaacgcacgccgaagaaagaagaaggagagacgtcctaggggcaccatgcaggctatcaacaatgaaagaaaagcttcgaaagtccttgggattgttttctttgtgtttctgatcatgtggtgcccatttttcattaccaatattctgtctgttctttgtgagaagtcctgtaaccaaaagctcatggaaaagcttctgaatgtgtttgtttggattggctatgtttgttcaggaatcaatcctctggtgtatactctgttcaacaaaatttaccgaagggcattctccaactatttgcgttgcaattataaggtagagaaaaagcctcctgtcaggcagattccaagagttgccgccactgctttgtctgggagggagcttaatgttaacatttatcggcataccaatgaaccggtgatcgagaaagccagtgacaatgagcccggtatagagatgcaagttgagaatttagagttaccagtaaatccctccagtgtggttagcgaaaggattagcagtgtgtgagaaagaacagcacagtcttttcctacggtacaagctacatatgtaggaaaattttcttctttaatttttctgttggtcttaactaatgtaaatattgctgtctgaaaaagtgtttttacatatagctttgcaaccttgtactttacaatcatgcctacattagtgagatttagggttctatatttactgtttataataggtggagactaacttattttgattgtttgatgaataaaatgtttatttttgctctccctcccttctttccttccttttttcctttcttccttcctttctctctttcttttgtgcatatggcaacgttcatgttcatctcaggtggcatttgcaggtgaccagaatgaggcacatgacagtggttatatttcaaccacacctaaattaacaaattcagtggacatttgttctgggttaacagtaaatatacactttacattcttgctctgctcatctacacatataaacacagtaagataggttctgctttctgatacatctgtcagtgagtcagaggcagaacctagtcttgttgttcatataggggcaaaaatttgacattgtcagaatgttgtgttggtatttactgcaatgtctgtccctaaacatagtggtattttaacatagcagctggttaaccgggactacagaagtggaaggataatgagatgtaatacaccaaatagcttttcacttcttaaggacagtgttcaaattctgattattacaacaagcaaactgaaattagtgttttcattctggtccttagtaaattcctaattctatgattaaactgggaaatgagatcccagagttatttcccaacccaggattcaacatcaattgggttttgatctcagcatcctggaaatttgtgtgcttcacacaaagtgaaattagtattttgagccttattaaaatattttcttaattatggtacctctgtctataggacttaatttagcagtccatttttgagtaaaacttgtattggaagtatagatggtagaaactttggaagttttacttgattaaggactacagaattgggcccttagaatgtgaaaaaaaaaa

SEQ ID NO: 9643 - DNA, 4751 bp, Homo sapiens
  source 1..4751: mol_type = unassigned DNA; mol_type = unassigned DNA
acccgcgcgaggtaggcgctctggtgcttgccgaggacgcttccttcctcagatgcaccgatcttcccgatactgcctttggagcggctagattgctagccttggctgctccattggcctgccttgccccttacctgccgattgcatatgaactcttcttctgtctgtacatcgttgtcgtcggagtcgtcgcgatcgtcgtggcgctcgtgtgatggccttcgtccgtttagagtagtgtagttagttaggggccaacgaagaagaaagaagacgcgattagtgcagagatgctggaggtggtcagttactaagctagagtaagatagcggagcgaaaagagccaaacctagccggggggcgcacggtcacccaaaggaggtcgactcgccggcgcttcctatcgcgccgagctccctccattcctctccctccgccgaggcgcgaggttgcggcgcgcagcgcagcgcagctcagcgcaccgactgccgcgggctccgctgggcgattgcagccgagtccgtttctcgtctagctgccgccgcggcgaccgctgcctggtcttcctcccggacgctagtgggttatcagctaacacccgcgagcatctataacataggccaactgacgccatccttcaaaaacaactaaaggatgatatgatgaacctagcctgttaatttcgtcttctcaattttaaactttggttgcttaagactgaagcaatcatggtgaacctgaggaatgcggtgcattcattccttgtgcacctaattggcctattggtttggcaatctgatatttctgtgagcccagtagcagctatagtaactgacattttcaatacctccgatggtggacgcttcaaattcccagacggggtacaaaactggccagcactttcaatcgtcatcataataatcatgacaataggtggcaacatccttgtgatcatggcagtaagcatggaaaagaaactgcacaatgccaccaattacttcttaatgtccctagccattgctgatatgctagtgggactacttgtcatgcccctgtctctcctggcaatcctttatgattatgtctggccactacctagatatttgtgccccgtctggatttctttagatgttttattttcaacagcgtccatcatgcacctctgcgctatatcgctggatcggtatgtagcaatacgtaatcctattgagcatagccgtttcaattcgcggactaaggccatcatgaagattgctattgtttgggcaatttctataggtgtatcagttcctatccctgtgattggactgagggacgaagaaaaggtgttcgtgaacaacacgacgtgcgtgctcaacgacccaaatttcgttcttattgggtccttcgtagctttcttcataccgctgacgattatggtgattacgtattgcctgaccatctacgttctgcgccgacaagctttgatgttactgcacggccacaccgaggaaccgcctggactaagtctggatttcctgaagtgctgcaagaggaatacggccgaggaagagaactctgcaaaccctaaccaagaccagaacgcacgccgaagaaagaagaaggagagacgtcctaggggcaccatgcaggctatcaacaatgaaagaaaagcttcgaaagtccttgggattgttttctttgtgtttctgatcatgtggtgcccatttttcattaccaatattctgtctgttctttgtgagaagtcctgtaaccaaaagctcatggaaaagcttctgaatgtgtttgtttggattggctatgtttgttcaggaatcaatcctctggtgtatactctgttcaacaaaatttaccgaagggcattctccaactatttgcgttgcaattataaggtagagaaaaagcctcctgtcaggcagattccaagagttgccgccactgctttgtctgggagggagcttaatgttaacatttatcggcataccaatgaaccggtgatcgagaaagccagtgacaatgagcccggtatagagatgcaagttgagaatttagagttaccagtaaatccctccagtgtggttagcgaaaggattagcagtgtgtgagaaagaacagcacagtcttttcctacggtacaagctacatatgtaggaaaattttcttctttaatttttctgttggtcttaactaatgtaaatattgctgtctgaaaaagtgtttttacatatagctttgcaaccttgtactttacaatcatgcctacattagtgagatttagggttctatatttactgtttataataggtggagactaacttattttgattgtttgatgaataaaatgtttatttttgctctccctcccttctttccttccttttttcctttcttccttcctttctctctttcttttgtgcatatggcaacgttcatgttcatctcaggtggcatttgcaggtgaccagaatgaggcacatgacagtggttatatttcaaccacacctaaattaacaaattcagtggacatttgttctgggttaacagtaaatatacactttacattcttgctctgctcatctacacatataaacacagtaagataggttctgctttctgatacatctgtcagtgagtcagaggcagaacctagtcttgttgttcatataggggcaaaaatttgacattgtcagaatgttgtgttggtatttactgcaatgtctgtccctaaacatagtggtattttaacatagcagctggttaaccgggactacagaagtggaaggataatgagatgtaatacaccaaatagcttttcacttcttaaggacagtgttcaaattctgattattacaacaagcaaactgaaattagtgttttcattctggtccttagtaaattcctaattctatgattaaactgggaaatgagatcccagagttatttcccaacccaggattcaacatcaattgggttttgatctcagcatcctggaaatttgtgtgcttcacacaaagtgaaattagtattttgagccttattaaaatattttcttaattatggtacctctgtctataggacttaatttagcagtccatttttgagtaaaacttgtattggaagtatagatggtagaaactttggaagttttacttgattaaggactacagaattgggcccttagaatgtgaaaaaaaaaagtaattaaaaagacacttttaccgaactcgggattacagaaacacggagtttccatttggattttaaacaaaatttatgtcattttcagatccttccaaactctctagtgcaggaaaaggctgcagctaatttgtgaaagtggcaagctcttcattgcactgcagttatttaccagaagtttaaatctttgttaaaatatagtgttgtgttacaataagtgttggccatcatttcattcgtgggcctgctgctctctaagaattcagtagcattttaatagtttctaaaccatgaaaagttttcaagcattgctaaagtcaggccattcagtctatgctgtgtgcagagtatacaagtgtttctagtaacagtatttccatacgtgcccatttcacacaactgtggataaattttggaagaattcatgatgctagttcttacgcttgacagttacttacacacctgagaatgtgcctctcagtatcttaaaattggttaatgaaaaatctgaatttctaaaacccttggtctgtgttctcaacacacagtatagataaatccaatagtctgccacaagggcagtggaagagctgctgtatttgaggaaactcatacagtctctatttgatttgcaacactgccaaacatcagtcaattgcttgagcatgcccaaatataacatgaaagtcaagtctacctgccttgcctgttaggtctgttgaagtgcatgttaaaataattatatgaagcagaatgagatgatttaattcttaccgaaatgaaaatggctgaagaaacacagcatgcatttagcatgagttctgcacatacagatggtgtcctgcatgtatgccatgtatgttgcatgaatccatcgatttgtattaatgtagggcagaatagctgatagaagaaggactgaagaaaatccttcagcaatccttaaaaagaccatgcattcagatctgaagtagtgtgagtgttagaaaaaactggaaacatctgatttctgaactatcagggcaagctcatagcacatgttttacaaagaaacaaaatataaatcacagatttccaaaagtactagcaataagttgaatgataatagctcacagcacatttgttaatgattcttgtgtcatcaagtagtagtacttaatagtacccaacctggtaattatcctcaagttgtgtgctattcgtaagttctgtgcagtttggtatgaaacaaatatactcatttggatataaatcttacccttcaatgttaaatctacaaacttttataaatgttttaaagaagtccatgtgataattgtaaaggtgatgaatttaccatcaaacaaatcattttgatgtattattatatatgtatatctgtgtaagacacgtgcaacagactgccttatattattttctgtaattcttctcctttgtcaaatggtattttttgtgaatggttgcaaagtgttgtcttattcctaattcctgtatgttatccactacaggttttatgagacttcctattaatttattaaatttattaaatgttg

SEQ ID NO: 9644 - DNA, 4652 bp, Homo sapiens
  source 1..4652: mol_type = unassigned DNA; mol_type = unassigned DNA
gcgcgaggtaggcgctctggtgcttgccgaggacgcttccttcctcagatgcaccgatcttcccgatactgcctttggagcggctagattgctagccttggctgctccattggcctgccttgccccttacctgccgattgcatatgaactcttcttctgtctgtacatcgttgtcgtcggagtcgtcgcgatcgtcgtggcgctcgtgtgatggccttcgtccgtttagagtagtgtagttagttaggggccaacgaagaagaaagaagacgcgattagtgcagagatgctggaggtggtcagttactaagctagagtaagatagcggagcgaaaagagccaaacctagccggggggcgcacggtcacccaaaggaggtcgactcgccggcgcttcctatcgcgccgagctccctccattcctctccctccgccgaggcgcgaggttgcggcgcgcagcgcagcgcagctcagcgcaccgactgccgcgggctccgctgggcgattgcagccgagtccgtttctcgtctagctgccgccgcggcgaccgctgcctggtcttcctcccggacgctagtgggttatcagctaacacccgcgagcatctataacataggccaactgacgccatccttcaaaaacaactaaaggatgatatgatgaacctagcctgttaatttcgtcttctcaattttaaactttggttgcttaagactgaagcaatcatggtgaacctgaggaatgcggtgcattcattccttgtgcacctaattggcctattggtttggcaatctgatatttctgtgagcccagtagcagctatagtaactgacattttcaatacctccgatggtggacgcttcaaattcccagacggggtacaaaactggccagcactttcaatcgtcatcataataatcatgacaataggtggcaacatccttgtgatcatggcagtaagcatggaaaagaaactgcacaatgccaccaattacttcttaatgtccctagccattgctgatatgctagtgggactacttgtcatgcccctgtctctcctggcaatcctttatgattatgtctggccactacctagatatttgtgccccgtctggatttctttagatgttttattttcaacagcgtccatcatgcacctctgcgctatatcgctggatcggtgtatcagttcctatccctgtgattggactgagggacgaagaaaaggtgttcgtgaacaacacgacgtgcgtgctcaacgacccaaatttcgttcttattgggtccttcgtagctttcttcataccgctgacgattatggtgattacgtattgcctgaccatctacgttctgcgccgacaagctttgatgttactgcacggccacaccgaggaaccgcctggactaagtctggatttcctgaagtgctgcaagaggaatacggccgaggaagagaactctgcaaaccctaaccaagaccagaacgcacgccgaagaaagaagaaggagagacgtcctaggggcaccatgcaggctatcaacaatgaaagaaaagcttcgaaagtccttgggattgttttctttgtgtttctgatcatgtggtgcccatttttcattaccaatattctgtctgttctttgtgagaagtcctgtaaccaaaagctcatggaaaagcttctgaatgtgtttgtttggattggctatgtttgttcaggaatcaatcctctggtgtatactctgttcaacaaaatttaccgaagggcattctccaactatttgcgttgcaattataaggtagagaaaaagcctcctgtcaggcagattccaagagttgccgccactgctttgtctgggagggagcttaatgttaacatttatcggcataccaatgaaccggtgatcgagaaagccagtgacaatgagcccggtatagagatgcaagttgagaatttagagttaccagtaaatccctccagtgtggttagcgaaaggattagcagtgtgtgagaaagaacagcacagtcttttcctacggtacaagctacatatgtaggaaaattttcttctttaatttttctgttggtcttaactaatgtaaatattgctgtctgaaaaagtgtttttacatatagctttgcaaccttgtactttacaatcatgcctacattagtgagatttagggttctatatttactgtttataataggtggagactaacttattttgattgtttgatgaataaaatgtttatttttgctctccctcccttctttccttccttttttcctttcttccttcctttctctctttcttttgtgcatatggcaacgttcatgttcatctcaggtggcatttgcaggtgaccagaatgaggcacatgacagtggttatatttcaaccacacctaaattaacaaattcagtggacatttgttctgggttaacagtaaatatacactttacattcttgctctgctcatctacacatataaacacagtaagataggttctgctttctgatacatctgtcagtgagtcagaggcagaacctagtcttgttgttcatataggggcaaaaatttgacattgtcagaatgttgtgttggtatttactgcaatgtctgtccctaaacatagtggtattttaacatagcagctggttaaccgggactacagaagtggaaggataatgagatgtaatacaccaaatagcttttcacttcttaaggacagtgttcaaattctgattattacaacaagcaaactgaaattagtgttttcattctggtccttagtaaattcctaattctatgattaaactgggaaatgagatcccagagttatttcccaacccaggattcaacatcaattgggttttgatctcagcatcctggaaatttgtgtgcttcacacaaagtgaaattagtattttgagccttattaaaatattttcttaattatggtacctctgtctataggacttaatttagcagtccatttttgagtaaaacttgtattggaagtatagatggtagaaactttggaagttttacttgattaaggactacagaattgggcccttagaatgtgaaaaaaaaaagtaattaaaaagacacttttaccgaactcgggattacagaaacacggagtttccatttggattttaaacaaaatttatgtcattttcagatccttccaaactctctagtgcaggaaaaggctgcagctaatttgtgaaagtggcaagctcttcattgcactgcagttatttaccagaagtttaaatctttgttaaaatatagtgttgtgttacaataagtgttggccatcatttcattcgtgggcctgctgctctctaagaattcagtagcattttaatagtttctaaaccatgaaaagttttcaagcattgctaaagtcaggccattcagtctatgctgtgtgcagagtatacaagtgtttctagtaacagtatttccatacgtgcccatttcacacaactgtggataaattttggaagaattcatgatgctagttcttacgcttgacagttacttacacacctgagaatgtgcctctcagtatcttaaaattggttaatgaaaaatctgaatttctaaaacccttggtctgtgttctcaacacacagtatagataaatccaatagtctgccacaagggcagtggaagagctgctgtatttgaggaaactcatacagtctctatttgatttgcaacactgccaaacatcagtcaattgcttgagcatgcccaaatataacatgaaagtcaagtctacctgccttgcctgttaggtctgttgaagtgcatgttaaaataattatatgaagcagaatgagatgatttaattcttaccgaaatgaaaatggctgaagaaacacagcatgcatttagcatgagttctgcacatacagatggtgtcctgcatgtatgccatgtatgttgcatgaatccatcgatttgtattaatgtagggcagaatagctgatagaagaaggactgaagaaaatccttcagcaatccttaaaaagaccatgcattcagatctgaagtagtgtgagtgttagaaaaaactggaaacatctgatttctgaactatcagggcaagctcatagcacatgttttacaaagaaacaaaatataaatcacagatttccaaaagtactagcaataagttgaatgataatagctcacagcacatttgttaatgattcttgtgtcatcaagtagtagtacttaatagtacccaacctggtaattatcctcaagttgtgtgctattcgtaagttctgtgcagtttggtatgaaacaaatatactcatttggatataaatcttacccttcaatgttaaatctacaaacttttataaatgttttaaagaagtccatgtgataattgtaaaggtgatgaatttaccatcaaacaaatcattttgatgtattattatatatgtatatctgtgtaagacacgtgcaacagactgccttatattattttctgtaattcttctcctttgtcaaatggtattttttgtgaatggttgcaaagtgttgtcttattcctaattcctgtatgttatccactacaggttttatgagacttcctattaatttattaaatttattaaatgttg

SEQ ID NO: 9645 - DNA, 2912 bp, Homo sapiens
  source 1..2912: mol_type = unassigned DNA; mol_type = unassigned DNA
agcattcgctctccggagctgcagcctccgaaggggtggcgggggcaacagggacagaaggcaggtcccagaaagcaggttcccccaaaactggcttccctagcacggagttaaggctgcagccggctgcctagagagaagggtgggcagggagacaacgcggtgagagcgactgctctgacgcaccagcccctctcctgcacccacacgctgctggccgcccagcttctccccgatctgggagatgctcggctctgggcggccaaacagcctttccaccaaggcgaggagccctgggctcctgacagcttaggcgggccctggctgcgacacgcagcccctcgcctctgcttccttagcctctgagggcttcagacctgccgcgcttgcagccacaccatctccaacggatgctcactagcaggaaattggggccaaattcacaggcactttccagaaactcccccactggccagaggttgcaaacatccggattggctctgggcacagtggccgccttaagtcctcctgaacaccccttctgcaagtaccccagggcggtctcctgacccagagatggatttacctgtgaacctaacctccttttccctctccaccccctcccctttggagaccaaccacagcctcggcaaagacgacctgcgccccagctcgcccctgctctcggtcttcggagtgcttattctcaccttgctgggctttctggtggcggcgacgttcgcctggaacctgctggtgctggcgaccatcctccgtgtacgcaccttccaccgcgtgccccacaacctggtggcatccatggccgtctcggatgtcctggtggccgcgctggtcatgccgctgagcctggtgcacgagctgtccgggcgccgctggcagctaggtcggaggctgtgccagctttggatcgcgtgcgacgtgctttgctgcacggccagcatctggaacgtgacggccatagccctggaccgctactggtccatcacgcgccacatggaatacacgctccgcacccgcaagtgcgtctccaacgtcatgatcgcgctcacctgggcactctccgctgtcatctctctggccccgctgctttttggctggggagagacgtactctgagggcagcgaggagtgccaggtaagccgcgagccttcctacgccgtgttctccaccgtaggcgccttctacctgccgctctgtgtggtgctcttcgtgtactggaagatctacaaggctgccaagttccgcgtgggctccaggaagaccaatagcgtctcacccatatccgaagctgtggaggtgaaggactctgccaaacagccccagatggtgttcacggtccgccacgccaccgtcaccttccagccagaaggggacacgtggcgggagcagaaggagcagcgggccgccctcatggtgggcatcctcattggcgtgttcgtgctctgctggatccccttctttctcaccgagctcatcagtcccctctgctcctgtgacatccccgccatctggaaaagcatcttcctgtggcttggctactccaactccttctttaaccccctgatctatacggctttcaacaagaactacaacagcgccttcaagaacttcttttctaggcaacactgagggagaggaccaggattgaaaaaagtttcttcccataattcagtggaattcccagttcatccatttcccatccccacccaacagccatgtggacgggatgaatcctcaccattctccagggtcatcttcagaactgcactggcctcttttccacctcctcagtaggaatatgactcctcatagagttacggtgacatgatgtatctaacttatctactatccctttctctgtgctgacagtcatggtctttgcccgcaaagtgtcctttcctccccaaattcactctggcatggtgatcgacattgtcttaaagaagtcaaggcaaataagaaggaggaggtaaaacaatatgggcaggttgagattgaatagaaaagaatgaacaagtcatgatgtagacctctgagggtaggagaccatagttccaggctttctggcacagtccccatttcaaatattctctgtggtcctagtacatatatcctaatactgatggggtatgacccaagagttgaccacaaaacactgtctccaaatatattaaagtatatagtcctatccatgagagcagggaatcttagctttaaggttttgtttgtggcaaccacacacgaacatacacacacacacacacacaactatgaaagaggcaggtgttctagctagctagtttactccaaaatgcaatccgttgacatgaaacaggcactgagggtaactacttcctttcattttgaagcaacagtttataaacaggaaagtctactggtttcatagaatctgtcagatttgtttatttgctactggtttcacgcgcgtggactatattccagtgtttctagtcaaagacctttatcctcaaatcatgagattagagtaaaacaactgctgtaaggttgagcatttcatgaccaatgactatgaaggcacattcaccaaacacaggcactttaagggcatccttgattaatttgctaattgctattttttgttggtatgtgaattcctgctaggaggccgaggctagtaggcaatgaaaaagacagaacaatggtaaaatgcagccccagtcctctacaaattgacagtataatttatgaggtgaggcagttaagtgatgatgcagcatttggatgatcatgtaaaaccagtgtcattacacaaaacttaaaaaaaaatcctaggcaataaaactgcctgtggtctgctatgtctctgactcttcaaatgcatgaattaaagaatgatataataatctctg

SEQ ID NO: 9646 - DNA, 558 bp, Homo sapiens
  source 1..558: mol_type = unassigned DNA; mol_type = unassigned DNA
atgcagtgtaggcattctcacgtcagatcaggtataatctcatcatgaacaagggctgcagcacattttatttggaagcagatcctacttattgcaggtgaaggactctgccaaacagccccagatggtgttcacggtccgccacgccaccgtcaccttccagccagaaggggacacgtggcgggagcagaaggagcagcgggccgccctcatggtgggcatcctcattggcgtgttcgtgctctgctggatccccttctttctcaccgagctcatcagtcccctctgctcctgtgacatccccgccatctggaaaagcatcttcctgtggcttggctactccaactccttctttaaccccctgatctatacggctttcaacaagaactacaacagcgccttcaagaacttcttttctaggcaacactgagggagaggaccaggattgaaaaaagtttcttcccataattcagtggaattcccagttcatccatttcccatccccacccaacagccatgtggacgggatgaatcctcaccattctccagggtcatctt

SEQ ID NO: 9647 - DNA, 2703 bp, Homo sapiens
  source 1..2703: mol_type = unassigned DNA; mol_type = unassigned DNA
acacgaagagcaccacacagagcggcaggtagaaggcgcctacggtggagaacacggcgtaggaaggctcgcggcttacctggcactcctcgctgccctcagagtacgtctctccccagccaaaaagcagcggggccagagagatgacagcggagagtgcccaggtgagcgcgatcatgacgttggagacgcacttgcgggtgcggagcgtgtattccatgtggcgcgtgatggaccagtagcggtccagggctatggccgtcacgttccagatgctggccgtgcagcaaagcacgtcgcacgcgatccaaagctggcacagcctccgacctagctgccagcggcgcccggacagctcgtgcaccaggctcagcggcatgaccagcgcggccaccaggacatccgagacggccatggatgccaccaggttgtggggcacgcggtggaaggtgcgtacacggaggatggtcgccagcaccagcaggttccaggcgaacgtcgccgccaccagaaagcccagcaagagtaaaacaagtatcaggagaatgcactgagaaaagagaaagtcctccactggaacctagaggacgggacaacatcattaaataccggattattcacagggctgtttcaaacaccacttaaaaacagctgatggtgactgcctgcatgcagagcaactgtgcatggccccaatctggaagcaagcttgtgcttctttaaggcaaatcaccttcttgaggtcatggaactaatgggaatgagatgtaaactatgaatcctcttctttggaaaaagttctgcatctagtctcagggcctgttatctggaggaatggatgaactgtgttgcccacaggcgggcctcaatggatctctatgaatcttgaaaggcattatgggcttgtgattatattccctactgattccccaggccacagctgtctgtattgatagctaagtgagcagcagaatagttaataaggacaaagccaaggatgactgaggataatttgtgaaaaatagagtgtcataaatttagggactgaatagaatattcccacaaaggagagatccaatggagcatttccagaagggacaaaccctgttcagaaagtctggcttatctcttaaaaatacacaaataaaaaatcataatatttcagcttcatcttaaagcatagccccaattttatcttgaaaaacactgaaaaggaaaagaatctgaaaaggtataaaactcccgtctgccatatggtacctctgaaatggcagtattgggaaatataccttcctgggttgtcacctcttatgggttaaactgtgtctctccttcccccctcccttaccccctgccagatttatatatggaagtcctaacccctagaacctcatagtgtgactatatttagaaataagatctttaaagggatgattaagttaaaatgaggccataggatagggcctcattcaatctgactgacatccttatgaaaagaggaaatttagacatgcaaagagacaccaaggatgtgtgtgtgcataggatagaccacgtgagaataaagcaagaaggtggccatctacaagccaaggagagagacattagaagataccagtattggaagattagaagatatcaagattggatttccagctgccagaactaggaaaaaataaatttctagtatgagccactcagtctgtggtattttgttatggcagccctagcaagctaatataccatccgacaaaagatactagcaaaagatacaaccacataactgaacgaggtgctatactggagaagagggaattatagacatataaacaaatcatgggacatctactaaaacctttccaaaaggtagtttgcagccatctagcaatcattcgagtgcagactcagttgtctattgaggttacttacggtttgtaatcaagtcatgtcactggcttatagaaaaatacttattttagatttttctataatgggaaggtatgaatctatttcattcaagtaggagctgattttttggtttgtttttgcttctgttttttgagacagagtctcactctgtcatccaggctggagtgcagtggcacaatcttggctcactgcaacttccatcttccgggttcaagcgattcccagctaagttttttgtatttgtagtagagatggggattttaccatgttgtccaggctggtctcgaactcctgacctcaattgatccatccccatcagcctcccaaattgttggaattacaggcctaagccaccacacccggccaagaccaacgaattttaatgtaacagcataataaacatgcatgatacaatttcagattccacatcacaacaaatctttaaggtgctaccactcattgagttttaatatagcatcacagaaaaaatatccataattatctgaaaatagtattaaagtactctattgtctgctgtatatctgtatgaaagtggatgttcttcacaatcttaaactaaaataacatatcccaacagatggaatgtagaaacatatgatgttctagctgtcttgaagagatttgcaaaaatgttaatgctattcagaaatattttatgaaaaataattatttttcataatgaggtatcacttatatagacatgtaatgggtttattttatttttaataaacaaatacacaaatatgttgaaaa

SEQ ID NO: 9648 - DNA, 551 bp, Homo sapiens
  source 1..551: mol_type = unassigned DNA; mol_type = unassigned DNA
acacgaagagcaccacacagagcggcaggtagaaggcgcctacggtggagaacacggcgtaggaaggctcgcggcttacctggcactcctcgctgccctcagagtacgtctctccccagccaaaaagcagcggggccagagagatgacagcggagagtgcccaggtgagcgcgatcatgacgttggagacgcacttgcgggtgcggagcgtgtattccatgtggcgcgtgatggaccagtagcggtccagggctatggccgtcacgttccagatgctggccgtgcagcaaagcacgtcgcacgcgatccaaagctggcacagcctccgacctagctgccagcggcgcccggacagctcgtgcaccaggctcagcggcatgaccagcgcggccaccaggacatccgagacggccatggatgccaccaggttgtggggcacgcggtggaaggtgcgtacacggaggatggtcgccagcaccagcaggttccaggcgaacgtcgccgccaccagaaagcccagcaaggcagccggctgcagccttaactccgtg

SEQ ID NO: 9649 - DNA, 2120 bp, Homo sapiens
  source 1..2120: mol_type = unassigned DNA; mol_type = unassigned DNA
caatgggctgggccgcgcggccgcgcgcactcgcacccgctgcccccgaggccctcctgcactctccccggcgccgctctccggccctcgccctgtccgccgccaccgccgccgccgccagagtcgccatgcagatcccgcgcgccgctcttctcccgctgctgctgctgctgctggcggcgcccgcctcggcgcagctgtcccgggccggccgctcggcgcctttggccgccgggtgcccagaccgctgcgagccggcgcgctgcccgccgcagccggagcactgcgagggcggccgggcccgggacgcgtgcggctgctgcgaggtgtgcggcgcgcccgagggcgccgcgtgcggcctgcaggagggcccgtgcggcgaggggctgcagtgcgtggtgcccttcggggtgccagcctcggccacggtgcggcggcgcgcgcaggccggcctctgtgtgtgcgccagcagcgagccggtgtgcggcagcgacgccaacacctacgccaacctgtgccagctgcgcgccgccagccgccgctccgagaggctgcaccggccgccggtcatcgtcctgcagcgcggagcctgcggccaagggcaggaagatcccaacagtttgcgccataaatataactttatcgcggacgtggtggagaagatcgcccctgccgtggttcatatcgaattgtttcgcaagcttccgttttctaaacgagaggtgccggtggctagtgggtctgggtttattgtgtcggaagatggactgatcgtgacaaatgcccacgtggtgaccaacaagcaccgggtcaaagttgagctgaagaacggtgccacttacgaagccaaaatcaaggatgtggatgagaaagcagacatcgcactcatcaaaattgaccaccagggcaagctgcctgtcctgctgcttggccgctcctcagagctgcggccgggagagttcgtggtcgccatcggaagcccgttttcccttcaaaacacagtcaccaccgggatcgtgagcaccacccagcgaggcggcaaagagctggggctccgcaactcagacatggactacatccagaccgacgccatcatcaactatggaaactcgggaggcccgttagtaaacctggacggtgaagtgattggaattaacactttgaaagtgacagctggaatctcctttgcaatcccatctgataagattaaaaagttcctcacggagtcccatgaccgacaggccaaaggaaaagccatcaccaagaagaagtatattggtatccgaatgatgtcactcacgtccagcaaagccaaagagctgaaggaccggcaccgggacttcccagacgtgatctcaggagcgtatataattgaagtaattcctgataccccagcagaagctggtggtctcaaggaaaacgacgtcataatcagcatcaatggacagtccgtggtctccgccaatgatgtcagcgacgtcattaaaagggaaagcaccctgaacatggtggtccgcaggggtaatgaagatatcatgatcacagtgattcccgaagaaattgacccataggcagaggcatgagctggacttcatgtttccctcaaagactctcccgtggatgacggatgaggactctgggctgctggaataggacactcaagacttttgactgccattttgtttgttcagtggagactccctggccaacagaatccttcttgatagtttgcaggcaaaacaaatgtaatgttgcagatccgcaggcagaagctctgcccttctgtatcctatgtatgcagtgtgctttttcttgccagcttgggccattcttgcttagacagtcagcatttgtctcctcctttaactgagtcatcatcttagtccaactaatgcagtcgatacaatgcgtagatagaagaagccccacgggagccaggatgggactggtcgtgtttgtgcttttctccaagtcagcacccaaaggtcaatgcacagagaccccgggtgggtgagcgctggcttctcaaacggccgaagttgcctcttttaggaatctctttggaattgggagcacgatgactctgagtttgagctattaaagtacttcttacacattgc

SEQ ID NO: 9650 - DNA, 1214 bp, Homo sapiens
  source 1..1214: mol_type = unassigned DNA; mol_type = unassigned DNA
ggcaagctgcctgtcctgctgcttggccgctcctcagagctgcggccgggagagttcgtggtcgccatcggaagcccgttttcccttcaaaacacagtcaccaccgggatcgtgagcaccacccagcgaggcggcaaagagctggggctccgcaactcagacatggactacatccagaccgacgccatcatcaactatggaaactcgggaggcccgttagtaaacctggacggtgaagtgattggaattaacactttgaaagtgacagctggaatctcctttgcaatcccatctgataagattaaaaagttcctcacggagtcccatgaccgacaggccaaaggaaaagccatcaccaagaagaagtatattggtatccgaatgatgtcactcacgtccagcaaagccaaagagctgaaggaccggcaccgggacttcccagacgtgatctcaggagcgtatataattgaagtaattcctgataccccagcagaagctggtggtctcaaggaaaacgacgtcataatcagcatcaatggacagtccgtggtctccgccaatgatgtcagcgacgtcattaaaagggaaagcaccctgaacatggtggtccgcaggggtaatgaagatatcatgatcacagtgattcccgaagaaattgacccataggcagaggcatgagctggacttcatgtttccctcaaagactctcccgtggatgacggatgaggactctgggctgctggaataggacactcaagacttttgactgccattttgtttgttcagtggagactccctggccaacagaatccttcttgatagtttgcaggcaaaacaaatgtaatgttgcagatccgcaggcagaagctctgcccttctgtatcctatgtatgcagtgtgctttttcttgccagcttgggccattcttgcttagacagtcagcatttgtctcctcctttaactgagtcatcatcttagtccaactaatgcagtcgatacaatgcgtagatagaagaagccccacgggagccaggatgggactggtcgtgtttgtgcttttctccaagtcagcacccaaaggtcaatgcacagagaccccgggtgggtgagcgctggcttctcaaacggccgaagttgcctcttttaggaatctctttggaattgggagcacgatgactctgagtttgagctattaaagtacttcttacacattg

SEQ ID NO: 9651 - DNA, 7385 bp, Homo sapiens
  source 1..7385: mol_type = unassigned DNA; mol_type = unassigned DNA
ggcgccgccggaccgcgccccaccccgcgcgcccgagcagggcgactgtcattagcttcctggacgggacccggggcgggatcctggtgtcctgaaaggggcccgggcgaccctaagaggaagaacttttgggggcggggtccccggtcccgcgtcccctgggcagccgctattgtctacgcgcctcgctgggcggcgcggggggcgtgatcgcggcggccccgggctctgggtgcggagacccaggcggggctgggcccagggcggcggcgggagaagccggggaagccgaagagcctggggaggaggagctgcgagcgcgggagacgagcaggagccgcgcgggccgcggcgagcgcgatgccggcggcggcgggggacgggctcctgggggagccggcggcgcctgggggcggcggcggcgcggaggacgcggccaggcccgcggcggcctgcgagggaagtttcctgcctgcctgggtgagcggcgtgccccgcgagcggctccgcgacttccagcaccacaagcgcgtgggcaactacctcatcggcagcaggaagctgggcgagggctcctttgccaaggtgcgcgaggggctgcacgtgctgaccggggagaaggtggccataaaagtcattgataagaagagagccaaaaaggacacctatgtcaccaaaaacctgcggcgagagggtcagatccagcagatgatccgccaccccaatatcactcagctccttgatattttagaaacggaaaacagctactacctggtcatggagctgtgccctgggggcaacctgatgcacaagatctatgagaagaagcggctggaggagtccgaagcccgcagatacatccgacagctcatctctgccgtagagcacctgcaccgggccggggtggtccacagagacttgaagatagagaatttgctactagatgaagacaataatatcaagctgattgactttggtttgagcaactgcgcagggatcctgggttactcggatccgttcagcacacagtgtggcagccctgcctacgctgcacctgaactgctcgccaggaagaaatacggccccaaaatcgatgtctggtccataggtgtgaacatgtatgccatgttgaccgggacgctgcctttcacggtggagcctttcagcctgagggctttgtaccagaagatggtagacaaagaaatgaaccccctccccactcagctctccacaggtgccatcagtttcctgcgctctctcctggaaccggatcctgtgaagaggccaaatattcagcaggcactggcgaatcgctggcttaatgagaattacacgggcaaagtgccctgtaatgtcacctatcccaacaggatttctctggaagatctgagcccgagcgtcgtgctgcacatgaccgagaagctgggttacaagaacagcgacgtgatcaacactgtgctctccaaccgcgcctgccacatcctggccatctacttcctcttaaacaagaaactggagcgctatttgtcagggaaatctgacatccaggacagcctctgctacaagacccggctctaccagatagaaaagtacagggcccccaaggagtcctatgaggcctctctggacacctggacacgagatcttgaattccatgccgtgcaggataaaaagcccaaagaacaagaaaaaagaggggattttcttcatcgaccattctccaagaagttggacaagaacctgccctcgcacaaacagccctcaggctcgcttatgacacagattcagaacaccaaagccctcctgaaggaccggaaggcctccaagtccagcttccccgacaaagattcctttggctgccgcaatattttccgcaaaacctcagattccaattgtgtggcttcttcttccatggagttcatccccgtgccaccgcccaggaccccgaggattgtgaagaaaccggagccccatcagccagggcccggaagcactggcatcccccacaaggaagaccccctgatgctggacatggtgcgctccttcgagtctgtggatcgcgacgaccacgtagaagtgctgtctccctctcatcactacaggattctgaactccccggtcagcttggctcgcagaaattccagcgagaggacgctgtccccgggtctgccatccggaagcatgtcgcctctccatactcctttgcatccaactctggtctcttttgctcacgaagataagaacagccccccaaaagaggagggcctgtgttgcccacctccggttcccagcaatggccccatgcagcctctggggagccccaattgtgtgaaaagccgaggccggttccctatgatgggcatcggacagatgttaaggaagcgccatcagagtctgcagccatctgcagataggcccctggaggccagcctgcccccactgcagcccctagcccctgtgaaccttgcctttgacatggccgatggggtcaagacccagtgctaacttgggccagcggggtttggggtatctctagaaaacagcaactgaacagagctccacacatctgtcagggtgtgagcactccaaggcctcgcgtggagcatccttagtcccacctgtagctgaatccacagacccaaagcctgcacaacccaacctcgcttagggacccccagagatgctggaatcgctaggagggttggctccaggggcagccaattcctatcattcagatcttccttcctcccaagtactcaccaaccccttccacttcccacttcccccaggcttggggggaaaacagggcatgagccttctggggcactcagattatggactgttaccagatctttcttcacgctgtgctacatgtgtgcctctcacagcagttggccacagttacagggagagaacaatatcacagtcattcatccaggccacgtttcctctgcggagtgtagcagccctgcctttcatagcagggattacctgaaggccagcaggagccgggggcaggcccaggatcctcagaggaagatggagaggagcttcggaccaagatcaaaccaaacagtggggaccccaacagaagagaaagactgaaggagacactcatttcccaagcaagattttgatagatttttgttgttgttgttgttgaaacatgctaatgattgaattatcttttccaaagattttttttaaatgtgatgtcggtaaattgaaataacataattttttaaaacttggatggagagatgagaagcaattccaccaaactcatgttttcacaggagggttcagtgtggagagcaaaaaagctgactgtggtgatttgctgagtgctgtggcccacaggcagggcaagtctcggtggccctgtgttcatcctgttgtttaaggcatagccctgatccttctggaaggcatagaacacggttacagctggttctgtagaaagagggaaaagatgattgtgacaattcagagcataactcagatggcgagaaggcagcattatctctgtgcgatgctgatttcaagctgcccacagaactggtgcggctcagagctcggcgagtttgctgggagctgggagcaggcttgcctggcagagaacctgttcagatacaggccagtttcttcttcgaggaaagccaagctcctcaaacagggttcagtccacgttgtgttttcacacctttctccaaggatcgaaccaaagatgtgtctccagtattgtgtctgtgcccctgtgtgtgttttgtggacagccgtgttgtctgactgtatccagctggcacttgacagggtgcagtcattggtgagaagaatcagaaaaagaagacccatcagcacaggttggataggggttagtgtaggagaccagttacagaatggcctggagtcttcaacttttgaccggtgcaggtgtgaccagagaccacctctgtggccacctcagatagtcatctcagtccaaggatcccaaaacacaaatctagaattgcaaagccagcctttatttccctggcaggcagccttgccagaaggcagagaggcagttctgaatcattctctcattcaccagtggtgacatccttcagtccctcacatctctgacagagcgggacagaatggatatttggctgaccttggtgagacctggagctgcctgtttcttccctaggggatcaccacggctctagggcattctaggatgaggtcagaccccttggccattggtgttattttttgtatagcttcagactgggttccagaacttaccattgaaaacagagcttttaggccaggtgtggtggctcacacctgtaatcccagcactttgggaggccgaggcaggtggatcgcttgagctcaggagttcgagagcagcctgggcaacatggtgaaagcccgtctctaccgaaaaatacaaaaaaaaatagctgggtgtggtggtacgtgcctgtagtcccagctacttcggggactgaggtgggaggatcacttgaacctaggaggtcgaggctgcagtgagccaagatcatgctactgcactccagcttaggtggcaaagtgagaccctgtctccaaaaaaagaaaatagagctttataagcagagagaagaaaataatcatctaagaccatctctccattcgacatgaagtgtaccttttctaaagacggtttccagctgcaacggctccactttgcaggcttgcagggtgtatacctgcgcattgggaacttgctggaacccctgatgcattttccttgagagcaggggtacttccgccttgccgttagcttgtggagaacgtgcttcttattcctggcaggcttcaagaacagctgcacatgtgccgctaactgaccgcgttgccattggcgacctggactctgaactcaggtttattctaaacccagtgagaggtgagggggagtgatgaaaggggatcagctgtatttgtgtgtgtgtgtgtgtgtgagcacctgacaaatctatgaaaccgagtgaaaggagaaatgttagattctttattattttattatatttatatggaaagctcgactctccctttggtaagtccgaagcatgttgtctgttcgaccgtgactgtcttcctcagtctgtgcctgtgattccagtcaccctgtagttactgacagaaattgactggactgtcattgtgtgaagtctaggaggaaatgtccattttaattgtatgatttggtcataagtaaggactatatttatgtcaccattattagatatatgtacttttgtaatgactgtgaaatacacttttccctcactacgactgcttctttatttgctgataaatcttaaaacaactaagtacgttgcaaataatagtacaggtaccatcttttatgtgaagttctttttctttttttgagacagggtcttgctctgtcacccaggctggagtgcagtggcacaatcacagttcactgcagcctcaacctctccagattcaagtgatcctcccatctcagcctcccaagtagctgggactacagttgtgcaccacaatgcctagctaattttttttgtattttgtagaaatggggtttcgccatgttgctcaggctgatctcaaactcctgggctccaacgatctgcccaccttggcctcccaaagtgctgagattacaggcgtgagccactgtgcctggccttatgtaaagctcttgacctagcatctgactggaaacaagcgggaattgcattggggggcattttctgggccagtttccctgccttattttacctgcaataggtgtgcctacaaaagtctttctgacatacacactgcaggtggcagttcaagaagaatcaacctttttcatttggggatattaggatcttccttggagactctgaaaatggcacacaaagaatggcagttatgaacgtgacttctagattttgtccttgtaggaggccttggtcatggataggggaagagggatgatgggatggaatgggagggtgggatctagatgacctcttgaaattgtcccagttactgcttccttcataactgttcacaaaacgtttttcatatataccaccttgtttcccctgggaagtgaggggacgaagccttagagggtgacatagctagaaagtggagaagctcactgttcactgtgcaaagccccagtagtcggattccggggaaaagaacaagtatctagttttgatgacaatgttttcttgtaagaatcccaacactttagaatagaaaaggacctaagattctctggctcagccccagcctttctgaagaagggaaaactagggacccagatggtttaaggacaccccagagtccccagatgagctggcatttgagctggtctggagcagagtttctccctcaaagaacacagagaaatcagagagtggctgccatggtcagagggggatgtcaacaacagatcaagccgtcatcacaacaggtatttctgaagttcctgcagggactaggtcttgcatttttaagtccttttcaaaactgtgcagcttcctgaaccttatgctgtttgtcccatccactcttgaagctggggaaagacagctttctttgggaactctgtctttctcagttgacttcccaagtaagcagcaaacccctggatagccttgttatctactttaggtattaagaggctattgggttttactagattaaatcaataaaacatttcctatagagccatatcatacactgaagcaaattcagaaagaatgcaaaactgctatcttttgggggagtctggaagcctgttggttagtgtatttattttctttgtggggtcttctgtgagctacaggcacagtaagaataattcagagcggtactgggagttggttcaatttcatgtcatcacttttcaatgaagggagtgcatttcctgagtagtaaatgagtatattatttgtggcagcttttctgttaagggagctttccagacatctggttgcaaagacaaataggatatatatttgtacttcttctctgtggacatgtttttgtgacacacagttatctctaggagttgacgtctgtgggcactaagggactgaggttgggggagaaagctgaggaggctttggaagagaaggtgaggagcatttcaggatttgcagtccccctccacatgtatccacatctgagctggtggtgttccaataatgaggcatttggggcaaccaattttggaaggatagaatagctttatgtggagcaaacttgaggatcaattggagttgagtggtttaaaacttaaagatggcacaggaagctgtatcatttacaggtgaaaaaaataaatgggtctgacttca

SEQ ID NO: 9652 - DNA, 486 bp, Homo sapiens
  source 1..486: mol_type = unassigned DNA; mol_type = unassigned DNA
cagatgatccgccaccccaatatcactcagctccttgatattttagaaacggaaaacagctactacctggtcatggagctgtgccctgggggcaacctgatgcacaagatctatgagaagaagcggctggaggagtccgaagcccgcagatacatccgacagctcatctctgccgtagagcacctgcaccgggccggggtggtccacagagacttgaagatagagaatttgctactagatgaagacaataatatcaagctgattgactttggtttgagcaactgcgcagggatcctgggttactcggatccgttcagcacacagtgtggcagccctgcctacgctgcacctgaactgctcgccaggaagaaatacggccccaaaatcgatgtctggtccatgtgccatcagtttcctgcgctctctcctggaaccggatcctgtgaagaggccaaatattcagcaggcactggcgaatcgctggct

SEQ ID NO: 9653 - DNA, 832 bp, Homo sapiens
  source 1..832: mol_type = unassigned DNA; mol_type = unassigned DNA
agatgctattaagtgattattaaaattttattgggtatgttgatggtattgcggttctgtgggggacatctttggtttttgaaggtgcacactcaagggttaaggggtaaaatgtcatgatgtttgtaatttaaaatacttcagcaaaaaaaaaatgcaaggatggcaaagtgatcactggtatatctagatgatggtatacataaagtgattgtactattccctccgcttttctgaatacgagaacattttcaaaataaaaactcaagtcagtgaatgaatgagtgaatgaatgaagctgattgtgcccagggggtctgtgtggggctctccgtgaagtgcaggggtgactggtcctctctctctgcacctcgcaggatttctctggaagatctgagcccgagcgtcgtgctgcacatgaccgagaagctgggttacaagaacagcgacgtgatcaacactgtgctctccaaccgcgcctgccacatcctggccatctacttcctcttaaacaagaaactggagcgctatttgtcagggaaatctgacatccaggacagcctctgctacaagacccggctctaccagatagaaaagtacagggcccccaaggagtcctatgaggcctctctggacacctggacacgagatcttgaattccatgccgtgcaggataaaaagcccaaagaacaagaaaaaagaggggattttcttcatcgaccattctccaagaagttggacaagaacctgccctcgcacaaacagccctcaggctcgcttatgacacagattcagaacaccaaagccctcctgaaggaccggaaggcctcca

SEQ ID NO: 9654 - DNA, 860 bp, Homo sapiens
  source 1..860: mol_type = unassigned DNA; mol_type = unassigned DNA
cgctatttgtcagggaaatctgacatccaggacagcctctgctacaagacccggctctaccagatagaaaagtacagggcccccaaggagtcctatgaggcctctctggacacctggacacgagatcttgaattccatgccgtgcaggataaaaagcccaaagaacaagaaaaaagaggggattttcttcatcgaccattctccaagaagttggacaagaacctgccctcgcacaaacagccctcaggctcgcttatgacacagattcagaacaccaaagccctcctgaaggaccggaaggcctccaagtccagcttccccgacaaaggactctcctgaggatggaggcccttgtcaccgggcatcttgaaaggacatcctgccattgttcacaggactcaactacagactgctcttccagatcttgaaataagtaccccctggcctggctcaggagcctgctaggacctgcacaagatggtgtgtggacacagcccaaggcttcccttccacgcggtgggaggccgaggagtgagaaagcggaattccgctgtgcaggggagctgaccgatgcaccccggggggacgccggccaagtgaatggggtcactccaaggccagggactctccacatcttccatggtgtgacctggatccccacacatgtggtgtcaatcaaaacattgctctagcccggggtgttactcccttcctggcccctgcgctttgtgtgcttgggccgcatgccccgcctccccactccacgaagtgtgagacagcaagacatgaacttgcttgatacctggtccccctgacacgcagctggagcacgcagcatccccacgtgtccagagactgcg

SEQ ID NO: 9655 - DNA, 3000 bp, Homo sapiens
  source 1..3000: mol_type = unassigned DNA; mol_type = unassigned DNA
gtcctctagcccagctcctcggctcgcgctctcctcgcctcctgtgctttccccgccgcggcgatgccagggccttcgccagggctgcgccgggcgctactcggcctctgggctgctctgggcctggggctcttcggcctctcagcggtctcgcaggagcccttctgggcggacctgcagcctcgcgtggcgttcgtggagcgcgggggctcgctgtggctgaattgcagcaccaactgccctcggccggagcgcggtggcctggagacctcgctgcgccgaaacgggacccagaggggtttgcgttggttggcgcggcagctggtggacattcgcgagccggagactcagcccgtctgcttcttccgctgcgcgcggcgcacactacaggcgcgtgggctcattcgcactttccagcgaccagatcgcgtagagctgatgccgctgcctccctggcagccggtgggcgagaacttcaccctgagctgtagggtccccggcgccgggccccgtgcgagcctcacgctgaccctgctgcggggcgcccaggagctgatccgccgcagcttcgccggtgaaccaccccgagcgcggggcgcggtgctcacagccacggtactggctcggagggaggaccatggagccaatttctcgtgtcgcgccgagctggacctgcggccgcacggactgggactgtttgaaaacagctcggcccccagagagctccgaaccttctccctgtctccggatgccccgcgcctcgctgctccccggctcttggaagttggctcggaaaggcccgtgagctgcactctggacggactgtttccagcctcagaggccagggtctacctcgcactgggggaccagaatctgagtcctgatgtcaccctcgaaggggacgcattcgtggccactgccacagccacagctagcgcagagcaggagggtgccaggcagctggtctgcaacgtcaccctggggggcgaaaaccgggagacccgggagaacgtgaccatctacagcttcccggcaccactcctgaccctgagcgaacccagcgtctccgaggggcagatggtgacagtaacctgcgcagctggggcccaagctctggtcacactggagggagttccagccgcggtcccggggcagcccgcccagcttcagctaaatgccaccgagaacgacgacagacgcagcttcttctgcgacgccaccctcgatgtggacggggagaccctgatcaagaacaggagcgcagagcttcgtgtcctatacgctccccggctagacgattcggactgccccaggagttggacgtggcccgagggcccagagcagacgctgcgctgcgaggcccgcgggaacccagaaccctcagtgcactgtgcgcgctccgacggcggggccgtgctggctctgggcctgctgggtccagtcactcgggcgctctcaggcacttaccgctgcaaggcggccaatgatcaaggcgaggcggtcaaggacgtaacgctaacggtggagtacgcaccagcgctggacagcgtgggctgcccagaacgcattacttggctggagggaacagaagcctcgctgagctgtgtggcgcacggggtaccgccgcctgatgtgatctgcgtgcgctctggagaactcggggccgtcatcgaggggctgttgcgtgtggcccgggagcatgcgggcacttaccgctgcgaagccaccaaccctcggggctctgcggccaaaaatgtggccgtcacggtggaatatggccccaggtttgaggagccgagctgccccagcaattggacatgggtggaaggatctgggcgcctgttttcctgtgaggtcgatgggaagccacagccaagcgtgaagtgcgtgggctccgggggcgccactgagggggtgctgctgccgctggcacccccagaccctagtcccagagctcccagaatccctagagtcctggcacccggtatctacgtctgcaacgccaccaaccgccacggctccgtggccaaaacagtcgtcgtgagcgcggagtcgccaccggagatggatgaatctacctgcccaagtcaccagacgtggctggaaggggctgaggcttccgcgctggcctgcgccgcccggggtcgcccttccccaggagtgcgctgctctcgggaaggcatcccatggcctgagcagcagcgcgtgtcccgagaggacgcgggcacttaccactgtgtggccaccaatgcgcatggcacggactcccggaccgtcactgtgggcgtggaataccggccagtggtggccgaacttgctgcctcgccccctggaggcgtgcgcccaggaggaaacttcacgttgacctgccgcgcggaggcctggcctccagcccagatcagctggcgcgcgcccccgggggccctcaacatcggcctgtcgagcaacaacagcacactgagcgtggcaggcgccatgggaagccacggcggcgagtacgagtgcgcagccaccaacgcgcacgggcgccacgcgcggcgcatcacggtgcgcgtggccggtccgtggctatgggtcgccgtgggcggcgcggcggggggcgcggcgctgctggccgcgggggccggcctggccttctacgtgcagtccaccgcctgcaagaagggcgagtacaacgtgcaggaggccgagagctcaggcgaggccgtgtgtctgaacggagcgggcggcggcgctggcggggcggcaggcgcggagggcggacccgaggcggcggggggcgcggccgagtcgccggcggagggcgaggtcttcgccatacagctgacatcggcgtgagcccgctcccctctccccgcgggccgggggacgccccccagactcacacgggggcttatttattgctttatttatttacttattcatttatttatgtattcaactccaagggcgtcacccccattttctacccatcccctcaataaagtttttataaaggaa

SEQ ID NO: 9656 - DNA, 928 bp, Homo sapiens
  source 1..928: mol_type = unassigned DNA; mol_type = unassigned DNA
agctcctcggctcgcgctctcctcgcctcctgtgctttccccgccgcggcgatgccagggccttcgccagggctgcgccgggcgctactcggcctctgggctgctctgggcctggggctcttcggcctctcaggtaagagccccgctctggttcggggtggacagggcgggggcggagtccctggacctgagaaacggcctcctgtccctcccagctctgccctcgcctcgctcccacgcctctgcccccacctcgagcctgagtcttctccccttccccctcctccccaacacacacccgagccccagcttcctgactcctcgatagcccctacccgcttcgagatcctaggtgttcttccgcacccaacccttcgccctggagacccagtgtctctcctgtccgctccccgggtacctccttacgctgtgctgtgcaccatggtccacggactggcatcttccccactcgcggtccgcgaagactccatctctccaactaccctgactcagaggcgctgttcccgctccacccagagccctggcaaccgggtccctcagctgttcccgcggttccttccatgagcccagccttgcgtcccggctccgtgttcttcaccgggtgtagggtccttcctgatccttgacccagcctcgtctctcctttgcccttgccgcaaacgcactctcctcgtatcccggcattctgccaggaccctgagaactggttcatcccccatcccccatcccgggtccccttctctcagccttgctgtgttcatccaagaacccacctttcctctcctctacgccctccccccatgctttcccgccgctccatcggcgctttggagaccatggctctctgctaccacgtcccagagacaccctcgaggtttagactctgggagtgcgcctttaaaccgga

SEQ ID NO: 9657 - DNA, 567 bp, Homo sapiens
  source 1..567: mol_type = unassigned DNA; mol_type = unassigned DNA
gtgctttccccgccgcggcgatgccagggccttcgccagggctgcgccgggcgctactcggcctctgggctgctctgggcctggggctcttcggcctctcagcggtctcgcaggagcccttctgggcggacctgcagcctcgcgtggcgttcgtggagcgcgggggctcgctgtggctgaattgcagcaccaactgccctcggccggagcgcggtggcctggagacctcgctgcgccgaaacgggacccagaggggtttgcgttggttggcgcggcagctggtggacattcgcgagccggagactcagcccgtctgcttcttccgctgcgcgcggcgcacactacagagcgaccagatcgcgtagagctgatgccgctgcctccctggcagccggtgggcgagaacttcaccctgagctgtagggtccccggcgccgggccccgtgcgagcctcacgctgaccctgctgcggggcgcccaggagctgatccgccgcagcttcgccggtgaaccaccccgagcgcggggcgcggtgctcacagccacggtactggctcggagggagga

SEQ ID NO: 9658 - DNA, 624 bp, Homo sapiens
  source 1..624: mol_type = unassigned DNA; mol_type = unassigned DNA
tcctccccgccctctgagaacccttgactcgacataggggcgctaagatgtcagggagttggctccccaggctcagcccgcgtttccctgggcagcggtctcgcaggagcccttctgggcggacctgcagcctcgcgtggcgttcgtggagcgcgggggctcgctgtggctgaattgcagcaccaactgccctcggccggagcgcggtggcctggagacctcgctgcgccgaaacgggacccagaggggtttgcgttggttggcgcggcagctggtggacattcgcgagccggagactcagcccgtctgcttcttccgctgcgcgcggcgcacactacaggcgcgtgggctcattcgcactttccagcgaccagatcgcgtagagctgatgccgctgcctccctggcagccggtgggcgagaacttcaccctgagctgtagggtccccggcgccgggccccgtgcgagcctcacgctgaccctgctgcggggcgcccaggagctgatccgccgcagcttcgccggtgaaccaccccgagcgcggggcgcggtgctcacagccacggtactggctcggagggaggaccatggagccaatttctcgtgtcgcgccgagctggacct

SEQ ID NO: 9659 - DNA, 2599 bp, Homo sapiens
  source 1..2599: mol_type = unassigned DNA; mol_type = unassigned DNA
ctcttcccccttgcagagcgaccagatcgcgtagagctgatgccgctgcctccctggcagccggtgggcgagaacttcaccctgagctgtagggtccccggcgccgggccccgtgcgagcctcacgctgaccctgctgcggggcgcccaggagctgatccgccgcagcttcgccggtgaaccaccccgagcgcggggcgcggtgctcacagccacggtactggctcggagggaggaccatggagccaatttctcgtgtcgcgccgagctggacctgcggccgcacggactgggactgtttgaaaacagctcggcccccagagagctccgaaccttctccctgtctccggatgccccgcgcctcgctgctccccggctcttggaagttggctcggaaaggcccgtgagctgcactctggacggactgtttccagcctcagaggccagggtctacctcgcactgggggaccagaatctgagtcctgatgtcaccctcgaaggggacgcattcgtggccactgccacagccacagctagcgcagagcaggagggtgccaggcagctggtctgcaacgtcaccctggggggcgaaaaccgggagacccgggagaacgtgaccatctacagcttcccggcaccactcctgaccctgagcgaacccagcgtctccgaggggcagatggtgacagtaacctgcgcagctggggcccaagctctggtcacactggagggagttccagccgcggtcccggggcagcccgcccagcttcagctaaatgccaccgagaacgacgacagacgcagcttcttctgcgacgccaccctcgatgtggacggggagaccctgatcaagaacaggagcgcagagcttcgtgtcctatacgctccccggctagacgattcggactgccccaggagttggacgtggcccgagggcccagagcagacgctgcgctgcgaggcccgcgggaacccagaaccctcagtgcactgtgcgcgctccgacggcggggccgtgctggctctgggcctgctgggtccagtcactcgggcgctctcaggcacttaccgctgcaaggcggccaatgatcaaggcgaggcggtcaaggacgtaacgctaacggtggagtacgcaccagcgctggacagcgtgggctgcccagaacgcattacttggctggagggaacagaagcctcgctgagctgtgtggcgcacggggtaccgccgcctgatgtgatctgcgtgcgctctggagaactcggggccgtcatcgaggggctgttgcgtgtggcccgggagcatgcgggcacttaccgctgcgaagccaccaaccctcggggctctgcggccaaaaatgtggccgtcacggtggaatatggccccaggtttgaggagccgagctgccccagcaattggacatgggtggaaggatctgggcgcctgttttcctgtgaggtcgatgggaagccacagccaagcgtgaagtgcgtgggctccgggggcgccactgagggggtgctgctgccgctggcacccccagaccctagtcccagagctcccagaatccctagagtcctggcacccggtatctacgtctgcaacgccaccaaccgccacggctccgtggccaaaacagtcgtcgtgagcgcggagtcgccaccggagatggatgaatctacctgcccaagtcaccagacgtggctggaaggggctgaggcttccgcgctggcctgcgccgcccggggtcgcccttccccaggagtgcgctgctctcgggaaggcatcccatggcctgagcagcagcgcgtgtcccgagaggacgcgggcacttaccactgtgtggccaccaatgcgcatggcacggactcccggaccgtcactgtgggcgtggaataccggccagtggtggccgaacttgctgcctcgccccctggaggcgtgcgcccaggaggaaacttcacgttgacctgccgcgcggaggcctggcctccagcccagatcagctggcgcgcgcccccgggggccctcaacatcggcctgtcgagcaacaacagcacactgagcgtggcaggcgccatgggaagccacggcggcgagtacgagtgcgcagccaccaacgcgcacgggcgccacgcgcggcgcatcacggtgcgcgtggccggtccgtggctatgggtcgccgtgggcggcgcggcggggggcgcggcgctgctggccgcgggggccggcctggccttctacgtgcagtccaccgcctgcaagaagggcgagtacaacgtgcaggaggccgagagctcaggcgaggccgtgtgtctgaacggagcgggcggcggcgctggcggggcggcaggcgcggagggcggacccgaggcggcggggggcgcggccgagtcgccggcggagggcgaggtcttcgccatacagctgacatcggcgtgagcccgctcccctctccccgcgggccgggggacgccccccagactcacacgggggcttatttattgctttatttatttacttattcatttatttatgtattcaactccaagggcgtcacccccattttctacccatcccctcaataaagtttttataaagg

SEQ ID NO: 9660 - DNA, 4771 bp, Homo sapiens
  source 1..4771: mol_type = unassigned DNA; mol_type = unassigned DNA
cgccgcccgctagtccgccgcccggcgccatggcgggctgcgcggcgcgggctccgccgggctctgaggcgcgtctcagcctcgccaccttcctgctgggcgcctcggtgctcgcgctgccgctgctcacgcgcgccggcctgcagggccgcaccgggctggcgctctacgtggccgggctcaacgcgctgctgctgctgctctatcggccgcctcgctaccagatagccatccgagcttgtttcctggggtttgtgttcggctgcggcacgctgctaagttttagccagtcttcttggagtcactttggctggtacatgtgctccctgtcattgttccactattctgaatacttggtgacagcagtcaataatcccaaaagtctgtccttggattcctttctcctgaatcacagcctggagtatacagtagctgctctttcttcttggttagagttcacacttgaaaatatcttttggccagaactgaagcagattacctggctcagtgtcacagggctgctgatggtggtcttcggagaatgtctgaggaaggcggccatgtttacagctggctccaatttcaaccacgtggtacagaatgaaaaatcagatacacatactctggtgaccagtggagtgtacgcttggtttcggcatccttcttacgtcgggtggttttactggagtattggaactcaggtgatgctgtgtaaccccatctgcggcgtcagctatgccctgacagtgtggcgattcttccgcgatcgaacagaagaagaagaaatctcactaattcacttttttggagaggagtacctggagtataagaagagggtgcccacgggcctgcctttcataaagggggtcaaggtggacctgtgacgggcagtggccccggtgaccttggggcctccgaccctgtgcagcctgggacaaaactgtttccggttggccgctgccacatggattttcttaatcgttttatgtcattagtcactcttctggaatgtcactcaagaccaagcggtcagaaggcctgaggacccaaggccccactggagcagtctgtccttatgccgaatcaaggcggaacatgggtgaaagacgagtaaggggcaaatcacagcaatattccacagcgccctccagagttacctggggaggaccgaggccacacgccactgcccccgaggccagagtgtaagtaaaggataaccaggactcgctgggagagatggactctgtcctcagcaacactccacagcagaaaggggtagcaggtaccccttcttatcagcggtaaaaatgcatttacaacctttcatttaaccgaaaaacacagaccgctttaacctctttatttctgtcccccactgcatgaacatctatacaattttaaaaatacttcctcataggatgctttggcccttcatctatttaatcatagctacatacctattttttataagtagcagtacacattcaaaggggtattcctagctcaatgcttggtgttctagttcaacttttatcctgcagcaagtaagcctagataactctacacgatttggctgagtggctttgtgtgaccgtggccccaggccaaggggatcatggccctggctggctttcccgggggtctcagctcctgttgtcagtgataggcggctcaaaggagcatcagtttcttttgatccaagaagtgcttactgaatgcctgccctgtgcgtggccttaaacattgagaagtgctgctctccgtttatttgggatttgattctcattttaccatagcttatattctcaatttcaatgccagtctcagaactcttgttttctgtgttctgttctcaaaattacattgtccctcatgtcatttcaaactgttttccaaagggatttgagcatatacaactacaaatccaagcagattgactctcaaaaataatcttaaatactgcaaatagtcccaactaagattcagtcagtatgtttgttttgcaagtttgggagagtaagttggctttgagtcacacatcgaagctttaagaggtgagacgctggcttcattctggactagacaggaacttggcctcagcgtgagatcctgccatgcagtgttgcggtggcactgaagaagtgtgaatgtgaaggcggcgtcggcgcggggccagagcaccactctgctgccccaccacgcggcctgtgaggagccactaaacctttccgtgcctagacctccccatctgtggaatggggtcaataccacctacctcacaggggtgttgtgaggactgagaagaacaatgtcaaatgtttttaatactcagatgtgggagcgacatcaatgaaatctgtactgtatgaaagctacacaaaaatgggcagacatttggttaattgtgccagatacctaaaatgtatgttcagaaaagcattttatcaactcagaaatatgacttatttctagatttcatggcttaatgaattttttcattgttatatataccaaagaggcttacgggttcattgattggtttgaaaaccagacagacggccgggcgcggtggctcacgcctgtaatcccagcaatttgggaggccaaggcgggtggatcatgaggtcaggcgttcgagaccagcctggccaacatgataaaaccccgtctctactaaaaatacaaaaaaatagctgggcgtgctggcgggtgcctgtaatcccagctactcaggaggctgagacaggagaatcctttgaacccaggaggcggaggttgcagtgagttgagatcgggcctttgcacttcagtctgggcaacagggcgagactccatctcaaaaaacaacaacaacaacaaaaaaaaccggacggacttgcccatcggccctcacgacacgcgtgcagtgggactctagccaaggcggtggccgagccatcattacaatttttctggagtaaaggatccacggtgggacatcaactggcacttactctgtttaggaacttgagttgaatcatttctaaacttgtcctttagaccacgcctagggcagcaaattccacttcctagaactgcaaaccgggagaggatgtagttagattctggcatcctgccccggctctttgagggaaaagttctttcccctgctctaagtagggcgggcccagcctccattcccattgggagccatgaagttgtcttgttgataggtctagggcagctgttggcagctgctggccttgtggatggtaagctgactgtgttggcatttaatgccatcctccatctgccagaggcccaggaagcccaccttcacaccaggcccaccagctggaaggagcccaggaggcaggtcttagggtttcatggtgaaatgctgtctgacaccagggaaaacttgacgtactctgctttggagaggaattccaggggtagggatggtgggagaacattcccaccctgtttataatcccagagcagaagtcagcaattacttagggataaaagatgaactccattttttttattttcttaagacagtcttgctctgtggcccaggctggaggctggagtgcagtggcaccatttcggctcaccgcaacctctgcctcccgggttcaagcgattctcctgcctcagcctcctgagtagctgggattacaggcttgggccaccatgcccagctaatttttttgtatttttagtagagacggggtttcaccatgatggccaggctggtctcgaactcctgacctcaagtgatccacgcgcctcggcctcccaaagtgctgggattacaggcgtgagccaccacgcccagccaagatgaactccttaaggacaggatttggtaagtgattgacttctttttagttccatgatcttgagattatttttagctttataaatttagcagtggcagggcccgtggagaatcaggttaatgaggtaaaggctttctgggtatttgctgccaaggccacatcaccaattttctcgatttaaaaaactgtcaagagatttatttttccattgcaggttttaaagtggagattctgaagtggaaaataggtactgtcagaacaaagctacctggaaacagcatagagtgaagcctttcgtgagggcttgcaggccgctgctgagtggcagtttacagaagaggtcgcggggtgagcctcttagcaggacagaaaacaaggcagcagcgcacctgccaccccttcacgagctgctccttgagcctaaaaagtaggctttattcatcccttctgttcatttaccaacctgggggattgatacgaccggggaaaatgttcctaaaccaggaagctgcgttagccgatcaggctttgtaagatctcgccaacagctagctgcttaggagtacccccacgatacgcacagcacaccactgtcccttcactgcactttcttcctgccttaggtagttgggcttgcccaccctagtttgcttttgtagtggtttggcaaggttagaaggcctcggcctctctgtcatgctgggaagtgcctactctctgggccactgctgcagaggccgtggcacttgtcatgggtttggaagacccagccatctgcagcagaggcagcctatcccattgcaaggagaggaactgaacggagtaattattctactcttctttttacataaatgtttatttaaatattctaaattggattttctttcacagatactgattattctttccagttcttaaataaaactgcacttgatttcactcaa

SEQ ID NO: 9661 - DNA, 328 bp, Homo sapiens
  source 1..328: mol_type = unassigned DNA; mol_type = unassigned DNA
cttatttctagatttcatggcttaatgaattttttcattgttatatataccaaagaggcttacgggcgtgagccaccacgcccagccaagatgaactccttaaggacaggatttggtaagtgattgacttctttttagttccatgatcttgagattatttttagctttataaatttagcagtggcagggcccgtggagaatcaggttaatgaggtaaaggctttctgggtatttgctgccaaggccacatcaccaattttctcgatttaaaaaactgtcaagagatttatttttccattgcaggttttaaagtggagattctgaagtg

SEQ ID NO: 9662 - DNA, 2612 bp, Homo sapiens
  source 1..2612: mol_type = unassigned DNA; mol_type = unassigned DNA
gccggcgcgtttctccgggctacagccggcgccgccgcccgctagtccgccgcccggcgccatggcgggctgcgcggcgcgggctccgccgggctctgaggcgcgtctcagcctcgccaccttcctgctgggcgcctcggtgctcgcgctgccgctgctcacgcgcgccggcctgcagggccgcaccgggctggcgctctacgtggccgggctcaacgcgctgctgctgctgctctatcggccgcctcgctaccagatagccatccgagcttgtttcctggggtttgtgttcggctgcggcacgctgctaagttttagccagtcttcttggagtcactttggctggtcacatctagtgcatccccacagccactgtaggatttttccctacactatgatttcagtcccttgagccttctagtctgacctggatatgaaccagtggcttcaaggtacatgtgctccctgtcattgttccactattctgaatacttggtgacagcagtcaataatcccaaaagtctgtccttggattcctttctcctgaatcacagcctggagtatacagtagctgctctttcttcttggttagagttcacacttgaaaatatcttttggccagaactgaagcagattacctggctcagtgtcacagggctgctgatggtggtcttcggagaatgtctgaggaaggcggccatgtttacagctggctccaatttcaaccacgtggtacagaatgaaaaatcagatacacatactctggtgaccagtggagtgtacgcttggtttcggcatccttcttacgtcgggtggttttactggagtattggaactcaggtgatgctgtgtaaccccatctgcggcgtcagctatgccctgacagtgtggcgattcttccgcgatcgaacagaagaagaagaaatctcactaattcacttttttggagaggagtacctggagtataagaagagggtgcccacgggcctgcctttcataaagggggtcaaggtggacctgtgacgggcagtggccccggtgaccttggggcctccgaccctgtgcagcctgggacaaaactgtttccggttggccgctgccacatggattttcttaatcgttttatgtcattagtcactcttctggaatgtcactcaagaccaagcggtcagaaggcctgaggacccaaggccccactggagcagtctgtccttatgccgaatcaaggcggaacatgggtgaaagacgagtaaggggcaaatcacagcaatattccacagcgccctccagagttacctggggaggaccgaggccacacgccactgcccccgaggccagagtgtaagtaaaggataaccaggactcgctgggagagatggactctgtcctcagcaacactccacagcagaaaggggtagcaggtaccccttcttatcagcggtaaaaatgcatttacaacctttcatttaaccgaaaaacacagaccgctttaacctctttatttctgtcccccactgcatgaacatctatacaattttaaaaatacttcctcataggatgctttggcccttcatctatttaatcatagctacatacctattttttataagtagcagtacacattcaaaggggtattcctagctcaatgcttggtgttctagttcaacttttatcctgcagcaagtaagcctagataactctacacgatttggctgagtggctttgtgtgaccgtggccccaggccaaggggatcatggccctggctggctttcccgggggtctcagctcctgttgtcagtgataggcggctcaaaggagcatcagtttcttttgatccaagaagtgcttactgaatgcctgccctgtgcgtggccttaaacattgagaagtgctgctctccgtttatttgggatttgattctcattttaccatagcttatattctcaatttcaatgccagtctcagaactcttgttttctgtgttctgttctcaaaattacattgtccctcatgtcatttcaaactgttttccaaagggatttgagcatatacaactacaaatccaagcagattgactctcaaaaataatcttaaatactgcaaatagtcccaactaagattcagtcagtatgtttgttttgcaagtttgggagagtaagttggctttgagtcacacatcgaagctttaagaggtgagacgctggcttcattctggactagacaggaacttggcctcagcgtgagatcctgccatgcagtgttgcggtggcactgaagaagtgtgaatgtgaaggcggcgtcggcgcggggccagagcaccactctgctgccccaccacgcggcctgtgaggagccactaaacctttccgtgcctagacctccccatctgtggaatggggtcaataccacctacctcacaggggtgttgtgaggactgagaagaacaatgtcaaatgtttttaatactcagatgtgggagcgacatcaatgaaatctgtactgtatgaaagctacacaaaaatgggcagacatttggttaattgtgccagatacctaaaatgtatgttcagaaaagcattttatcaactcagaaatatgacttatttctaga

SEQ ID NO: 9663 - DNA, 1227 bp, Homo sapiens
  source 1..1227: mol_type = unassigned DNA; mol_type = unassigned DNA
gccggcgcgtttctccgggctacagccggcgccgccgcccgctagtccgccgcccggcgccatggcgggctgcgcggcgcgggctccgccgggctctgaggcgcgtctcagcctcgccaccttcctgctgggcgcctcggtgctcgcgctgccgctgctcacgcgcgccggcctgcagggccgcaccgggctggcgctctacgtggccgggctcaacgcgctgctgctgctgctctatcggccgcctcgctaccagatagccatccgagcttgtttcctggggtttgtgttcggctgcggcacgctgctaagttttagccagtcttcttggagtcactttggctgaactgaagcagattacctggctcagtgtcacagggctgctgatggtggtcttcggagaatgtctgaggaaggcggccatgtttacagctggctccaatttcaaccacgtggtacagaatgaaaaatcagatacacatactctggtgaccagtggagtgtacgcttggtttcggcatccttcttacgtcgggtggttttactggagtattggaactcaggtgatgctgtgtaaccccatctgcggcgtcagctatgccctgacagtgtggcgattcttccgcgatcgaacagaagaagaagaaatctcactaattcacttttttggagaggagtacctggagtataagaagagggtgcccacgggcctgcctttcataaagggggtcaaggtggacctgtgacgggcagtggccccggtgaccttggggcctccgaccctgtgcagcctgggacaaaactgtttccggttggccgctgccacatggattttcttaatcgttttatgtcattagtcactcttctggaatgtcactcaagaccaagcggtcagaaggcctgaggacccaaggccccactggagcagtctgtccttatgccgaatcaaggcggaacatgggtgaaagacgagtaaggggcaaatcacagcaatattccacagcgccctccagagttacctggggaggaccgaggccacacgccactgcccccgaggccagagtgtaagtaaaggataaccaggactcgctgggagagatggactctgtcctcagcaacactccacagcagaaaggggtagcaggtaccccttcttatcagcggtaaaaatgcatttacaacctttcatttaaccgaaaaacacagaccgctttaacctctttattt

SEQ ID NO: 9664 - DNA, 1009 bp, Homo sapiens
  source 1..1009: mol_type = unassigned DNA; mol_type = unassigned DNA
ggcccgaggtctccgcccgcaccatgcggctgggcagtcctggactgctcttcctgctcttcagcagccttcgagctgatactcaggagaaggaagtcagagcgatggtaggcagcgacgtggagctcagctgcgcttgccctgaaggaagccgttttgatttaaatgatgtttacgtatattggcaaaccagtgagtcgaaaaccgtggtgacctaccacatcccacagaacagctccttggaaaacgtggacagccgctaccggaaccgagccctgatgtcaccggccggcatgctgcggggcgacttctccctgcgcttgttcaacgtcaccccccaggacgagcagaagtttcactgcctggtgttgagccaatccctgggattccaggaggttttgagcgttgaggttacactgcatgtggcagcaaacttcagcgtgcccgtcgtcagcgccccccacagcccctcccaggatgagctcaccttcacgtgtacatccataaacggctaccccaggcccaacgtgtactggatcaataagacggacaacagcctgctggaccaggctctgcagaatgacaccgtcttcttgaacatgcggggcttgtatgacgtggtcagcgtgctgaggatcgcacggacccccagcgtgaacattggctgctgcatagagaacgtgcttctgcagcagaacctgactgtcggcagccagacaggaaatgacatcggagagagagacaagatcacagagaatccagtcagtaccggcgagaaaaacgcggccacgtggagcatcctggctgtcctgtgcctgcttgtggtcgtggcggtggccataggctgggtgtgcagggaccgatgcctccaacacagctatgcaggtgcctgggctgtgagtccggagacagagctcactgaatcctggaacctgctccttctgctctcgtgactgactgtgttctctatgcaacttccaataaaacctcttcatttgaaaggaaaaaa

SEQ ID NO: 9665 - DNA, 7080 bp, Homo sapiens
  source 1..7080: mol_type = unassigned DNA; mol_type = unassigned DNA
gcgcagttagagccgatctcccgcgccccgaggttgctcctctccgaggtctcccgcggcccaagttctccgcgccccgaggtctccgcgccccgaggtctccgcggcccgaggtctccgcccgcaccatgcggctgggcagtcctggactgctcttcctgctcttcagcagccttcgagctgatactcaggagaaggaagtcagagcgatggtaggcagcgacgtggagctcagctgcgcttgccctgaaggaagccgttttgatttaaatgatgtttacgtatattggcaaaccagtgagtcgaaaaccgtggtgacctaccacatcccacagaacagctccttggaaaacgtggacagccgctaccggaaccgagccctgatgtcaccggccggcatgctgcggggcgacttctccctgcgcttgttcaacgtcaccccccaggacgagcagaagtttcactgcctggtgttgagccaatccctgggattccaggaggttttgagcgttgaggttacactgcatgtggcagcaaacttcagcgtgcccgtcgtcagcgccccccacagcccctcccaggatgagctcaccttcacgtgtacatccataaacggctaccccaggcccaacgtgtactggatcaataagacggacaacagcctgctggaccaggctctgcagaatgacaccgtcttcttgaacatgcggggcttgtatgacgtggtcagcgtgctgaggatcgcacggacccccagcgtgaacattggctgctgcatagagaacgtgcttctgcagcagaacctgactgtcggcagccagacaggaaatgacatcggagagagagacaagatcacagagaatccagtcagtaccggcgagaaaaacgcggccacgtggagcatcctggctgtcctgtgcctgcttgtggtcgtggcggtggccataggctgggtgtgcagggaccgatgcctccaacacagctatgcaggtgcctgggctgtgagtccggagacagagctcactggccacgtttgaccggagctcaccgcccagagcgtggacagggcttccgtgagacgccaccgtgagaggccaggtggcagcttgagcatggactcccagactgcaggggagcacttggggcagcccccagaaggaccactgctggatcccagggagaacctgctggcgttggctgtgatcctggaatgaggccctttcaaaagcgtcatccacaccaaaggcaaatgtccccaagtgagtgggctccccgctgtcactgccagtcacccacaggaagggactggtgatgggctgtctctacccggagcgtgcgggattcagcaccaggctcttcccagtaccccagacccactgtgggtcttcccgtgggatgcgggatcctgagaccgaagggtgtttggtttaaaaagaagactgggcgtccgctcttccaggacggcctctgtgctgctggggtcacgcgaggctgtttgcaggggacacggtcacaggagctcttctgccctgaacgctcccaacctgcctcccgcccggaagccacaggacccactcatgtgtgtgcccacaagtgtagttagccgtccacaccgaggagcccccggaagtccccactgggcttcagtgtcctctgccacattccctgggaggaacaatgtccctcggctgttccggtgaaaagttgagccacctttggaagacgcacgggtggagtttgccagaagaaaggctgtgccagggccgtgtttggctacaggggctgccggggctcttggctctgcagcgagaaagacacagcccagcagggctggagacgcccatgtccagcaggcgcaggcctggcaacacggtccccagagtcctgagcagcagttaggtgcatggagagggtatcacctggtggccacagtcccccttctcacctcagcaatgatccccaaagtgagaggtggctcccccggcccccaccaccctcagcagccccaccccactcaaccctgagggtccccagggtcctgatgaagacctccgaccccagcgccaggctcctcggagcccaacagtcccaagggggcaggagacggggtggtccagtgctgaggggtacagccctgggccctgaccagccccggcacctgccatgctggttcccggaatgaatcagctgctgactgtctccagaagggctggaaaggatgctgccaggtgacccgaggtgcactcgccccagggagatggagtagacagcctggcctggccctcgggacacattgtctgccccggggctatgggcaaatgcccctccttcttacttcccagaatcccctgacattcccagggtcagccaggacctgttacagccctggtcacttggaactgacagctgtgtgaggcctgcacttctcagacccagacttagaacaaaaggaggagtgaggactcaaggctacaatgaggttccagtacttgttacaagaaattggttttctgcaaaaaaagtccctacctgagcctttaggtgaatgtgggatccactcccgcttttaacatgaaagcattagaagatgtgtggtgtttataaaagaacagttgtcatcaccgggcattgattggcagggacaaggagctgcttgggtgtggaaagttggggcgttggaaagtgggctgtggtgcccatttgcagtgactgtgaagtgactccaggacggacctgcgggggcacccagaggtcctaagccccaggactgagggtcgtgcatcaccactcgggtgtcccgggaggtgccctgggcccggggacctcacaggcaggacggcgacactaatgcagggagagggagtctggccccagcttttcctatcagaggcgattttccttcaccaggggatgggcaggaaagaggcaggggccccagaagcttctgtccctcatgcctgagggcacgggggacacttggaggctgctgtcaccactgtgcgtccaaggccatgctctctgcgggtcagtgcctgagtctcgcctccctgctggtccctgaagccccctcagaagccctgcctgtcacgtcggcatttgtgagacctaccctgtaacgcctgcccctctcagcccaacatcagcttcctctttctcccttgctgtagacaggctggattccagtgttgggacagccatctccagaaacctgacttaagagagtaagatgcaaatcgtgcctgtatccagtggctttggtgggtgcagggagtcttgggcacagccagctcagctgtctgtggtatgagcaggaacaggtgccactcctgctcaggggaccctgccctacaccaggctgttccgtccccctggaggacatggggccaggtctggaggcattttgggttgtcacagctgggggctgttcctcggcttcagcgggtggaagcctcagatgctgttcaacatcttctggacacgggaggccccgacagagagaagcgtccacccgcaagtccacagtctgaggtctcccctcagagaccctgccctgcacacccacctccagccaaaggtcctgcctgccccagggctcaggggaaccttgccggtctgtggaacaggagaggggactctcgccagctgcaccaccctgcacgtagtaggtgtgcggtaaacatccaccagggaggctccagtcaaggctggcagatggggcggtccatccctagggcaggtgacagaagggaaaaggctgcctgctggcccccgagccaggtagcacatgcttgtgcctcagtttcccctcctgtaaagtgaggcgctggatccaggttctgtctactgggctctgcagcttggacgctcctaagaccaagcgacccaccctggggagggcagctatggctttggaatagctgtccaggcccgggtgcctccaagacggccaccacaccctgcctgtgctgcaggggtgcaggggtaaggggcaagactccagaggcctcctctctgcatctccttgtcttcagtggccggaggtgaggcctgagctcaggggaggggcttctgccacgaaccctatggcggggcacagcacacttttcccagggaggacccctgggccccctgcattatccccagcggagtgtggggtcaccttccaagagcgacattgagaagctccagctctaggagtgtgcagactcttaaccaggcaggcccaggccctggggcacacaaaggcggggcctgctctccccagctgcccctgccaatgggggctggactgtcctaccctcctcccttctacctccccactgtcttccctctccactgtcaccactgcctccctcttccactgtcctccatgcactgccctccctccaccttcccccacccccaccactccccatgctgtccccaggctccccccgctctcccccctccccactgtccccctccccatgctgtacccagctcaccccgctctcccctctccccactgtcccccctcccactccccatgctgtccccagctcaccctacatggacttggcgatgtccttccatggctcaccggtctgaatttccatgatgagccgggcctgcagctttgctcccctatccctgcccaggctgcagctgtccatgcagggagcgagctccagcacctgcggagtccttccgtgggggcctctccgtgccacagcagccagggacctcaggtgcctgtgcatgacaccaccgcccatcctcatcctgagccagcctctcaggatcaggacttggtttggcggcgttaaccttagagcctgcaaggggcttcctcctggtgggtctggccgtagcctggggaggccacagctccaggccactccagacctcccttcctctgggccttccatgtggtggcaaccaccgcagctgtaagggagggaaaatggagcgtttgttctcgggctgggctggggtctgggggaagccatgggcgtgaagactggagtattatttgatggagaagcggccactcctggagaccggcggcaaacacagaagcacagcgtggaaggtgctggtgtcagcccacacgggtgatggggtcagactcaggagtcacactcaggagtcaccaggctcaaagggcccaggcaccgcaagtcctgctcagccccagacacaatgcattcctgttgccctcgccctcagccaggccccacgcaggccagggagcactggcaaagcttggcaaccctctgggggccagccttcatccaggccgaaggtggtcagtggcccaccatggcccaggtagaaaactcacggattaagatttcatgcccgactccaaaggcaagagactttattattttattttttttgagccagagtatcgctctgtcacctaggctggagtgcaatctctgctcattgcaacatctgcctcccgaactcaagcaattctgcctcagcctcccaagtagctgggattacaggtgtgcgccaccatgcccaggtaattgtatttttagtagagacagggtttcaccatgttggtcaggctggtttcaaactcctgacctcaaatgatctgcccacctcgacctcccaaagtgctgggattacaggtgcgagccaccgcacctggctaccagacacttcagagttacaggttagtttttctttttcttttatttttttttttttggcggaggtgcagggggagttaaacaaacaaacaaaataaacaggccgggtgcggtggctcatgcctgtaatcccagcactttaggaggcctaggtgggtggatcacgagatcaggggttcaagaccagcctggccgagatggtaaaaccccgtctccactaaaaatacaaaaattggccaggcacggtggctcacacctgtaatcccagtactttgggaggctgaggtgggcagatcacctgaggtcaggagttcaagaccaacctgaccaacatggagaaaccccatctctactaaaaatacaaaattagccaggtgtggtggtgcatgcctgtaattccagctactcgggaggctgaggcaggagaattgcttgaacccaggaggcagaggttgcagtgggccaagatggcgccattgcactccagcctgggaacaagagcgaaactctgactaaaaaagaaagaaagaaagaaaaaaattagttgggcacggtggcaggcgcctgtaatcccaggtactcaggaggctgaggcaggagaattgcttgaacccgggaggcagaggtcgcagtgagccgagattgcaccactgccctccagcctgggtgacagagcaagactccgtctcaaaaaaaaaaaaaaaaaaaattggatacattgtaatacctcaaatacttgtaagtgaagcaccccagttcccatagagctgccgcactcagaggcttctgtaacctgcctgctcccagcattctatttagggtctggtatgtccagaatttgcagacacagcaattcctgcagcagcagtgcaccatgtggaaggggccccatgaccagcccactgtgagctcacacgtgatgactgaggcttcttcacacagcagggctctgggtgtgatacccagggcacacgcgtttgcacaggcacaggccacacaagttctcacatgctcagccccataagccgtgctggacaggcatggccatttacacccaggatcctgctgagaacagcaaccaactcaccaccctcgcatcatgatccttgccacacaggggctctggtggctttggtggcctgggctgtggctctgctgccagccaccttgagtgaagatccgggttctctgggtgctactcagctgctatgtggggagctggcccctggggtgatgagggcccttcccaacccgccctcagcccttggacagccaggatcacccggggctgtctgcatacagacttctcaggggagttctcagcttggacccttatctccccagaatcctggaacctgctccttctgctctcgtgactgactgtgttctctatgcaacttccaataaaacctcttcatttgaaaggaaaaaa

SEQ ID NO: 9666 - DNA, 4246 bp, Homo sapiens
  source 1..4246: mol_type = unassigned DNA; mol_type = unassigned DNA
gcgcagttagagccgatctcccgcgccccgaggttgctcctctccgaggtctcccgcggcccaagttctccgcgccccgaggtctccgcgccccgaggtctccgcggcccgaggtctccgcccgcaccatgcggctgggcagtcctggactgctcttcctgctcttcagcagccttcgagctgatactcaggagaaggaagtcagagcgatggtaggcagcgacgtggagctcagctgcgcttgccctgaaggaagccgttttgatttaaatgatgtttacgtatattggcaaaccagtgagtcgaaaaccgtggtgacctaccacatcccacagaacagctccttggaaaacgtggacagccgctaccggaaccgagccctgatgtcaccggccggcatgctgcggggcgacttctccctgcgcttgttcaacgtcaccccccaggacgagcagaagtttcactgcctggtgttgagccaatccctgggattccaggaggttttgagcgttgaggttacactgcatgtggcagcaaacttcagcgtgcccgtcgtcagcgccccccacagcccctcccaggatgagctcaccttcacgtgtacatccataaacggctaccccaggcccaacgtgtactggatcaataagacggacaacagcctgctggaccaggctctgcagaatgacaccgtcttcttgaacatgcggggcttgtatgacgtggtcagcgtgctgaggatcgcacggacccccagcgtgaacattggctgctgcatagagaacgtgcttctgcagcagaacctgactgtcggcagccagacaggaaatgacatcggagagagagacaagatcacagagaatccagtcagtaccggcgagaaaaacgcggccacgtggagcatcctggctgtcctgtgcctgcttgtggtcgtggcggtggccataggctgggtgtgcagggaccgatgcctccaacacagctatgcaggtgcctgggctgtgagtccggagacagagctcactggtgagtttgccgtgggaagcagcaggttctggggggcccaggggaggcttggctgccagctgtctttcagagtttcaaaaaactttcaaaaggcaaaagtcccttgccttgaacaactgttgttcctggagacgcagcgaagccctcgatggtgcgcatggcatttcctgcagcctccccttggcatgggatggcatcctggtgtgcactttgtcacactgcgatgggattttcccaacatgcacagaagcagagagacgagtgctagacccccgcgctccccagtgcccagccccgaccagggtgtccagggcgggtccaggcaccggcgcccagcccccatggggtgtccggagtgggtccaggcaccggcgcccagcccccgtggggtgtccagggcgggtccaggcaccggcgcccagcccctgtggggtgtccggagtgggtccgggcaccgccagcttctctctgtggcagccactcctgcagctctcgtttgcccctcagttccaggagcaacatagatgtggattcctgtccaatttgggaaaaatgtccacacacggtcacccacctggcaggtgcctctggctgcaaggggcgctgggcttcgcaggcaggccagccgggctccccgccatgggccaggatcccctccgagccctgtttgccgcccaggagaaggggttccccggggacagtgggctcagggtgtgcgcagccaccatgctgtggtgtcacctgtggacccaggcgagctgatggccgaccgcagaaacgcacttccaaggccaggtcggcccatccagatgatgcaggaacacagcttgctaaaaacacggccggcctgttcccgtcggagccagtcgaagttccctgaacaggccgctgtttccgaagctttaaaccctgtgtttccaccaagctgagtcctgagaaaaccgacgtctgcctgcagaagggaaaggggtgcttcatgttcctctctctccttcatctcccttccaaggccacgtttgaccggagctcaccgcccagagcgtggacagggcttccgtgagacgccaccgtgagaggccaggtggcagcttgagcatggactcccagactgcaggggagcacttggggcagcccccagaaggaccactgctggatcccagggagaacctgctggcgttggctgtgatcctggaatgaggccctttcaaaagcgtcatccacaccaaaggcaaatgtccccaagtgagtgggctccccgctgtcactgccagtcacccacaggaagggactggtgatgggctgtctctacccggagcgtgcgggattcagcaccaggctcttcccagtaccccagacccactgtgggtcttcccgtgggatgcgggatcctgagaccgaagggtgtttggtttaaaaagaagactgggcgtccgctcttccaggacggcctctgtgctgctggggtcacgcgaggctgtttgcaggggacacggtcacaggagctcttctgccctgaacgctcccaacctgcctcccgcccggaagccacaggacccactcatgtgtgtgcccacaagtgtagttagccgtccacaccgaggagcccccggaagtccccactgggcttcagtgtcctctgccacattccctgggaggaacaatgtccctcggctgttccggtgaaaagttgagccacctttggaagacgcacgggtggagtttgccagaagaaaggctgtgccagggccgtgtttggctacaggggctgccggggctcttggctctgcagcgagaaagacacagcccagcagggctggagacgcccatgtccagcaggcgcaggcctggcaacacggtccccagagtcctgagcagcagttaggtgcatggagagggtatcacctggtggccacagtcccccttctcacctcagcaatgatccccaaagtgagaggtggctcccccggcccccaccaccctcagcagccccaccccactcaaccctgagggtccccagggtcctgatgaagacctccgaccccagcgccaggctcctcggagcccaacagtcccaagggggcaggagacggggtggtccagtgctgaggggtacagccctgggccctgaccagccccggcacctgccatgctggttcccggaatgaatcagctgctgactgtctccagaagggctggaaaggatgctgccaggtgacccgaggtgcactcgccccagggagatggagtagacagcctggcctggccctcgggacacattgtctgccccggggctatgggcaaatgcccctccttcttacttcccagaatcccctgacattcccagggtcagccaggacctgttacagccctggtcacttggaactgacagctgtgtgaggcctgcacttctcagacccagacttagaacaaaaggaggagtgaggactcaaggctacaatgaggttccagtacttgttacaagaaattggttttctgcaaaaaaagtccctacctgagcctttaggtgaatgtgggatccactcccgcttttaacatgaaagcattagaagatgtgtggtgtttataaaagaacagttgtcatcaccgggcattgattggcagggacaaggagctgcttgggtgtggaaagttggggcgttggaaagtgggctgtggtgcccatttgcagtgactgtgaagtgactccaggacggacctgcgggggcacccagaggtcctaagccccaggactgagggtcgtgcatcaccactcgggtgtcccgggaggtgccctgggcccggggacctcacaggcaggacggcgacactaatgcagggagagggagtctggccccagcttttcctatcagaggcgattttccttcaccaggggatgggcaggaaagaggcaggggccccagaagcttctgtccctcatgcctgagggcacgggggacacttggaggctgctgtcaccactgtgcgtccaaggccatgctctctgcgggtcagtgcctgagtctcgcctccctgctggtccctgaagccccctcagaagccctgcctgtcacgtcggcatttgtgagacctaccctgtaacgcctgcccctctcagcccaacatcagcttcctctttctcccttgctgtagacaggctggattccagtgttgggacagccatctccagaaacctgacttaagagagtaagatgcaaatcgt

SEQ ID NO: 9667 - DNA, 2907 bp, Homo sapiens
  source 1..2907: mol_type = unassigned DNA; mol_type = unassigned DNA
agagcctcgggcgcggcgggagcgcagttagagccgatctcccgcgccccgaggttgctcctctccgaggtctcccgcggcccaagttctccgcgccccgaggtctccgcgccccgaggtctccgcggcccgaggtctccgcccgcaccatgcggctgggcagtcctggactgctcttcctgctcttcagcagccttcgagctgcaaacttcagcgtgcccgtcgtcagcgccccccacagcccctcccaggatgagctcaccttcacgtgtacatccataaacggctaccccaggcccaacgtgtactggatcaataagacggacaacagcctgctggaccaggctctgcagaatgacaccgtcttcttgaacatgcggggcttgtatgacgtggtcagcgtgctgaggatcgcacggacccccagcgtgaacattggctgctgcatagagaacgtgcttctgcagcagaacctgactgtcggcagccagacaggaaatgacatcggagagagagacaagatcacagagaatccagtcagtaccggcgagaaaaacgcggccacgtggagcatcctggctgtcctgtgcctgcttgtggtcgtggcggtggccataggctgggtgtgcagggaccgatgcctccaacacagctatgcaggtgcctgggctgtgagtccggagacagagctcactggccacgtttgaccggagctcaccgcccagagcgtggacagggcttccgtgagacgccaccgtgagaggccaggtggcagcttgagcatggactcccagactgcaggggagcacttggggcagcccccagaaggaccactgctggatcccagggagaacctgctggcgttggctgtgatcctggaatgaggccctttcaaaagcgtcatccacaccaaaggcaaatgtccccaagtgagtgggctccccgctgtcactgccagtcacccacaggaagggactggtgatgggctgtctctacccggagcgtgcgggattcagcaccaggctcttcccagtaccccagacccactgtgggtcttcccgtgggatgcgggatcctgagaccgaagggtgtttggtttaaaaagaagactgggcgtccgctcttccaggacggcctctgtgctgctggggtcacgcgaggctgtttgcaggggacacggtcacaggagctcttctgccctgaacgctcccaacctgcctcccgcccggaagccacaggacccactcatgtgtgtgcccacaagtgtagttagccgtccacaccgaggagcccccggaagtccccactgggcttcagtgtcctctgccacattccctgggaggaacaatgtccctcggctgttccggtgaaaagttgagccacctttggaagacgcacgggtggagtttgccagaagaaaggctgtgccagggccgtgtttggctacaggggctgccggggctcttggctctgcagcgagaaagacacagcccagcagggctggagacgcccatgtccagcaggcgcaggcctggcaacacggtccccagagtcctgagcagcagttaggtgcatggagagggtatcacctggtggccacagtcccccttctcacctcagcaatgatccccaaagtgagaggtggctcccccggcccccaccaccctcagcagccccaccccactcaaccctgagggtccccagggtcctgatgaagacctccgaccccagcgccaggctcctcggagcccaacagtcccaagggggcaggagacggggtggtccagtgctgaggggtacagccctgggccctgaccagccccggcacctgccatgctggttcccggaatgaatcagctgctgactgtctccagaagggctggaaaggatgctgccaggtgacccgaggtgcactcgccccagggagatggagtagacagcctggcctggccctcgggacacattgtctgccccggggctatgggcaaatgcccctccttcttacttcccagaatcccctgacattcccagggtcagccaggacctgttacagccctggtcacttggaactgacagctgtgtgaggcctgcacttctcagacccagacttagaacaaaaggaggagtgaggactcaaggctacaatgaggttccagtacttgttacaagaaattggttttctgcaaaaaaagtccctacctgagcctttaggtgaatgtgggatccactcccgcttttaacatgaaagcattagaagatgtgtggtgtttataaaagaacagttgtcatcaccgggcattgattggcagggacaaggagctgcttgggtgtggaaagttggggcgttggaaagtgggctgtggtgcccatttgcagtgactgtgaagtgactccaggacggacctgcgggggcacccagaggtcctaagccccaggactgagggtcgtgcatcaccactcgggtgtcccgggaggtgccctgggcccggggacctcacaggcaggacggcgacactaatgcagggagagggagtctggccccagcttttcctatcagaggcgattttccttcaccaggggatgggcaggaaagaggcaggggccccagaagcttctgtccctcatgcctgagggcacgggggacacttggaggctgctgtcaccactgtgcgtccaaggccatgctctctgcgggtcagtgcctgagtctcgcctccctgctggtccctgaagccccctcagaagccctgcctgtcacgtcggcatttgtgagacctaccctgtaacgcctgcccctctcagcccaacatcagcttcctctttctcccttgctgtagacaggctggattccagtgttgggacagccatctccagaaacctgacttaagagagtaagatgcaaatcgt

SEQ ID NO: 9668 - DNA, 2041 bp, Homo sapiens
  source 1..2041: mol_type = unassigned DNA; mol_type = unassigned DNA
gcgcgctgagtgacggcgcggttgccatggcagccgcctgagcggcgccgcgaggacaaggctgcagggcggcgtgaatgggcggcgtcacgcgcctggcgccagagagtctgctccggggctccggctccggccccgccgcggcctggcccgcgcgccgccgccgccgccaccgccgccgccaattcatcacctgtcagggatcactcgcggggtcacgggcggaatggacacagctgtgagaacaaaacccgggaaagaaaggcgaacgctccccattgcgccagatgtgcagggaggaccttgagacgcgccccccgcccccgcaggctcctcccgccccccggcgcatcacgcgggggtggcaaaggcggcctggccagcgcggagctcccggcccggagctgcttctgattaccgcgaggggcccggacgcgagagccgccgcggggcctgccctagaggcggagtgatgaactgtggcttcccccctgcggtgctgaactcgcccgtgtagctgtgattttagagctgccgacagctctaagctgggctcgcgccccgcccaccccgcggggattggctgcgaacgcggaagaaccaagcccacgccccgcgcccgcgcccaccaatggaagcgcccgctcgtcttgatagacgtgccaccttccgccaatggggacgaagggaagctccagcgtgtggccccggcgagtgcggataaaagccgccccgccgggctcgggcttcattctgagccgagcccggtgccaagcgcagctagctcagcaggcggcagcggcggcctgagcttcagggcagccagctccctcccggtctcgccttccctcgcggtcagcatgaaagccttcagtcccgtgaggtccgttaggaaaaacagcctgtcggaccacagcctgggcatctcccggagcaaaacccctgtggacgacccgatgagcctgctatacaacatgaacgactgctactccaagctcaaggagctggtgcccagcatcccccagaacaagaaggtgagcaagatggaaatcctgcagcacgtcatcgactacatcttggacctgcagatcgccctggactcgcatcccactattgtcagcctgcatcaccagagacccgggcagaaccaggcgtccaggacgccgctgaccaccctcaacacggatatcagcatcctgtccttgcaggcttctgaattcccttctgagttaatgtcaaatgacagcaaagcactgtgtggctgaataagcggtgttcatgatttcttttattctttgcacaacaacaacaacaacaaattcacggaatcttttaagtgctgaacttatttttcaaccatttcacaaggaggacaagttgaatggacctttttaaaaagaaaaaaaaaatggaaggaaaactaagaatgatcatcttcccagggtgttctcttacttggactgtgatattcgttatttatgaaaaagacttttaaatgccctttctgcagttggaaggttttctttatatactattcccaccatggggagcgaaaacgttaaaatcacaaggaattgcccaatctaagcagactttgccttttttcaaaggtggagcgtgaataccagaaggatccagtattcagtcacttaaatgaagtcttttggtcagaaattacctttttgacacaagcctactgaatgctgtgtatatatttatatataaatatatctatttgagtgaaaccttgtgaactctttaattagagttttcttgtatagtggcagagatgtctatttctgcattcaaaagtgtaatgatgtacttattcatgctaaactttttataaaagtttagttgtaaacttaacccttttatacaaaataaatcaagtgtgtttattgaatggtgattgcctgctttatttcagaggaccagtgctttgatttttattatgctatgttataactgaacccaaataaatacaagttcaaatttatgtagactgtataagattataataaaacatgtctgaagtcaa

SEQ ID NO: 9669 - DNA, 623 bp, Homo sapiens
  source 1..623: mol_type = unassigned DNA; mol_type = unassigned DNA
attctgagccgagcccggtgccaagcgcagctagctcagcaggcggcagcggcggcctgagcttcagggcagccagctccctcccggtctcgccttccctcgcggtcagcatgaaagccttcagtcccgtgaggtccgttaggaaaaacagcctgtcggaccacagcctgggcatctcccggagcaaaacccctgtggacgacccgatgagcctgctatacaacatgaacgactgctactccaagctcaaggagctggtgcccagcatcccccagaacaagaaggtgagcaagatggaaatcctgcagcacgtcatcgactacatcttggacctgcagatcgccctggactcgcatcccactattgtcagcctgcatcaccagagacccgggcagaaccaggcgtccaggacgccgctgaccaccctcaacacggatatcagcatcctgtccttgcaggcttctgaattcccttctgagttaatgtcaaatgacagcaaagcactgtgtggctgaataagcggtgagtgtttgcttgtgccacccgtgggtaaactgcccctcggtgtgtgtgcgcgcgcgcgcatgtgtttttgcttgtgtatctataaaatgtctgatttg

SEQ ID NO: 9670 - DNA, 474 bp, Homo sapiens
  source 1..474: mol_type = unassigned DNA; mol_type = unassigned DNA
aaaaaaaaccctttctacttaacattgtcttaacctcgtactctttatcctctttctttccaggcttctgaattcccttctgagttaatgtcaaatgacagcaaagcactgtgtggctgaataagcggtgttcatgatttcttttattctttgcacaacaacaacaacaacaaattcacggaatcttttaagtgctgaacttatttttcaaccatttcacaaggaggacaagttgaatggacctttttaaaaagaaaaaaaaaatggaaggaaaactaagaatgatcatcttcccagggtgttctcttacttggactgtgatattcgttatttatgaaaaagacttttaaatgccctttctgcagttggaaggttttctttatatactattcccaccatggggagcgaaaacgttaaaatcacaaggaattgcccaatctaagcagactttgccttttttcaaaggtggagcgt

SEQ ID NO: 9671 - DNA, 1362 bp, Homo sapiens
  source 1..1362: mol_type = unassigned DNA; mol_type = unassigned DNA
ggggacgaagggaagctccagcgtgtggccccggcgagtgcggataaaagccgccccgccgggctcgggcttcattctgagccgagcccggtgccaagcgcagctagctcagcaggcggcagcggcggcctgagcttcagggcagccagctccctcccggtctcgccttccctcgcggtcagcatgaaagccttcagtcccgtgaggtccgttaggaaaaacagcctgtcggaccacagcctgggcatctcccggagcaaaacccctgtggacgacccgatgagcctgctatacaacatgaacgactgctactccaagctcaaggagctggtgcccagcatcccccagaacaagaaggtgagcaagatggaaatcctgcagcacgtcatcgactacatcttggacctgcagatcgccctggactcgcatcccactattgtcagcctgcatcaccagagacccgggcagaaccaggcgtccaggacgccgctgaccaccctcaacacggatatcagcatcctgtccttgcaggcttctgaattcccttctgagttaatgtcaaatgacagcaaagcactgtgtggctgaataagcggtgttcatgatttcttttattctttgcacaacaacaacaacaacaaattcacggaatcttttaagtgctgaacttatttttcaaccatttcacaaggaggacaagttgaatggacctttttaaaaagaaaaaaaaaatggaaggaaaactaagaatgatcatcttcccagggtgttctcttacttggactgtgatattcgttatttatgaaaaagacttttaaatgccctttctgcagttggaaggttttctttatatactattcccaccatggggagcgaaaacgttaaaatcacaaggaattgcccaatctaagcagactttgccttttttcaaaggtggagcgtgaataccagaaggatccagtattcagtcacttaaatgaagtcttttggtcagaaattacctttttgacacaagcctactgaatgctgtgtatatatttatatataaatatatctatttgagtgaaaccttgtgaactctttaattagagttttcttgtatagtggcagagatgtctatttctgcattcaaaagtgtaatgatgtacttattcatgctaaactttttataaaagtttagttgtaaacttaacccttttatacaaaataaatcaagtgtgtttattgaatggtgattgcctgctttatttcagaggaccagtgctttgatttttattatgctatgttataactgaacccaaataaatacaagttcaaatttatgtagactgtataagattataataaaacatgtctgaagtc

SEQ ID NO: 9672 - DNA, 2344 bp, Homo sapiens
  source 1..2344: mol_type = unassigned DNA; mol_type = unassigned DNA
aggcgcggttgtgagtagtaccgggagtggggtgatcccgggctaggggagcgcggcggccgcgatcgggcttagtcggagctccgaagggagtgactaggacacccgggtgggctacttttcttccggtgcttttgctttttttttcctttgggctcgggctgagtgtcgcccactgagcaaagattccctcgtaaaacccagagcgaccctcccgtcaattgttgggctcgggagtgtcgcggtgccccgagcgcgccgggcgcggaggcaaagggagcggagccggccgcggacggggcccggagcttgcctgcctccctcgctcgccccagcgggttcgctcgcgtagagcgcagggcgcgcgcgatgaaggcggtgagcccggtgcgcccctcgggccgcaaggcgccgtcgggctgcggcggcggggagctggcgctgcgctgcctggccgagcacggccacagcctgggtggctccgcagccgcggcggcggcggcggcggcagcgcgctgtaaggcggccgaggcggcggccgacgagccggcgctgtgcctgcagtgcgatatgaacgactgctatagccgcctgcggaggctggtgcccaccatcccgcccaacaagaaagtcagcaaagtggagatcctgcagcacgttatcgactacatcctggacctgcagctggcgctggagacgcacccggccctgctgaggcagccaccaccgcccgcgccgccacaccacccggccgggacctgtccagccgcgccgccgcggaccccgctcactgcgctcaacaccgacccggccggcgcggtgaacaagcagggcgacagcattctgtgccgctgagccgcgctgtccaggtgtgcggccgcctgagcccgagccaggagcactagagagggagggggaagagcagaagttagagaaaaaaagccaccggaggaaaggaaaaaacatcggccaacctagaaacgttttcattcgtcattccaagagagagagaggaaagaaaaatacaactttcattctttctttgcacgttcataaacattctacatacgtattctcttttgtctcttcatttataactgctgtgaattgtacatttctgtgttttttggaggtgcagttaaacttttaagcttaagtgtgacaggactgataaatagaagatcaagagtagatccgactttagaagcctactttgtgaccaaggagctcaatttttgttttgaagctttactaatctaccagagcattgtagatattttttttttacatctattgtttaaaatagatgattataacggggcagagaactttcttttctctgcaagaatgttacatattgtatagataaatgagtgacatttcataccatgtatatatagagatgttctataagtgtgagaaagtatatgctttaatagatactgtaattataagatatttttaattaaatatttttttgtaaatattatgtgtgtgtttttttttaatctatgggaatatttcttttggaaaatcatttttcagctcaattacagagctcttgatatcttgaatgtcttttctgtttggcctggctcttaatttgcttttgttttgcccagtatagactcggaagtaacagttatagctagtggtcttgcatgattgcatgagatgtttaatcacaaattaaacttgttctgagtccattcaaatgtgtttttttaaatgtagattgaaatctttgtatttgaagcatacatgttgaaaatacaccttatcagtttttaagtacagggttttatagtgtaatatatacagagtaagtgtttgtttttgtttttcaactgaggtcaaaatggattctgaatgattttgcatatgggatgaggaaatgcttggatccttaaggagtttacgaaatctgctgttttatcaaagtgaaaaaaaattgcttattactcttcattttacactaaagcttaatgtcactaagtttcatgtctgtacagattatttaaatcatggaaatgaaaaaaatgttctctgcttgctaccaaaggacaaactcttggaaatgaacactttctgctttccttcctccaaagaattaataggcaacagtgggagaaaaaaaaggcataatggcaaatccttcaagcagggataaaagtcgatcttcaaacattaacttaagcagaccaaaaattctgatgaccgcatctagattatttttttataaaaatgattttcactatagctatgttacgctaagctactgtccaatctcttgtgatgtgtaacttttacatgtgaatattaaagtagatttctctgtcttgta

SEQ ID NO: 9673 - DNA, 2301 bp, Homo sapiens
  source 1..2301: mol_type = unassigned DNA; mol_type = unassigned DNA
gggtggggcgtgttgacccccttaaaggcgccagagcccgcggtcacggctcaggttcccggtgcttcgcgcgtctgccgttgtcacaggccagggaggtggcaccaccaggcgaagcttggcgagattgtgtcgtcaagcgcgtacgggcgccaattggccgggcgatgtggcgtggactggcgctggcgcgagcgattggctgcgcggcccgggggcggggccagtgggcggtgcgcgccgcagactgtgctcaaagcgggcgccatccgggaccggcggttgtctgtggccggaggctgatcagtgttctagaacagatcagacattttgtaatgatgcctgaaataaacactaaccacctcgacaagcaacaggttcaactcctggcagagatgtgtatccttattgatgaaaatgacaataaaattggagctgagaccaagaagaattgtcacctgaacgagaacattgagaaaggattattgcatcgagcttttagtgtcttcttattcaacaccgaaaataagcttctgctacagcaaagatcagatgctaagattacctttccaggttgttttacgaatacgtgttgtagtcatccattaagcaatccagccgagcttgaggaaagtgacgcccttggagtgaggcgagcagcacagagacggctgaaagctgagctaggaattcccttggaagaggttcctccagaagaaattaattatttaacacgaattcactacaaagctcagtctgatggtatctggggtgaacatgaaattgattacattttgttggtgaggaagaatgtaactttgaatccagatcccaatgagattaaaagctattgttatgtgtcaaaggaagaactaaaagaacttctgaaaaaagcagccagtggtgaaattaagataacgccatggtttaaaattattgcagcgacttttctctttaaatggtgggataacttaaatcatttgaatcagtttgttgaccatgagaaaatatacagaatgtgaatatgtaggtaaatgattacagaaaaatttatctgcttaacaaacttagaatgactttttccttttaaatttagttctatcattaatttatcattaaatttagttctatcatttggtactatcattaatgtattatatacactgatactttaaaacttgtgtggaaaaaactaacttataattttgtatcacacaccctggatatgtgttctgtttctaagcgacatttgtgagagattattgtaaaatgagagcgagcaaataaaacttaatttaatctttgcagatacatacttatgggaaatttgaacaaatgagtgaaactctgtttttagtaggctgtgataaacatttccggagcacttgcagaggacttgctatttgccaggtgctttatgtatcattaaatttttctcatagttcagaaaaatgtgcaaaggaaactattgtctcgctccttcaaaacagtcttaattaactttcatattagcagattaaactagcagagcaggttcaagggaaattaaatgatatggaccctaatttgtatcattctgagttgattgtgtggtttattcattctggaaacatgttgatacttacagtcagccactgcttttgataagtgatattgattaggttgaatcttcttgtaaatagtatttaccagttagcaaagtctgtgttttcagaattacagtgagcacagaggtgttcataaaatgggaattgagtcccactcggtaagagttgcttaaacttgacactgttgacatttgggctggataaaacccctgtggtggggtctgtgctgtgcattgcaggatggtgagcagcgtccctctcatgtgacacccacagttatgccggatgttgccagatgcccctaggggacagagtcaacccccaactgaggaccactgtcctacagagtcaggaaatattgtagggagaaaaaaataacaacaacaaaggcctgtgttaatgttaaatagatgagattatggaatgtgtatattaatgttaaaaattgtaccttgatcaatgtactttttataaacttgccatagatatctcagatttgaaacctcaagacagatttattattcttaaatgctgtatgataatgaagaaaaataaaaatttatttcttgcaaagttaaatgtttgttaaattcaatagaatgactcatttatggttaactttgggcaatttataatttcagacaagactgtttagcaagtattttattgaaaagtaaaaaaaattgcaatttaa

SEQ ID NO: 9674 - DNA, 1066 bp, Homo sapiens
  source 1..1066: mol_type = unassigned DNA; mol_type = unassigned DNA
cgcgcgtctgccgttgtcacaggccagggaggtggcaccaccaggcgaagcttggcgagattgtgtcgtcaagcgcgtacgggcgccaattggccgggcgatgtggcgtggactggcgctggcgcgagcgattggctgcgcggcccgggggcggggccagtgggcggtgcgcgccgcagactgtgctcaaagcgggcgccatccgggaccggcggttgtctgtggccggaggctgatcaggattattgcatcgagcttttagtgtcttcttattcaacaccgaaaataagcttctgctacagcaaagatcagatgctaagattacctttccaggttgttttacgaatacgtgttgtagtcatccattaagcaatccagccgagcttgaggaaagtgacgcccttggagtgaggcgagcagcacagagacggctgaaagctgagctaggaattcccttggaagaggttcctccagaagaaattaattatttaacacgaattcactacaaagctcagtctgatggtatctggggtgaacatgaaattgattacattttgttggtgaggaagaatgtaactttgaatccagatcccaatgagattaaaagctattgttatgtgtcaaaggaagaactaaaagaacttctgaaaaaagcagccagtggtgaaattaagataacgccatggtttaaaattattgcagcgacttttctctttaaatggtgggataacttaaatcatttgaatcagtttgttgaccatgagaaaatatacagaatgtgaatatgtaggtaaatgattacagaaaaatttatctgcttaacaaacttagaatgactttttccttttaaatttagttctatcattaatttatcattaaatttagttctatcatttggtactatcattaatgtattatatacactgatactttaaaacttgtgtggaaaaaactaacttataattttgtatcacacaccctggatatgtgttctgtttctaagcgacatttgtgagagattattgtaaaatgagagcgagcaaataaaacttaatttaatctttgc

SEQ ID NO: 9675 - DNA, 441 bp, Homo sapiens
  source 1..441: mol_type = unassigned DNA; mol_type = unassigned DNA
tgcaagagggtgacagcaacacactcaaggcgcttctcctgggaatggagcaggagaagagatggggagcatcgcatagatggaactagacctttttcttgggttggatgatgtgttcccgcgtctactacatggattattgcatcgagcttttagtgtcttcttattcaacaccgaaaataagcttctgctacagcaaagatcagatgctaagattacctttccaggttgttttacgaatacgtgttgtagtcatccattaagcaatccagccgagcttgaggaaagtgacgcccttggagtgaggcgagcagcacagagacggctgaaagctgagctaggaattcccttggaagaggtaaccagctctcctacacaaccatacaagctgaaacctaaacatactataaaaaggtttttaataaaatttttaaattcaaa

SEQ ID NO: 9676 - DNA, 1017 bp, Homo sapiens
  source 1..1017: mol_type = unassigned DNA; mol_type = unassigned DNA
tgtggccggaggctgatcaggtactgtggacgggcggcggagttcgggagacaggggcagggcggcatcggggagctgcgggacggggcggggaggaggcccgaggtctgagccacccgtgaggtctcggcgcggaggcctggacagctgggggtggcggcgttggtctcccgaactggagggaggccgggccttcccgggctgtggtgggcgcccgcgccccgtggaaggcggaggcgtgagtcggggcgtcagagacgttgccattctttgtcagcggaaaagatcgtcgtctgcgcacagtcacctgaggtttaggaactcgtggaactggaaaccgagtcgcaggagactaagagttgcgagtctccccttagagaattcagaaacaagcgtagacagcatcgtcagaaacacgagcgtgacgacaccggcctccccgtgccgagtccacgcgtgtgacgcgggtgcatacacctgcgtccgtgcaagagggtgacagcaacacactcaaggcgcttctcctgggaatggagcaggagaagagatggggagcatcgcatagatggaactagacctttttcttgggttggatgatgtgttcccgcgtctactacatgtgttctagaacagatcagacattttgtaatgatgcctgaaataaacactaaccacctcgacaagcaacaggttcaactcctggcagagatgtgtatccttattgatgaaaatgacaataaaattggagctgagaccaagaagaattgtcacctgaacgagaacattgagaaaggattattgcatcgagcttttagtgtcttcttattcaacaccgaaaataagcttctgctacagcaaagatcagatgctaagattacctttccaggttgttttacgaatacgtgttgtagtcatccattaagcaatccagccgagcttgaggaaagtgacgcccttggagtgaggcgagcagcacagagacggctgaaagctgagctaggaattcccttggaagag

SEQ ID NO: 9677 - DNA, 1029 bp, Homo sapiens
  source 1..1029: mol_type = unassigned DNA; mol_type = unassigned DNA
gcgcgccgcagactgtgctcaaagcgggcgccatccgggaccggcggttgtctgtggccggaggctgatcagtgttctagaacagatcagacattttgtaatgatgcctgaaataaacactaaccacctcgacaagcaacaggttcaactcctggcagagatgtgtatccttattgatgaaaatgacaataaaattggagctgagaccaagaagaattgtcacctgaacgagaacattgagaaaggtgctgctttgaaacagtctttcttgtaaagcgatttgtgtaggcatttccgatttgctgagaagagcactctgttcaaggaagtgcagtcttcagtaataccgtattttctcgttggttccagttcgttaaatagtgtggtcattagcatctgctttgctgtcttcctgttacagcgatttctcttcacttcatgcctgttactcggcttcttcagagttattctggattcatagaagagggactagccctgacatacagcagcagcctagcctctaatatttctagagagtggagagaggcgggcaccatgcagggaagcatgtgccttcaccactttccgagaactgaatgtccttgatagggaacttgactgccggaaaggggccaccagcatcaccatttccttcactcgacggccaacttccttgcccagtgcagagctcttcctcaccatagccatgcagagactatgcatgtggataaaccatgggaaaaagcaaaagcagcagcaagttactaatgttattctgaactgcagggagagaatttggcaaataactggtacttaaggctaaaataattgttatttcttttgctttcaggattattgcatcgagcttttagtgtcttcttattcaacaccgaaaataagcttctgctacagcaaagatcagatgctaagattacctttccaggttgttttacgaatacgtgttgtagtcatccattaagcaatccagccgagcttgaggaaagtgacgcccttggagtgaggcgagca

SEQ ID NO: 9678 - DNA, 2571 bp, Homo sapiens
  source 1..2571: mol_type = unassigned DNA; mol_type = unassigned DNA
ctggatgtgattcaggttctcttttgtacacattgcacactcatcctccttgcgtcctaaagcttttttttttttagttgagtcatttaatcaaaaagactttttttagaaaaaaatttcctcttgagccatcatgcacatctgactgcagccccagcgagcccttccttccttgtctgactgctcttcttctcgatttcttcttgttctgccttctcggtttgcagccctgacccccgctgtgtgtctggcccttggtgactgtccgtgtttctgttcctgtcattgtaactgtgacttttctctctgtctgcccccccttcctactggttcatgcttctcccccattcccaccctctctgcccggcctcccgctcccgccctttctcctcatgcacccggcctcgtctctgtagtctctgcacttgtctcccattaaggtcccatccatgggggggcggaagcgggagcgcaaggctgccgtcgaggaggacacctccctgtcggagagtgaggggccccgccagcccgatggggatgaggaggagagcacagccctcagcatcaacgaggagatgcagcgcatgctcaaccagctgagggagtatgattttgaggacgactgtgacagcctgacttgggaggagactgaggagaccctgctgctttgggaggatttctcaggctatgccatggcagctgcagaggcccagggagagcaggaagatagcctggagaaggtgattaaagatacggagtccctgttcaaaacccgggagaaggagtatcaggagaccattgaccagatagagctggagttggccacggccaagaacgacatgaaccggcacctgcacgagtacatggagatgtgcagcatgaagcgcggcctggacgtgcagatggagacctgccgccggctcatcacccagtctggagaccgaaagtctcctgctttcactgcggtcccgcttagcgacccgccgccgccgccaagcgaggctgaggactccgatcgcgatgtctcatctgacagctccatgagatagagacctgcctcccccttgcacccgaggccctcgcagcagggagctcagcgaggcagagggtggggctgcacagaggggaacatcagctgcagctctgcaccaggccggtccctggggactggggcgctcctccctcaggctttctccctcagtcttggcttctccagggctctggggtgtctggagctaggcttggccctaccattctggggccatttccaccacagttggggctctcctgccttcacgcgtgggtgtctgctacttccccatctttaaaatgctgccagagcgattgcggcccctcaccttgtccacgtatcaggaatgtgaatgtgggacctttcctccatccctgttgtccggagccagctcactgtcttccacactggtgctaactggcccaggcactggagtggaatagaatgcagctggaggctacgcatggcctctgcagcacacgcagctggagagggcttctgtccctgtcagcggcagagggcgttggggctggccggggcaccttgtccctgctatggtccacgtgctcacgctgtccacctgccaggtggagtgtatgtggctgtggccctccctcgtggaggtgccgtgctttaaagaggccttagtgcccgggatgggcacagtgttttgaagggaggtgggagctcttgctctcctggtcactgcagaatgacagagaaggtgaagctccatgcatgtgtgcgcgggtgtatgtgcgctcagggtctctgtttaagtatcagctaaagatgtgcttcctccgtgtctgtcatacactgagaccaacaggctacagtgtccctgattcttggaaaagcctggagaagctggggagatgcggttcacaatgcctcggtataggaggctgtgttgagctgacattcaaatggattctttaataataatgaaactggcgagtatttattgtgcactttggtgtcactgtctcaagcacttcctaatattcactagtttgaactctgaggtaggtactttttttttttttgagatggagtctcatactctgttgcctaggctggagtgcagtggtgtggtctcagctcactgcagcctctgcctccggggtgcaagcgattctcctgcttcagcatgcctgtagctgggactataggcatgtgccatgaagcctggctgatttttgtaattttagtagagacggagtttcaccatgttggccaggctggtctcaaactcctgacctcaggtgatacacccaccttggcctcccaaagtgctggggttacaggcgtgcgcgctctaccgaggtatgtacttttgtctccactaggtaagcacacgtgcaaagtgaggcccgggagtaactgcccaaagcaactgagccgttcagtggcagagccaggggtctggacctaggtcccagctacacgccttgcccctacccaagttcccctaaggacgatgatggaaataagtcaccctgacacatctcagttcatcttcctcaaaactatgcgag

SEQ ID NO: 9679 - DNA, 2843 bp, Homo sapiens
  source 1..2843: mol_type = unassigned DNA; mol_type = unassigned DNA
gagcagttagtgagcagcttctggggtggaggctctgcagctggcgccggggcgctgggccgattcctcagcctctgaggcctcacctttggcgtggggaaataaacgcgtgcgctctgcaggagtattgtgagggtggtcatgtactcgggacagtgcccagcatgcagtgttagctggaagagtgttagctgttgcgattattatagtcctttctccactcttataattcccaggagtctctttctctctgggaatgtaagttctaggaggatgaggaccgctagtcgttccagtgagccccctgcatgtcccaggcactggccatgccctccagggcttccgtttggccagggagcagtggcccgagccgccccatgcccagcatattcacacagtgctgtggggaggccaccgctacccaggaagaggggtgcagtcagctcagggagactccacagaagaggcaccggtgcaatgtggtgggaaggatgaggaccttgccaggcctaattcgtccttgtctggagaactgggcgcctcctcactgttccctgggctccctggacagaacctgtcggagctggacaccaagatccaggagaaagccatgaaggtggatatggacatctgccgccgcatcgacatcaccgccaagctctgcgatgtggctcagcagcgcaactgcgaggacatgatccagatgttccaggtcccatccatgggggggcggaagcgggagcgcaaggctgccgtcgaggaggacacctccctgtcggagagtgaggggccccgccagcccgatggggatgaggaggagagcacagccctcagcatcaacgaggagatgcagcgcatgctcaaccagctgagggagtatgattttgaggacgactgtgacagcctgacttgggaggagactgaggagaccctgctgctttgggaggatttctcaggctatgccatggcagctgcagaggcccagggagagcaggaagatagcctggagaaggtgattaaagatacggagtccctgttcaaaacccgggagaaggagtatcaggagaccattgaccagatagagctggagttggccacggccaagaacgacatgaaccggcacctgcacgagtacatggagatgtgcagcatgaagcgcggcctggacgtgcagatggagacctgccgccggctcatcacccagtctggagaccgaaagtctcctgctttcactgcggtcccgcttagcgacccgccgccgccgccaagcgaggctgaggactccgatcgcgatgtctcatctgacagctccatgagatagagacctgcctcccccttgcacccgaggccctcgcagcagggagctcagcgaggcagagggtggggctgcacagaggggaacatcagctgcagctctgcaccaggccggtccctggggactggggcgctcctccctcaggctttctccctcagtcttggcttctccagggctctggggtgtctggagctaggcttggccctaccattctggggccatttccaccacagttggggctctcctgccttcacgcgtgggtgtctgctacttccccatctttaaaatgctgccagagcgattgcggcccctcaccttgtccacgtatcaggaatgtgaatgtgggacctttcctccatccctgttgtccggagccagctcactgtcttccacactggtgctaactggcccaggcactggagtggaatagaatgcagctggaggctacgcatggcctctgcagcacacgcagctggagagggcttctgtccctgtcagcggcagagggcgttggggctggccggggcaccttgtccctgctatggtccacgtgctcacgctgtccacctgccaggtggagtgtatgtggctgtggccctccctcgtggaggtgccgtgctttaaagaggccttagtgcccgggatgggcacagtgttttgaagggaggtgggagctcttgctctcctggtcactgcagaatgacagagaaggtgaagctccatgcatgtgtgcgcgggtgtatgtgcgctcagggtctctgtttaagtatcagctaaagatgtgcttcctccgtgtctgtcatacactgagaccaacaggctacagtgtccctgattcttggaaaagcctggagaagctggggagatgcggttcacaatgcctcggtataggaggctgtgttgagctgacattcaaatggattctttaataataatgaaactggcgagtatttattgtgcactttggtgtcactgtctcaagcacttcctaatattcactagtttgaactctgaggtaggtactttttttttttttgagatggagtctcatactctgttgcctaggctggagtgcagtggtgtggtctcagctcactgcagcctctgcctccggggtgcaagcgattctcctgcttcagcatgcctgtagctgggactataggcatgtgccatgaagcctggctgatttttgtaattttagtagagacggagtttcaccatgttggccaggctggtctcaaactcctgacctcaggtgatacacccaccttggcctcccaaagtgctggggttacaggcgtgcgcgctctaccgaggtatgtacttttgtctccactaggtaagcacacgtgcaaagtgaggcccgggagtaactgcccaaagcaactgagccgttcagtggcagagccaggggtctggacctaggtcccagctacacgccttgcccctacccaagttcccctaaggacgatgatggaaataagtcaccctgacacatctcagttcatcttcctcaaaactatgcgag

SEQ ID NO: 9680 - DNA, 2850 bp, Homo sapiens
  source 1..2850: mol_type = unassigned DNA; mol_type = unassigned DNA
gatgagacatgacaaagctggctctgggaagcatgccctacctaggaccctgccctgtggcccagggtgtcgtccggcccacttgcagtcttaatctctgaattctgggccctggaacaggctgtgtctagttctcatttgccgtactcaccgggcccctttacatactctactttctctttccctctgggtttgagtgctagtaaccccaggctcgtgtgtccactgctgtcatgctgctgtgggacttccggcctctgagccagtctggtcacctctctgtgactcccttagaggaggctctggatgcttttacagggttaaatgataccacaagaggcagggcagcgggctcgacgagctctgttctggtgcgggcaggaggcgggagcccggatctgtgcgactgaaggtgggaagaggagtacacggtgcggatccagctgcaagaccgtgtaaatgagctccaggaggaagcccaggaggctgatgcctgccaggaggagctggcactgaaggtggaacagttgaaggctgagctggtggtcttcaaggggctcatgagtaacaacctgtcggagctggacaccaagatccaggagaaagccatgaaggtggatatggacatctgccgccgcatcgacatcaccgccaagctctgcgatgtggctcagcagcgcaactgcgaggacatgatccagatgttccagaagaagctggtcccatccatgggggggcggaagcgggagcgcaaggctgccgtcgaggaggacacctccctgtcggagagtgaggggccccgccagcccgatggggatgaggaggagagcacagccctcagcatcaacgaggagatgcagcgcatgctcaaccagctgagggagtatgattttgaggacgactgtgacagcctgacttgggaggagactgaggagaccctgctgctttgggaggatttctcaggctatgccatggcagctgcagaggcccagggagagcaggaagatagcctggagaaggtgattaaagatacggagtccctgttcaaaacccgggagaaggagtatcaggagaccattgaccagatagagctggagttggccacggccaagaacgacatgaaccggcacctgcacgagtacatggagatgtgcagcatgaagcgcggcctggacgtgcagatggagacctgccgccggctcatcacccagtctggagaccgaaagtctcctgctttcactgcggtcccgcttagcgacccgccgccgccgccaagcgaggctgaggactccgatcgcgatgtctcatctgacagctccatgagatagagacctgcctcccccttgcacccgaggccctcgcagcagggagctcagcgaggcagagggtggggctgcacagaggggaacatcagctgcagctctgcaccaggccggtccctggggactggggcgctcctccctcaggctttctccctcagtcttggcttctccagggctctggggtgtctggagctaggcttggccctaccattctggggccatttccaccacagttggggctctcctgccttcacgcgtgggtgtctgctacttccccatctttaaaatgctgccagagcgattgcggcccctcaccttgtccacgtatcaggaatgtgaatgtgggacctttcctccatccctgttgtccggagccagctcactgtcttccacactggtgctaactggcccaggcactggagtggaatagaatgcagctggaggctacgcatggcctctgcagcacacgcagctggagagggcttctgtccctgtcagcggcagagggcgttggggctggccggggcaccttgtccctgctatggtccacgtgctcacgctgtccacctgccaggtggagtgtatgtggctgtggccctccctcgtggaggtgccgtgctttaaagaggccttagtgcccgggatgggcacagtgttttgaagggaggtgggagctcttgctctcctggtcactgcagaatgacagagaaggtgaagctccatgcatgtgtgcgcgggtgtatgtgcgctcagggtctctgtttaagtatcagctaaagatgtgcttcctccgtgtctgtcatacactgagaccaacaggctacagtgtccctgattcttggaaaagcctggagaagctggggagatgcggttcacaatgcctcggtataggaggctgtgttgagctgacattcaaatggattctttaataataatgaaactggcgagtatttattgtgcactttggtgtcactgtctcaagcacttcctaatattcactagtttgaactctgaggtaggtactttttttttttttgagatggagtctcatactctgttgcctaggctggagtgcagtggtgtggtctcagctcactgcagcctctgcctccggggtgcaagcgattctcctgcttcagcatgcctgtagctgggactataggcatgtgccatgaagcctggctgatttttgtaattttagtagagacggagtttcaccatgttggccaggctggtctcaaactcctgacctcaggtgatacacccaccttggcctcccaaagtgctggggttacaggcgtgcgcgctctaccgaggtatgtacttttgtctccactaggtaagcacacgtgcaaagtgaggcccgggagtaactgcccaaagcaactgagccgttcagtggcagagccaggggtctggacctaggtcccagctacacgccttgcccctacccaagttcccctaaggacgatgatggaaataagtcaccctgacacatctcagttcatcttcctcaaaactatgcgag

SEQ ID NO: 9681 - DNA, 2686 bp, Homo sapiens
  source 1..2686: mol_type = unassigned DNA; mol_type = unassigned DNA
tgctcctgcaccggtctgcatctcccagcagaaggcgcagccatgaatccgttattcggccccaacctcttcctcctgcagcaggagcagcagggcctggccgggccactgggggactcactgggaggcgaccacttcgccgggggaggagacttgcccccggcgcctctctcgccggccggccctgctgcctactcgccgcccgggccgggcccggccccgcctgccgccatggccctccgcaatgacctgggctccaacatcaacgtgctcaagaccctgaacctccggttccgctgcttcctggccaaggtgcatgagctggagcgccggaaccggctgttggagaagcaactgcagcaagcgctggaggagggtaagcagggccggcggggcctgggtcgtcgcgaccaggcagtgcagaccggcttcgtcagccccatccggcccctggggctgcagctgggcgcccggccggccgctgtctgcagcccttcggcgcgcgtgctgggctcgcccgcgcgctccccggccggccccctcgcgccctccgcggccagcctctcgtcgtcctccacctccacctccaccacctattcctcgtcggcccgcttcatgcccggcaccatctggtcgttctcgcacgcccgccggctcgggccgggactggagcccactctggtgcaagggcctggcttgtcgtgggtgcacccggatggggtgggcgtccagatcgacaccatcacgcccgagatccgcgctctctacaacgtgctggccaaagtgaagcgggagcgggacgagtacaagcggaggtgggaagaggagtacacggtgcggatccagctgcaagaccgtgtaaatgagctccaggaggaagcccaggaggctgatgcctgccaggaggagctggcactgaaggtggaacagttgaaggctgagctggtggtcttcaaggggctcatgagtaacaacctgtcggagctggacaccaagatccaggagaaagccatgaaggtggatatggacatctgccgccgcatcgacatcaccgccaagctctgcgatgtggctcagcagcgcaactgcgaggacatgatccagatgttccagaagaagctggtcccatccatgggggggcggaagcgggagcgcaaggctgccgtcgaggaggacacctccctgtcggagagtgaggggccccgccagcccgatggggatgaggaggagagcacagccctcagcatcaacgaggagatgcagcgcatgctcaaccagctgagggagtatgattttgaggacgactgtgacagcctgacttgggaggagactgaggagaccctgctgctttgggaggatttctcaggctatgccatggcagctgcagaggcccagggagagcaggaagatagcctggagaaggtgattaaagatacggagtccctgttcaaaacccgggagaaggagtatcaggagaccattgaccagatagagctggagttggccacggccaagaacgacatgaaccggcacctgcacgagtacatggagatgtgcagcatgaagcgcggcctggacgtgcagatggagacctgccgccggctcatcacccagtctggagaccgaaagtctcctgctttcactgcggtcccgcttagcgacccgccgccgccgccaagcgaggctgaggactccgatcgcgatgtctcatctgacagctccatgagatagagacctgcctcccccttgcacccgaggccctcgcagcagggagctcagcgaggcagagggtggggctgcacagaggggaacatcagctgcagctctgcaccaggccggtccctggggactggggcgctcctccctcaggctttctccctcagtcttggcttctccagggctctggggtgtctggagctaggcttggccctaccattctggggccatttccaccacagttggggctctcctgccttcacgcgtgggtgtctgctacttccccatctttaaaatgctgccagagcgattgcggcccctcaccttgtccacgtatcaggaatgtgaatgtgggacctttcctccatccctgttgtccggagccagctcactgtcttccacactggtgctaactggcccaggcactggagtggaatagaatgcagctggaggctacgcatggcctctgcagcacacgcagctggagagggcttctgtccctgtcagcggcagagggcgttggggctggccggggcaccttgtccctgctatggtccacgtgctcacgctgtccacctgccaggtggagtgtatgtggctgtggccctccctcgtggaggtgccgtgctttaaagaggccttagtgcccgggatgggcacagtgttttgaagggaggtgggagctcttgctctcctggtcactgcagaatgacagagaaggtgaagctccatgcatgtgtgcgcgggtgtatgtgcgctcagggtctctgtttaagtatcagctaaagatgtgcttcctccgtgtctgtcatacactgagaccaacaggctacagtgtccctgattcttggaaaagcctggagaagctggggagatgcggttcacaatgcctcggtataggaggctgtgttgagctgacattcaaatggattctttaataataatgaaactggcgagtatttattgtgca

SEQ ID NO: 9682 - DNA, 2786 bp, Homo sapiens
  source 1..2786: mol_type = unassigned DNA; mol_type = unassigned DNA
tgctcctgcaccggtctgcatctcccagcagaaggcgcagccatgaatccgttattcggccccaacctcttcctcctgcagcaggagcagcagggcctggccgggccactgggggactcactgggaggcgaccacttcgccgggggaggagacttgcccccggcgcctctctcgccggccggccctgctgcctactcgccgcccgggccgggcccggccccgcctgccgccatggccctccgcaatgacctgggctccaacatcaacgtgctcaagaccctgaacctccggttccgctgcttcctggccaaggtgcatgagctggagcgccggaaccggctgttggagaagcaactgcagcaagcgctggaggagggtaagcagggccggcggggcctgggtcgtcgcgaccaggcagtgcagaccggcttcgtcagccccatccggcccctggggctgcagctgggcgcccggccggccgctgtctgcagcccttcggcgcgcgtgctgggctcgcccgcgcgctccccggccggccccctcgcgccctccgcggccagcctctcgtcgtcctccacctccacctccaccacctattcctcgtcggcccgcttcatgcccggcaccatctggtcgttctcgcacgcccgccggctcgggccgggactggagcccactctggtgcaagggcctggcttgtcgtgggtgcacccggatggggtgggcgtccagatcgacaccatcacgcccgagatccgcgctctctacaacgtgctggccaaagtgaagcgggagcgggacgagtacaagcggagatgcttttacagggttaaatgataccacaagaggcagggcagcgggctcgacgagctctgttctggtgcgggcaggaggcgggagcccggatctgtgcgactgaaggtgggaagaggagtacacggtgcggatccagctgcaagaccgtgtaaatgagctccaggaggaagcccaggaggctgatgcctgccaggaggagctggcactgaaggtggaacagttgaaggctgagctggtggtcttcaaggggctcatgagtaacaacctgtcggagctggacaccaagatccaggagaaagccatgaaggtggatatggacatctgccgccgcatcgacatcaccgccaagctctgcgatgtggctcagcagcgcaactgcgaggacatgatccagatgttccaggtcccatccatgggggggcggaagcgggagcgcaaggctgccgtcgaggaggacacctccctgtcggagagtgaggggccccgccagcccgatggggatgaggaggagagcacagccctcagcatcaacgaggagatgcagcgcatgctcaaccagctgagggagtatgattttgaggacgactgtgacagcctgacttgggaggagactgaggagaccctgctgctttgggaggatttctcaggctatgccatggcagctgcagaggcccagggagagcagcaggaagatagcctggagaaggtgattaaagatacggagtccctgttcaaaacccgggagaaggagtatcaggagaccattgaccagatagagctggagttggccacggccaagaacgacatgaaccggcacctgcacgagtacatggagatgtgcagcatgaagcgcggcctggacgtgcagatggagacctgccgccggctcatcacccagtctggagaccgaaagtctcctgctttcactgcggtcccgcttagcgacccgccgccgccgccaagcgaggctgaggactccgatcgcgatgtctcatctgacagctccatgagatagagacctgcctcccccttgcacccgaggccctcgcagcagggagctcagcgaggcagagggtggggctgcacagaggggaacatcagctgcagctctgcaccaggccggtccctggggactggggcgctcctccctcaggctttctccctcagtcttggcttctccagggctctggggtgtctggagctaggcttggccctaccattctggggccatttccaccacagttggggctctcctgccttcacgcgtgggtgtctgctacttccccatctttaaaatgctgccagagcgattgcggcccctcaccttgtccacgtatcaggaatgtgaatgtgggacctttcctccatccctgttgtccggagccagctcactgtcttccacactggtgctaactggcccaggcactggagtggaatagaatgcagctggaggctacgcatggcctctgcagcacacgcagctggagagggcttctgtccctgtcagcggcagagggcgttggggctggccggggcaccttgtccctgctatggtccacgtgctcacgctgtccacctgccaggtggagtgtatgtggctgtggccctccctcgtggaggtgccgtgctttaaagaggccttagtgcccgggatgggcacagtgttttgaagggaggtgggagctcttgctctcctggtcactgcagaatgacagagaaggtgaagctccatgcatgtgtgcgcgggtgtatgtgcgctcagggtctctgtttaagtatcagctaaagatgtgcttcctccgtgtctgtcatacactgagaccaacaggctacagtgtccctgattcttggaaaagcctggagaagctggggagatgcggttcacaatgcctcggtataggaggctgtgttgagctgacattcaaatggattctttaataataatgaaactggcgagtatttattgtgca

SEQ ID NO: 9683 - DNA, 2677 bp, Homo sapiens
  source 1..2677: mol_type = unassigned DNA; mol_type = unassigned DNA
tgctcctgcaccggtctgcatctcccagcagaaggcgcagccatgaatccgttattcggccccaacctcttcctcctgcagcaggagcagcagggcctggccgggccactgggggactcactgggaggcgaccacttcgccgggggaggagacttgcccccggcgcctctctcgccggccggccctgctgcctactcgccgcccgggccgggcccggccccgcctgccgccatggccctccgcaatgacctgggctccaacatcaacgtgctcaagaccctgaacctccggttccgctgcttcctggccaaggtgcatgagctggagcgccggaaccggctgttggagaagcaactgcagcaagcgctggaggagggtaagcagggccggcggggcctgggtcgtcgcgaccaggcagtgcagaccggcttcgtcagccccatccggcccctggggctgcagctgggcgcccggccggccgctgtctgcagcccttcggcgcgcgtgctgggctcgcccgcgcgctccccggccggccccctcgcgccctccgcggccagcctctcgtcgtcctccacctccacctccaccacctattcctcgtcggcccgcttcatgcccggcaccatctggtcgttctcgcacgcccgccggctcgggccgggactggagcccactctggtgcaagggcctggcttgtcgtgggtgcacccggatggggtgggcgtccagatcgacaccatcacgcccgagatccgcgctctctacaacgtgctggccaaagtgaagcgggagcgggacgagtacaagcggaggtgggaagaggagtacacggtgcggatccagctgcaagaccgtgtaaatgagctccaggaggaagcccaggaggctgatgcctgccaggaggagctggcactgaaggtggaacagttgaaggctgagctggtggtcttcaaggggctcatgagtaacaacctgtcggagctggacaccaagatccaggagaaagccatgaaggtggatatggacatctgccgccgcatcgacatcaccgccaagctctgcgatgtggctcagcagcgcaactgcgaggacatgatccagatgttccaggtcccatccatgggggggcggaagcgggagcgcaaggctgccgtcgaggaggacacctccctgtcggagagtgaggggccccgccagcccgatggggatgaggaggagagcacagccctcagcatcaacgaggagatgcagcgcatgctcaaccagctgagggagtatgattttgaggacgactgtgacagcctgacttgggaggagactgaggagaccctgctgctttgggaggatttctcaggctatgccatggcagctgcagaggcccagggagagcaggaagatagcctggagaaggtgattaaagatacggagtccctgttcaaaacccgggagaaggagtatcaggagaccattgaccagatagagctggagttggccacggccaagaacgacatgaaccggcacctgcacgagtacatggagatgtgcagcatgaagcgcggcctggacgtgcagatggagacctgccgccggctcatcacccagtctggagaccgaaagtctcctgctttcactgcggtcccgcttagcgacccgccgccgccgccaagcgaggctgaggactccgatcgcgatgtctcatctgacagctccatgagatagagacctgcctcccccttgcacccgaggccctcgcagcagggagctcagcgaggcagagggtggggctgcacagaggggaacatcagctgcagctctgcaccaggccggtccctggggactggggcgctcctccctcaggctttctccctcagtcttggcttctccagggctctggggtgtctggagctaggcttggccctaccattctggggccatttccaccacagttggggctctcctgccttcacgcgtgggtgtctgctacttccccatctttaaaatgctgccagagcgattgcggcccctcaccttgtccacgtatcaggaatgtgaatgtgggacctttcctccatccctgttgtccggagccagctcactgtcttccacactggtgctaactggcccaggcactggagtggaatagaatgcagctggaggctacgcatggcctctgcagcacacgcagctggagagggcttctgtccctgtcagcggcagagggcgttggggctggccggggcaccttgtccctgctatggtccacgtgctcacgctgtccacctgccaggtggagtgtatgtggctgtggccctccctcgtggaggtgccgtgctttaaagaggccttagtgcccgggatgggcacagtgttttgaagggaggtgggagctcttgctctcctggtcactgcagaatgacagagaaggtgaagctccatgcatgtgtgcgcgggtgtatgtgcgctcagggtctctgtttaagtatcagctaaagatgtgcttcctccgtgtctgtcatacactgagaccaacaggctacagtgtccctgattcttggaaaagcctggagaagctggggagatgcggttcacaatgcctcggtataggaggctgtgttgagctgacattcaaatggattctttaataataatgaaactggcgagtatttattgtgca

SEQ ID NO: 9684 - DNA, 2680 bp, Homo sapiens
  source 1..2680: mol_type = unassigned DNA; mol_type = unassigned DNA
cctgctcctgcaccggtctgcatctcccagcagaaggcgcagccatgaatccgttattcggccccaacctcttcctcctgcagcaggagcagcagggcctggccgggccactgggggactcactgggaggcgaccacttcgccgggggaggagacttgcccccggcgcctctctcgccggccggccctgctgcctactcgccgcccgggccgggcccggccccgcctgccgccatggccctccgcaatgacctgggctccaacatcaacgtgctcaagaccctgaacctccggttccgctgcttcctggccaaggtgcatgagctggagcgccggaaccggctgttggagaagcaactgcagcaagcgctggaggagggtaagcagggccggcggggcctgggtcgtcgcgaccaggcagtgcagaccggcttcgtcagccccatccggcccctggggctgcagctgggcgcccggccggccgctgtctgcagcccttcggcgcgcgtgctgggctcgcccgcgcgctccccggccggccccctcgcgccctccgcggccagcctctcgtcgtcctccacctccacctccaccacctattcctcgtcggcccgcttcatgcccggcaccatctggtcgttctcgcacgcccgccggctcgggccgggactggagcccactctggtgcaagggcctggcttgtcgtgggtgcacccggatggggtgggcgtccagatcgacaccatcacgcccgagatccgcgctctctacaacgtgctggccaaagtgaagcgggagcgggacgagtacaagcggaggtgggaagaggagtacacggtgcggatccagctgcaagaccgtgtaaatgagctccaggaggaagcccaggaggctgatgcctgccaggaggagctggcactgaaggtggaacagttgaaggctgagctggtggtcttcaaggggctcatgagtaacaacctgtcggagctggacaccaagatccaggagaaagccatgaaggtggatatggacatctgccgccgcatcgacatcaccgccaagctctgcgatgtggctcagcagcgcaactgcgaggacatgatccagatgttccagaagaagctggtcccatccatgggggggcggaagcgggagcgcaaggctgccgtcgaggaggacacctccctgtcggagagtgaggggccccgccagcccgatggggatgaggaggagagcacagccctcagcatcaacgaggagatgcagcgcatgctcaaccagctgagggagtatgattttgaggacgactgtgacagcctgacttgggaggagactgaggagaccctgctgctttgggaggatttctcaggctatgccatggcagctgcagaggcccagggagagcagcaggaagatagcctggagaaggtgattaaagatacggagtccctgttcaaaacccgggagaaggagtatcaggagaccattgaccagatagagctggagttggccacggccaagaacgacatgaaccggcacctgcacgagtacatggagatgtgcagcatgaagcgcggcctggacgtgcagatggagacctgccgccggctcatcacccagtctggagaccgaaagtctcctgctttcactgcggtcccgcttagcgacccgccgccgccgccaagcgaggctgaggactccgatcgcgatgtctcatctgacagctccatgagatagagacctgcctcccccttgcacccgaggccctcgcagcagggagctcagcgaggcagagggtggggctgcacagaggggaacatcagctgcagctctgcaccaggccggtccctggggactggggcgctcctccctcaggctttctccctcagtcttggcttctccagggctctggggtgtctggagctaggcttggccctaccattctggggccatttccaccacagttggggctctcctgccttcacgcgtgggtgtctgctacttccccatctttaaaatgctgccagagcgattgcggcccctcaccttgtccacgtatcaggaatgtgaatgtgggacctttcctccatccctgttgtccggagccagctcactgtcttccacactggtgctaactggcccaggcactggagtggaatagaatgcagctggaggctacgcatggcctctgcagcacacgcagctggagagggcttctgtccctgtcagcggcagagggcgttggggctggccggggcaccttgtccctgctatggtccacgtgctcacgctgtccacctgccaggtggagtgtatgtggctgtggccctccctcgtggaggtgccgtgctttaaagaggccttagtgcccgggatgggcacagtgttttgaagggaggtgggagctcttgctctcctggtcactgcagaatgacagagaaggtgaagctccatgcatgtgtgcgcgggtgtatgtgcgctcagggtctctgtttaagtatcagctaaagatgtgcttcctccgtgtctgtcatacactgagaccaacaggctacagtgtccctgattcttggaaaagcctggagaagctggggagatgcggttcacaatgcctcggtataggaggctgtgttgagctgacattcaaatggattctttaataataatgaaactggcgagta

SEQ ID NO: 9685 - DNA, 3001 bp, Homo sapiens
  source 1..3001: mol_type = unassigned DNA; mol_type = unassigned DNA
tgctcctgcaccggtctgcatctcccagcagaaggcgcagccatgaatccgttattcggccccaacctcttcctcctgcagcaggagcagcagggcctggccgggccactgggggactcactgggaggcgaccacttcgccgggggaggagacttgcccccggcgcctctctcgccggccggccctgctgcctactcgccgcccgggccgggcccggccccgcctgccgccatggccctccgcaatgacctgggctccaacatcaacgtgctcaagaccctgaacctccggttccgctgcttcctggccaaggtgcatgagctggagcgccggaaccggctgttggagaagcaactgcagcaagcgctggaggagggtaagcagggccggcggggcctgggtcgtcgcgaccaggcagtgcagaccggcttcgtcagccccatccggcccctggggctgcagctgggcgcccggccggccgctgtctgcagcccttcggcgcgcgtgctgggctcgcccgcgcgctccccggccggccccctcgcgccctccgcggccagcctctcgtcgtcctccacctccacctccaccacctattcctcgtcggcccgcttcatgcccggcaccatctggtcgttctcgcacgcccgccggctcgggccgggactggagcccactctggtgcaagggcctggcttgtcgtgggtgcacccggatggggtgggcgtccagatcgacaccatcacgcccgagatccgcgctctctacaacgtgctggccaaagtgaagcgggagcgggacgagtacaagcggagatgcttttacagggttaaatgataccacaagaggcagggcagcgggctcgacgagctctgttctggtgcgggcaggaggcgggagcccggatctgtgcgactgaaggtgggaagaggagtacacggtgcggatccagctgcaagaccgtgtaaatgagctccaggaggaagcccaggaggctgatgcctgccaggaggagctggcactgaaggtggaacagttgaaggctgagctggtggtcttcaaggggctcatgagtaacaacctgtcggagctggacaccaagatccaggagaaagccatgaaggtggatatggacatctgccgccgcatcgacatcaccgccaagctctgcgatgtggctcagcagcgcaactgcgaggacatgatccagatgttccaggtcccatccatgggggggcggaagcgggagcgcaaggctgccgtcgaggaggacacctccctgtcggagagtgaggggccccgccagcccgatggggatgaggaggagagcacagccctcagcatcaacgaggagatgcagcgcatgctcaaccagctgagggagtatgattttgaggacgactgtgacagcctgacttgggaggagactgaggagaccctgctgctttgggaggatttctcaggctatgccatggcagctgcagaggcccagggagaggtaacctctgctcccggcctcagggccctctggctctgcctctccagcctgaagcccactcccccgctcctctccttgctctgtccccccatgtggctgtcatcctctacctgcgtctcccctcttcctttatccttttgcttttctttctccagtttctttaaccagacttcctctctctctctctccctgacttggccctttggaatgcgtcccatcccatccctccttggctggcctcccccgcttccctttctactccagcagcaggaagatagcctggagaaggtgattaaagatacggagtccctgttcaaaacccgggagaaggagtatcaggagaccattgaccagatagagctggagttggccacggccaagaacgacatgaaccggcacctgcacgagtacatggagatgtgcagcatgaagcgcggcctggacgtgcagatggagacctgccgccggctcatcacccagtctggagaccgaaagtctcctgctttcactgcggtcccgcttagcgacccgccgccgccgccaagcgaggctgaggactccgatcgcgatgtctcatctgacagctccatgagatagagacctgcctcccccttgcacccgaggccctcgcagcagggagctcagcgaggcagagggtggggctgcacagaggggaacatcagctgcagctctgcaccaggccggtccctggggactggggcgctcctccctcaggctttctccctcagtcttggcttctccagggctctggggtgtctggagctaggcttggccctaccattctggggccatttccaccacagttggggctctcctgccttcacgcgtgggtgtctgctacttccccatctttaaaatgctgccagagcgattgcggcccctcaccttgtccacgtatcaggaatgtgaatgtgggacctttcctccatccctgttgtccggagccagctcactgtcttccacactggtgctaactggcccaggcactggagtggaatagaatgcagctggaggctacgcatggcctctgcagcacacgcagctggagagggcttctgtccctgtcagcggcagagggcgttggggctggccggggcaccttgtccctgctatggtccacgtgctcacgctgtccacctgccaggtggagtgtatgtggctgtggccctccctcgtggaggtgccgtgctttaaagaggccttagtgcccgggatgggcacagtgttttgaagggaggtgggagctcttgctctcctggtcactgcagaatgacagagaaggtgaagctccatgcatgtgtgcgcgggtgtatgtgcgctcagggtctctgtttaagtatcagctaaagatgtgcttcctccgtgtctgtcatacactgagaccaacaggctacagtgtccctgattcttggaaaagcctggagaagctggggagatgcggttcacaatgcctcggtataggaggctgtgttgagctgacat

SEQ ID NO: 9686 - DNA, 1776 bp, Homo sapiens
  source 1..1776: mol_type = unassigned DNA; mol_type = unassigned DNA
cccagcgagcccttccttccttgtctgactgctcttcttctcgatttcttcttgttctgccttctcggtttgcagccctgacccccgctgtgtgtctggcccttggtgactgtccgtgtttctgttcctgtcattgtaactgtgacttttctctctgtctgcccccccttcctactggttcatgcttctcccccattcccaccctctctgcccggcctcccgctcccgccctttctcctcatgcacccggcctcgtctctgtagtctctgcacttgtctcccattaaggtcccatccatgggggggcggaagcgggagcgcaaggctgccgtcgaggaggacacctccctgtcggagagtgaggggccccgccagcccgatggggatgaggaggagagcacagccctcagcatcaacgaggagatgcagcgcatgctcaaccagctgagggagtatgattttgaggacgactgtgacagcctgacttgggaggagactgaggagaccctgctgctttgggaggatttctcaggctatgccatggcagctgcagaggcccagggagagcagcaggaagatagcctggagaaggtgattaaagatacggagtccctgttcaaaacccgggagaaggagtatcaggagaccattgaccagatagagctggagttggccacggccaagaacgacatgaaccggcacctgcacgagtacatggagatgtgcagcatgaagcgcggcctggacgtgcagatggagacctgccgccggctcatcacccagtctggagaccgaaagtctcctgctttcactgcggtcccgcttagcgacccgccgccgccgccaagcgaggctgaggactccgatcgcgatgtctcatctgacagctccatgagatagagacctgcctcccccttgcacccgaggccctcgcagcagggagctcagcgaggcagagggtggggctgcacagaggggaacatcagctgcagctctgcaccaggccggtccctggggactggggcgctcctccctcaggctttctccctcagtcttggcttctccagggctctggggtgtctggagctaggcttggccctaccattctggggccatttccaccacagttggggctctcctgccttcacgcgtgggtgtctgctacttccccatctttaaaatgctgccagagcgattgcggcccctcaccttgtccacgtatcaggaatgtgaatgtgggacctttcctccatccctgttgtccggagccagctcactgtcttccacactggtgctaactggcccaggcactggagtggaatagaatgcagctggaggctacgcatggcctctgcagcacacgcagctggagagggcttctgtccctgtcagcggcagagggcgttggggctggccggggcaccttgtccctgctatggtccacgtgctcacgctgtccacctgccaggtggagtgtatgtggctgtggccctccctcgtggaggtgccgtgctttaaagaggccttagtgcccgggatgggcacagtgttttgaagggaggtgggagctcttgctctcctggtcactgcagaatgacagagaaggtgaagctccatgcatgtgtgcgcgggtgtatgtgcgctcagggtctctgtttaagtatcagctaaagatgtgcttcctccgtgtctgtcatacactgagaccaacaggctacagtgtccctgattcttggaaaagcctggagaagctggggagatgcggttcacaatgcc

SEQ ID NO: 9687 - DNA, 2724 bp, Homo sapiens
  source 1..2724: mol_type = unassigned DNA; mol_type = unassigned DNA
gccttccatccctgctcctgcaccggtctgcatctcccagcagaaggcgcagccatgaatccgttattcggccccaacctcttcctcctgcagcaggagcagcagggcctggccgggccactgggggactcactgggaggcgaccacttcgccgggggaggagacttgcccccggcgcctctctcgccggccggccctgctgcctactcgccgcccgggccgggcccggccccgcctgccgccatggccctccgcaatgacctgggctccaacatcaacgtgctcaagaccctgaacctccggttccgctgcttcctggccaaggtgcatgagctggagcgccggaaccggctgttggagaagcaactgcagcaagcgctggaggagggtaagcagggccggcggggcctgggtcgtcgcgaccaggcagtgcagaccggcttcgtcagccccatccggcccctggggctgcagctgggcgcccggccggccgctgtctgcagcccttcggcgcgcgtgctgggctcgcccgcgcgctccccggccggccccctcgcgccctccgcggccagcctctcgtcgtcctccacctccacctccaccacctattcctcgtcggcccgcttcatgcccggcaccatctggtcgttctcgcacgcccgccggctcgggccgggactggagcccactctggtgcaagggcctggcttgtcgtgggtgcacccggatggggtgggcgtccagatcgacaccatcacgcccgagatccgcgctctctacaacgtgctggccaaagtgaagcgggagcgggacgagtacaagcggaggtgggaagaggagtacacggtgcggatccagctgcaagaccgtgtaaatgagctccaggaggaagcccaggaggctgatgcctgccaggaggagctggcactgaaggtggaacagttgaaggctgagctggtggtcttcaaggggctcatgagtaacaacctgtcggagctggacaccaagatccaggagaaagccatgaaggtggatatggacatctgccgccgcatcgacatcaccgccaagctctgcgatgtggctcagcagcgcaactgcgaggacatgatccagatgttccagaagaagctgtctctgcacttgtctcccattaaggtcccatccatgggggggcggaagcgggagcgcaaggctgccgtcgaggaggacacctccctgtcggagagtgaggggccccgccagcccgatggggatgaggaggagagcacagccctcagcatcaacgaggagatgcagcgcatgctcaaccagctgagggagtatgattttgaggacgactgtgacagcctgacttgggaggagactgaggagaccctgctgctttgggaggatttctcaggctatgccatggcagctgcagaggcccagggagagcagcaggaagatagcctggagaaggtgattaaagatacggagtccctgttcaaaacccgggagaaggagtatcaggagaccattgaccagatagagctggagttggccacggccaagaacgacatgaaccggcacctgcacgagtacatggagatgtgcagcatgaagcgcggcctggacgtgcagatggagacctgccgccggctcatcacccagtctggagaccgaaagtctcctgctttcactgcggtcccgcttagcgacccgccgccgccgccaagcgaggctgaggactccgatcgcgatgtctcatctgacagctccatgagatagagacctgcctcccccttgcacccgaggccctcgcagcagggagctcagcgaggcagagggtggggctgcacagaggggaacatcagctgcagctctgcaccaggccggtccctggggactggggcgctcctccctcaggctttctccctcagtcttggcttctccagggctctggggtgtctggagctaggcttggccctaccattctggggccatttccaccacagttggggctctcctgccttcacgcgtgggtgtctgctacttccccatctttaaaatgctgccagagcgattgcggcccctcaccttgtccacgtatcaggaatgtgaatgtgggacctttcctccatccctgttgtccggagccagctcactgtcttccacactggtgctaactggcccaggcactggagtggaatagaatgcagctggaggctacgcatggcctctgcagcacacgcagctggagagggcttctgtccctgtcagcggcagagggcgttggggctggccggggcaccttgtccctgctatggtccacgtgctcacgctgtccacctgccaggtggagtgtatgtggctgtggccctccctcgtggaggtgccgtgctttaaagaggccttagtgcccgggatgggcacagtgttttgaagggaggtgggagctcttgctctcctggtcactgcagaatgacagagaaggtgaagctccatgcatgtgtgcgcgggtgtatgtgcgctcagggtctctgtttaagtatcagctaaagatgtgcttcctccgtgtctgtcatacactgagaccaacaggctacagtgtccctgattcttggaaaagcctggagaagctggggagatgcggttcacaatgcctcggtataggaggctgtgttgagctgacattcaaatggattctttaataataatgaaactggcgagtatttattgtgc

SEQ ID NO: 9688 - DNA, 3101 bp, Homo sapiens
  source 1..3101: mol_type = unassigned DNA; mol_type = unassigned DNA
gatgagacatgacaaagctggctctgggaagcatgccctacctaggaccctgccctgtggcccagggtgtcgtccggcccacttgcagtcttaatctctgaattctgggccctggaacaggctgtgtctagttctcatttgccgtactcaccgggcccctttacatactctactttctctttccctctgggtttgagtgctagtaaccccaggctcgtgtgtccactgctgtcatgctgctgtgggacttccggcctctgagccagtctggtcacctctctgtgactcccttagaggaggctctggatgcttttacagggttaaatgataccacaagaggcagggcagcgggctcgacgagctctgttctggtgcgggcaggaggcgggagcccggatctgtgcgactgaaggtgggaagaggagtacacggtgcggatccagctgcaagaccgtgtaaatgagctccaggaggaagcccaggaggctgatgcctgccaggaggagctggcactgaaggtggaacagttgaaggctgagctggtggtcttcaaggggctcatgagtaacaacctgtcggagctggacaccaagatccaggagaaagccatgaaggtggatatggacatctgccgccgcatcgacatcaccgccaagctctgcgatgtggctcagcagcgcaactgcgaggacatgatccagatgttccagaagaagctggtcccatccatgggggggcggaagcgggagcgcaaggctgccgtcgaggaggacacctccctgtcggagagtgaggggccccgccagcccgatggggatgaggaggagagcacagccctcagcatcaacgaggagatgcagcgcatgctcaaccagctgagggagtatgattttgaggacgactgtgacagcctgacttgggaggagactgaggagaccctgctgctttgggaggatttctcaggctatgccatggcagctgcagaggcccagggagagcagcaggaagatagcctggagaaggtgattaaagatacggagtccctgttcaaaacccgggagaaggagtatcaggagaccattgaccagatagagctggagttggccacggccaagaacgacatgaaccggcacctgcacgagtacatggagatgtgcagcatgaagcgcggcctggacgtgcagatggagacctgccgccggctcatcacccagtctggagaccgaaagtctcctgctttcactgcggtcccgcttagcgacccgccgccgccgccaagcgaggctgaggactccgatcgcgatgtctcatctgacagctccatgagatagagacctgcctcccccttgcacccgaggccctcgcagcagggagctcagcgaggcagagggtggggctgcacagaggggaacatcagctgcagctctgcaccaggccggtccctggggactggggcgctcctccctcaggctttctccctcagtcttggcttctccagggctctggggtgtctggagctaggcttggccctaccattctggggccatttccaccacagttggggctctcctgccttcacgcgtgggtgtctgctacttccccatctttaaaatgctgccagagcgattgcggcccctcaccttgtccacgtatcaggaatgtgaatgtgggacctttcctccatccctgttgtccggagccagctcactgtcttccacactggtgctaactggcccaggcactggagtggaatagaatgcagctggaggctacgcatggcctctgcagcacacgcagctggagagggcttctgtccctgtcagcggcagagggcgttggggctggccggggcaccttgtccctgctatggtccacgtgctcacgctgtccacctgccaggtggagtgtatgtggctgtggccctccctcgtggaggtgccgtgctttaaagaggccttagtgcccgggatgggcacagtgttttgaagggaggtgggagctcttgctctcctggtcactgcagaatgacagagaaggtgaagctccatgcatgtgtgcgcgggtgtatgtgcgctcagggtctctgtttaagtatcagctaaagatgtgcttcctccgtgtctgtcatacactgagaccaacaggctacagtgtccctgattcttggaaaagcctggagaagctggggagatgcggttcacaatgcctcggtataggaggctgtgttgagctgacattcaaatggattctttaataataatgaaactggcgagtatttattgtgcactttggtgtcactgtctcaagcacttcctaatattcactagtttgaactctgaggtaggtactttttttttttttgagatggagtctcatactctgttgcctaggctggagtgcagtggtgtggtctcagctcactgcagcctctgcctccggggtgcaagcgattctcctgcttcagcatgcctgtagctgggactataggcatgtgccatgaagcctggctgatttttgtaattttagtagagacggagtttcaccatgttggccaggctggtctcaaactcctgacctcaggtgatacacccaccttggcctcccaaagtgctggggttacaggcgtgcgcgctctaccgaggtatgtacttttgtctccactaggtaagcacacgtgcaaagtgaggcccgggagtaactgcccaaagcaactgagccgttcagtggcagagccaggggtctggacctaggtcccagctacacgccttgcccctacccaagttcccctaaggacgatgatggaaataagtcaccctgacacatctcagttcatcttcctcaaaactatgcgagatagcctaggactggagcgaggagaggaaaaggccttgttctctgaagtagtggtgccagcttcctgtagcactcaagacgtctgagcgggaagcaaatggttctcgaagcaagcaaggctgtttggaggccctaccctcagtctgaggagaacataccaggtccctccccagcaagaatgtctcaccttgacacaagcccagcttccctcccctctgccccagaccctagaataagacaggacaagt

SEQ ID NO: 9689 - DNA, 2775 bp, Homo sapiens
  source 1..2775: mol_type = unassigned DNA; mol_type = unassigned DNA
caccggtctgcatctcccagcagaaggcgcagccatgaatccgttattcggccccaacctcttcctcctgcagcaggagcagcagggcctggccgggccactgggggactcactgggaggcgaccacttcgccgggggaggagacttgcccccggcgcctctctcgccggccggccctgctgcctactcgccgcccgggccgggcccggccccgcctgccgccatggccctccgcaatgacctgggctccaacatcaacgtgctcaagaccctgaacctccggttccgctgcttcctggccaaggtgcatgagctggagcgccggaaccggctgttggagaagcaactgcagcaagcgctggaggagggtaagcagggccggcggggcctgggtcgtcgcgaccaggcagtgcagaccggcttcgtcagccccatccggcccctggggctgcagctgggcgcccggccggccgctgtctgcagcccttcggcgcgcgtgctgggctcgcccgcgcgctccccggccggccccctcgcgccctccgcggccagcctctcgtcgtcctccacctccacctccaccacctattcctcgtcggcccgcttcatgcccggcaccatctggtcgttctcgcacgcccgccggctcgggccgggactggagcccactctggtgcaagggcctggcttgtcgtgggtgcacccggatggggtgggcgtccagatcgacaccatcacgcccgagatccgcgctctctacaacgtgctggccaaagtgaagcgggagcgggacgagtacaagcggagatgcttttacagggttaaatgataccacaagaggcagggcagcgggctcgacgagctctgttctggtgcgggcaggaggcgggagcccggatctgtgcgactgaaggtgggaagaggagtacacggtgcggatccagctgcaagaccgtgtaaatgagctccaggaggaagcccaggaggctgatgcctgccaggaggagctggcactgaaggtggaacagttgaaggctgagctggtggtcttcaaggggctcatgagtaacaacctgtcggagctggacaccaagatccaggagaaagccatgaaggtggatatggacatctgccgccgcatcgacatcaccgccaagctctgcgatgtggctcagcagcgcaactgcgaggacatgatccagatgttccagaagaagctggtcccatccatgggggggcggaagcgggagcgcaaggctgccgtcgaggaggacacctccctgtcggagagtgaggggccccgccagcccgatggggatgaggaggagagcacagccctcagcatcaacgaggagatgcagcgcatgctcaaccagctgagggagtatgattttgaggacgactgtgacagcctgacttgggaggagactgaggagaccctgctgctttgggaggatttctcaggctatgccatggcagctgcagaggcccagggagagcagcaggaagatagcctggagaaggtgattaaagatacggagtccctgttcaaaacccgggagaaggagtatcaggagaccattgaccagatagagctggagttggccacggccaagaacgacatgaaccggcacctgcacgagtacatggagatgtgcagcatgaagcgcggcctggacgtgcagatggagacctgccgccggctcatcacccagtctggagaccgaaagtctcctgctttcactgcggtcccgcttagcgacccgccgccgccgccaagcgaggctgaggactccgatcgcgatgtctcatctgacagctccatgagatagagacctgcctcccccttgcacccgaggccctcgcagcagggagctcagcgaggcagagggtggggctgcacagaggggaacatcagctgcagctctgcaccaggccggtccctggggactggggcgctcctccctcaggctttctccctcagtcttggcttctccagggctctggggtgtctggagctaggcttggccctaccattctggggccatttccaccacagttggggctctcctgccttcacgcgtgggtgtctgctacttccccatctttaaaatgctgccagagcgattgcggcccctcaccttgtccacgtatcaggaatgtgaatgtgggacctttcctccatccctgttgtccggagccagctcactgtcttccacactggtgctaactggcccaggcactggagtggaatagaatgcagctggaggctacgcatggcctctgcagcacacgcagctggagagggcttctgtccctgtcagcggcagagggcgttggggctggccggggcaccttgtccctgctatggtccacgtgctcacgctgtccacctgccaggtggagtgtatgtggctgtggccctccctcgtggaggtgccgtgctttaaagaggccttagtgcccgggatgggcacagtgttttgaagggaggtgggagctcttgctctcctggtcactgcagaatgacagagaaggtgaagctccatgcatgtgtgcgcgggtgtatgtgcgctcagggtctctgtttaagtatcagctaaagatgtgcttcctccgtgtctgtcatacactgagaccaacaggctacagtgtccctgattcttggaaaagcctggagaagctggggagatgcggttcacaatgcctcggtataggaggctgtgttgagctgacattcaaatggattctttaataataatgaaactggcgagt

SEQ ID NO: 9690 - DNA, 4549 bp, Homo sapiens
  source 1..4549: mol_type = unassigned DNA; mol_type = unassigned DNA
cggcaggaaggccatggcggggcccgagcgctggggccccctgctcctgtgcctgctgcaggccgctccagggaggccccgtctggcccctccccagaatgtgacgctgctctcccagaacttcagcgtgtacctgacatggctcccagggcttggcaacccccaggatgtgacctattttgtggcctatcagagctctcccacccgtagacggtggcgcgaagtggaagagtgtgcgggaaccaaggagctgctatgttctatgatgtgcctgaagaaacaggacctgtacaacaagttcaagggacgcgtgcggacggtttctcccagctccaagtccccctgggtggagtccgaatacctggattacctttttgaagtggagccggccccacctgtcctggtgctcacccagacggaggagatcctgagtgccaatgccacgtaccagctgcccccctgcatgcccccactggatctgaagtatgaggtggcattctggaaggagggggccggaaacaagaccctatttccagtcactccccatggccagccagtccagatcactctccagccagctgccagcgaacaccactgcctcagtgccagaaccatctacacgttcagtgtcccgaaatacagcaagttctctaagcccacctgcttcttgctggaggtcccagaagccaactgggctttcctggtgctgccatcgcttctgatactgctgttagtaattgccgcagggggtgtgatctggaagaccctcatggggaacccctggtttcagcgggcaaagatgccacgggccctggacttttctggacacacacaccctgtggcaacctttcagcccagcagaccagagtccgtgaatgacttgttcctctgtccccaaaaggaactgaccagaggggtcaggccgacgcctcgagtcagggccccagccacccaacagacaagatggaagaaggaccttgcagaggacgaagaggaggaggatgaggaggacacagaagatggcgtcagcttccagccctacattgaaccaccttctttcctggggcaagagcaccaggctccagggcactcggaggctggtggggtggactcagggaggcccagggctcctctggtcccaagcgaaggctcctctgcttgggattcttcagacagaagctgggccagcactgtggactcctcctgggacagggctgggtcctctggctatttggctgagaaggggccaggccaagggccgggtggggatgggcaccaagaatctctcccaccacctgaattctccaaggactcgggtttcctggaagagctcccagaagataacctctcctcctgggccacctggggcaccttaccaccggagccgaatctggtccctgggggacccccagtttctcttcagacactgaccttctgctgggaaagcagccctgaggaggaagaggaggcgagggaatcagaaattgaggacagcgatgcgggcagctggggggctgagagcacccagaggaccgaggacaggggccggacattggggcattacatggccaggtgagctgtcccccgacatcccaccgaatctgatgctgctgctgcctttgcaaggactactgggcttcccaagaaactcaagagcctccgtacctcccctgggcggcggaggggcattgcacttccgggaagtccacctagcggctgtttgcctgtcgggctgagcaacaagatgcccctccctcctgtgacccgccctctttaggctgagctataagaggggtggacacagggtgggctgaggtcagaggttggtggggtgtcatcacccccattgtccctagggtgacaggccagggggaaaaattatccccggacaacatgaaacaggtgaggtcaggtcactgcggacatcaagggcggacaccaccaaggggccctctggaacttgagaccactggaggcacacctgctatacctcatgcctttcccagcagccactgaactcccccatcccagggctcagcctcctgattcatgggtcccctagttaggcccagataaaaatccagttggctgagggttttggatgggaagggaagggtggctgtcctcaaatcctggtctttggagtcatggcactgtacggttttagtgtcagacagaccggggttcaaatcccagctctgctgttcactggttgtatgatcttggggaagacatcttccttctctgcctcggcttcctcatctgcagctacgcctgggtgtggtgagggttctaggggatctcagatgtgtgtagcacggagcctgctgtgtcctgggtgctctctacgtggtggccggtagaattctccatctatccaggctccaggagacccctgggcatctcccacctgtggcccctaaacccagagtgactgagagcacttaacattcagcttgtctcatccccagtctacctccttccttctaccctcactgcctcccagtcaggagagtgagctctcagaagccagagccccacccaaggggaccctggtctctccgccttcacctagcaatgggaaccctgcttcccaggggaggaaccaactgctccaccttctagggacccagtttgttggagtaggacagtaacatggcaggaatcggacttctgggcctgtaatcccagtttggatggcacgttagactcttggttgaccgttgtggtccttagaagtcccattctcccttccagttatgagaaaccaatgccttctagattcaggtgactatccttacctgggggtgctgatgcatcctcagttaacctacacccacctgaatatagatgagcgtagctgagttttcacccgtaggaccgaagtgttttgtggtggagtatctgaacaaccttggctctgtggccattcaacctgccaggactaacatttctggatttgtgaagaagggatcttcaaagccattgaacccacagagctgtgttgctttaaagccaccacaagggtacagcattaaatggcagaactggaaaagcttcttagggcatctcatccagggattctcaaaccatgtcccccagaggccttgggctgcagttgcagggggcgccatggggctataggagcctcccactttcaccagagcagcctcactgtgccctgattcacacactgtggctttccacgtgaggttttgtttagagggatccactactcaagaaaaagttagcaaaccactccttttgttgcaaaggagctgaggtcaagggtggcaaaggcacttgtccaaggtcgcccagcagtgctgctctgatgacttgtgcacatccccaagggtaagagcttcgatctctgcacagccgggccaacctctgaccccttgtccatgtcagtaaaatatgaaggtcacagccaggatttctaagggtcaggaggccttcaccgctgctggggcacacacacacacatgcatacacacatacgacacacacctgtgtctccccaggggttttccctgcagtgaggcttgtccagatgattgagcccaggagaggaagaacaaacaaactacggagctggggagggctgtggcttggggccagctcccagggaaattcccagacctgtaccgatgttctctctggcaccagccgagctgcttcgtggaggtaacttcaaaaaagtaaaagctatcatcagcatcatcttagacttgtatgaaataaccactccgtttctattcttaaaccttaccatttttgttttgttttgtttttttgagtcggagttttgttctttttgcctaggctggagtgcagtggtacaatctcggctcactgcaacctccacctcccgggttcaagtgattctcctgcctcagcctcccaagtagctgggattacaggcacccgccaccacacctggctaatttttttgtatttttagtagagacggggtttcaccatgttggccaggctggtctcgaactcctgacctcaggtgatccgcccgcctcggcctcccaaagtgctgggattacaggcgtgagccaccgcgcccagccaaaccttactatttttttaaagaattttttccagagtttaatttctgacatagcttaagttttccagtaactctaaactccatctcctttatcgtcattaagtcattcacaaaaagccaggagaagcatttggaaagggcatgataatcagtataataatttgccttgtgtggtcagcacttaactgtttacaaagccctttcacgtgcacagcaggtgggaactgcgcggtgtgggctgggcctgcgctggaagcatatcccgtgaaaagtgttagtgccttaggtgaaagcaacatgtatccctttagactactaacggtatatgttgttcttatgtatttgtatttatttctattttttctatgtttatgtcatatttaaacgatatcctactgcttgttggtattaccctaaactgtttaaataaagagctctatttttaaagaaaaaaggtacaattga

SEQ ID NO: 9691 - DNA, 1476 bp, Homo sapiens
  source 1..1476: mol_type = unassigned DNA; mol_type = unassigned DNA
cggcaggaaggccatggcggggcccgagcgctggggccccctgctcctgtgcctgctgcaggccgctccagggaggccccgtctggcccctccccagaatgtgacgctgctctcccagaacttcagcgtgtacctgacatggctcccagggcttggcaacccccaggatgtgacctattttgtggcctatcagagctctcccacccgtagacggtggcgcgaagtggaagagtgtgcgggaaccaaggagctgctatgttctatgatgtgcctgaagaaacaggacctgtacaacaagttcaagggacgcgtgcggacggtttctcccagctccaagtccccctgggtggagtccgaatacctggattacctttttgaagtggagccggccccacctgtcctggtgctcacccagacggaggagatcctgagtgccaatgccacgtaccagctgcccccctgcatgcccccactggatctgaagtatgaggtggcattctggaaggagggggccggaaacaagaccctatttccagtcactccccatggccagccagtccagatcactctccagccagctgccagcgaacaccactgcctcagtgccagaaccatctacacgttcagtgtcccgaaatacagcaagttctctaagcccacctgcttcttgctggaggtcccaggacttttctggacacacacaccctgtggcaacctttcagcccagcagaccagagtccgtgaatgacttgttcctctgtccccaaaaggaactgaccagaggggtcaggccgacgcctcgagtcagggccccagccacccaacagacaagatggaagaaggaccttgcagaggacgaagaggaggaggatgaggaggacacagaagatggcgtcagcttccagccctacattgaaccaccttctttcctggggcaagagcaccaggctccagggcactcggaggctggtggggtggactcagggaggcccagggctcctctggtcccaagcgaaggctcctctgcttgggattcttcagacagaagctgggccagcactgtggactcctcctgggacagggctgggtcctctggctatttggctgagaaggggccaggccaagggccgggtggggatgggcaccaagaatctctcccaccacctgaattctccaaggactcgggtttcctggaagagctcccagaagataacctctcctcctgggccacctggggcaccttaccaccggagccgaatctggtccctgggggacccccagtttctcttcagacactgaccttctgctgggaaagcagccctgaggaggaagaggaggcgagggaatcagaaattgaggacagcgatgcgggcagctggggggctgagagcacccagaggaccgaggacaggggccggacattggggcattacatggccaggtgagctgtcccccgacatcccaccgaatctgatg

SEQ ID NO: 9692 - DNA, 1476 bp, Homo sapiens
  source 1..1476: mol_type = unassigned DNA; mol_type = unassigned DNA
atggcggggcccgagcgctggggccccctgctcctgtgcctgctgcaggccgctccagggaggccccgtctggcccctccccagaatgtgacgctgctctcccagaacttcagcgtgtacctgacatggctcccagggcttggcaacccccaggatgtgacctattttgtggcctatcagagctctcccacccgtagacggtggcgcgaagtggaagagtgtgcgggaaccaaggagctgctatgttctatgatgtgcctgaagaaacaggacctgtacaacaagttcaagggacgcgtgcggacggtttctcccagctccaagtccccctgggtggagtccgaatacctggattacctttttgaagtggagccggccccacctgtcctggtgctcacccagacggaggagatcctgagtgccaatgccacgtaccagctgcccccctgcatgcccccactggatctgaagtatgaggtggcattctggaaggagggggccggaaacaagaccctatttccagtcactccccatggccagccagtccagatcactctccagccagctgccagcgaacaccactgcctcagtgccagaaccatctacacgttcagtgtcccgaaatacagcaagttctctaagcccacctgcttcttgctggaggtcccagaagccaactgggctttcctggtgctgccatcgcttctgatactgctgttagtaattgccgcagggggtgtgatctggaagaccctcatggggaacccctggtttcagcgggcaaagatgccacgggccctggaactgaccagaggggtcaggccgacgcctcgagtcagggccccagccacccaacagacaagatggaagaaggaccttgcagaggacgaagaggaggaggatgaggaggacacagaagatggcgtcagcttccagccctacattgaaccaccttctttcctggggcaagagcaccaggctccagggcactcggaggctggtggggtggactcagggaggcccagggctcctctggtcccaagcgaaggctcctctgcttgggattcttcagacagaagctgggccagcactgtggactcctcctgggacagggctgggtcctctggctatttggctgagaaggggccaggccaagggccgggtggggatgggcaccaagaatctctcccaccacctgaattctccaaggactcgggtttcctggaagagctcccagaagataacctctcctcctgggccacctggggcaccttaccaccggagccgaatctggtccctgggggacccccagtttctcttcagacactgaccttctgctgggaaagcagccctgaggaggaagaggaggcgagggaatcagaaattgaggacagcgatgcgggcagctggggggctgagagcacccagaggaccgaggacaggggccggacattggggcattacatggccaggtga

SEQ ID NO: 9693 - DNA, 953 bp, Homo sapiens
  source 1..953: mol_type = unassigned DNA; mol_type = unassigned DNA
tcctcctaaagggccgcataatattgcgcgtcgtggcgtgtgccttactgggaagctactgctgtccaggtgaacaccacagccttcggggtcagaaagacagctttccccagaacaagcacctgaagctctggggcctgccgctccccgggagagaaggaggccccgtctggcccctccccagaatgtgacgctgctctcccagaacttcagcgtgtacctgacatggctcccagggcttggcaacccccaggatgtgacctattttgtggcctatcagagctctcccacccgtagacggtggcgcgaagtggaagagtgtgcgggaaccaaggagctgctatgttctatgatgtgcctgaagaaacaggacctgtacaacaagttcaagggacgcgtgcggacggtttctcccagctccaagtccccctgggtggagtccgaatacctggattacctttttgaagtggagccggccccacctgtcctggtgctcacccagacggaggagatcctgagtgccaatgccacgtaccagctgcccccctgcatgcccccactggatctgaagtatgaggtggcattctggaaggagggggccggaaacaagaccctatttccagtcactccccatggccagccagtccagatcactctccagccagctgccagcgaacaccactgcctcagtgccagaaccatctacacgttcagtgtcccgaaatacagcaagttctctaagcccacctgcttcttgctggaggtcccagaagccaactgggctttcctggtgctgccatcgcttctgatactgctgttagtaattgccgcagggggtgtgatctggaagaccctcatggggaacccctggtttcagcgggcaaagatgccacgggccctggtatagcaaatctgggggtgtgcagcaggtggggaggggttgagagtaaggg

SEQ ID NO: 9694 - DNA, 674 bp, Homo sapiens
  source 1..674: mol_type = unassigned DNA; mol_type = unassigned DNA
atggcggggcccgagcgctggggccccctgctcctgtgcctgctgcaggccgctccagggaggccccgtctggcccctccccagaatgtgacgctgctctcccagaacttcagcgtgtacctgacatggctcccagggcttggcaacccccaggatgtgacctattttgtggcctatcagagctctcccacccgtagacggtggcgcgaagtggaagagtgtgcgggaaccaaggagctgctatgttctatgatgtgcctgaagaaacaggacctgtacaacaagttcaagggacgcgtgcggacggtttctcccagctccaagtccccctgggtggagtccgaatacctggattacctttttgaagtggagccggccccacctgtcctggtgctcacccagacggaggagatcctgagtgccaatgccacgtaccagctgcccccctgcatgcccccactggatctgaagtatgaggtggcattctggaaggagggggccggaaacaaggtgggaagctcctttcctgcccccaggctaggcccgctcctccaccccttcttactcaggttcttctcaccctcccagcctgctcctgcacccctcctccaggaagtcttccctgtacactcctgacttctggcagtcagccctaataaaatctgatcaaagta

SEQ ID NO: 9695 - DNA, 574 bp, Homo sapiens
  source 1..574: mol_type = unassigned DNA; mol_type = unassigned DNA
agctgtaaatgggtcaggagaccagagtggacagagtaggccctggaatgcttgctcggaggcctgccatgaaggatttctgcttgcttccccaccctaccccgggggcaggatgactcagcacttcctattgttgtgaaggccaaccccaggaggccctaccaaggctgactgctgttaaaaccagactgcactccttctggctcctggttcattcaaggtctacatagttaaaggtgccaacattatgcgaagaactttacgtggacatcccatttaattctcagaagccgatcacaagctcttcacggggatttctgctgccgccaccgcccactcttacccccgccgcttctcgactctgttgttagccgaagactcgcctctcagccgcccgccgcacagacgcacgagtaaaaagtgcagctccatcggctgatcctcgctaagctccgactctgggcggcaccgggcgtcccacgatgccgaagaacaagaagcggaacactccccaccgcggtagcagtgctggcggcggcgggtcaggagcagccgcagcgacggcggcgacagc

SEQ ID NO: 9696 - DNA, 1834 bp, Homo sapiens
  source 1..1834: mol_type = unassigned DNA; mol_type = unassigned DNA
gttaaaaccagactgcactccttctggctcctggttcattcaaggtctacatagttaaaggttgttccagagggatgtgtgtaattcctcccagtatttgatgttcctttattacttattttcacttgagccaacagcctgaactggtcaggctttgggctgatgccagctgctttatctggtagcactgttacataaaattaacatttattggtgatcactaggtgccaacattatgcgaagaactttacgtggacatcccatttaattctcagaagccgatcacaagctcttcacggggatttctgctgccgccaccgcccactcttacccccgccgcttctcgactctgttgttagccgaagactcgcctctcagccgcccgccgcacagacgcacgagtaaaaagtgcagctccatcggctgatcctcgctaagctccgactctgggcggcaccgggcgtcccacgatgccgaagaacaagaagcggaacactccccaccgcggtagcagtgctggcggcggcgggtcaggagcagccgcagcgacggcggcgacagcaggtggccagcatcgaaatgttcagccttttagtgatgaagatgcatcaattgaaacaatgagccattgcagtggttatagcgatccttccagttttgctgaagatggaccagaagtccttgatgaggaaggaactcaagaagacctagagtacaagttgaagggattaattgacctaaccctggataagagtgcgaagacaaggcaagcagctcttgaaggtattaaaaatgcactggcttcaaaaatgctgtatgaatttattctggaaaggagaatgactttaactgatagcattgaacgctgcctgaaaaaaggtaagagtgatgagcaacgtgcagctgcagcgttagcatctgttctttgtattcagctgggccctggaattgaaagtgaagagattttgaaaactcttggaccaatcctaaagaaaatcatttgtgatgggtcagctagtatgcaggctaggcaaacttgtgcaacttgctttggtgtttgctgttttattgccacagatgacattactgaactatactcaactctggaatgtttggaaaatatcttcactaaatcctatctcaaagagaaagacactactgttatttgcagcactcctaatacagtgcttcatatcagctctcttcttgcatggacactactgctgaccatatgcccaatcaatgaagtgaagaaaaagcttgagatgcatttccataagcttccaagcctcctctcttgtgatgatgtaaacatgagaatagctgctggtgaatctttggcacttctctttgaattggccagaggaatagagagtgactttttttatgaagacatggagtccttgacgcagatgcttagggccttggcaacagatggaaataaacaccgggccaaagtggacaagagaaagcagcggtcagttttcagagatgtcctgagggcagtggaggaacgggattttccaacagaaaccattaaatttggtcctgaacgcatgtatattgattgctgggtaaaaaaacacacctatgacacctttaaggaggttcttggatcagggatgcagtaccacttgcagtcaaatgaattccttcgaaatgtatttgaacttggacccccagtgatgcttgatgctgcaacgcttaaaacgatgaagatttctcgtttcgaaaggcatttatataactctgcagccttcaaagctcgaaccaaagctagaagcaaatgtcgagataagagagcagatgttggagaattcttctagattttcag

SEQ ID NO: 9697 - DNA, 440 bp, Homo sapiens
  source 1..440: mol_type = unassigned DNA; mol_type = unassigned DNA
tagccaggggctgtcttcaatttcacagactatgtcatgaaactgtcatgttaaacatttatttttctagctgaatgtcatctttaagggatattatttcactggagaatttgctgagaggagactgacttggattttatcagtccaaaactgagccagaggaatctgctacaggcaatcaggagccagtgaggagttataagccaagcagtaacctgatgattcaatcaaaaaatatgtatggagtgtctcctacttttcaggtggccagcatcgaaatgttcagccttttagtgatgaagatgcatcaattgaaacaatgagccattgcagtggttatagcgatccttccagttttgctgaagatggaccagaagtccttgatgaggaaggaactcaagaagacctagagtacaagttgaagggattaattgacctaa

SEQ ID NO: 9698 - DNA, 570 bp, Homo sapiens
  source 1..570: mol_type = unassigned DNA; mol_type = unassigned DNA
atagctgccagctggaagccgactctcgtcatagggcatactcgccccactgtgcatcgccggtgcctacctcacccagttccaaggcgggggcgcgccgaggcaggggtggggtcaccaggagaaaagcaagtgggcagaaaagcccgttgggaagagacggctgggaggaggccccggccccagccttactacgtttcccagaattcagtgaggccacgaagacaggctccctgggcgcggacggaagactggccgcatgggatttgtagccgaagactcgcctctcagccgcccgccgcacagacgcacgagtaaaaagtgcagctccatcggctgatcctcgctaagctccgactctgggcggcaccgggcgtcccacgatgccgaagaacaagaagcggaacactccccaccgcggtagcagtgctggcggcggcgggtcaggagcagccgcagcgacggcggcgacagcaggtggccagcatcgaaatgttcagccttttagtgatgaagatgcatcaattgaaacaatgagccattgcagtggttatagcgatccttccagtt

SEQ ID NO: 9699 - DNA, 429 bp, Homo sapiens
  source 1..429: mol_type = unassigned DNA; mol_type = unassigned DNA
agttccaaggcgggggcgcgccgaggcaggggtggggtcaccaggagaaaagcaagtgggcagaaaagcccgttgggaagagacggctgggaggaggccccggccccagccttactacgtttcccagaattcagtgaggccacgaagacaggctccctgggcgcggacggaagactggccgcatgggatttgtagctcttcacggggatttctgctgccgccaccgcccactcttacccccgccgcttctcgactctgttgttagccgaagactcgcctctcagccgcccgccgcacagacgcacgagtaaaaagtgcagctccatcggctgatcctcgctaagctccgactctgggcggcaccgggcgtcccacgatgccgaagaacaagaagcggaacactccccaccgcggtagcagtgctggcgg

SEQ ID NO: 9700 - DNA, 2290 bp, Homo sapiens
  source 1..2290: mol_type = unassigned DNA; mol_type = unassigned DNA
gctacttaaggcgtcgtggcctcccctgccccgccttagctcccgcgctagagagaaacatgtatcgttttcgatcacagctcttcacggggatttctgctgccgccaccgcccactcttacccccgccgcttctcgactctgttgttagccgaagactcgcctctcagccgcccgccgcacagacgcacgagtaaaaagtgcagctccatcggctgatcctcgctaagctccgactctgggcggcaccgggcgtcccacgatgccgaagaacaagaagcggaacactccccaccgcggtagcagtgctggcggcggcgggtcaggagcagccgcagcgacggcggcgacagcaggtggccagcatcgaaatgttcagccttttagtgatgaagatgcatcaattgaaacaatgagccattgcagtggttatagcgatccttccagttttgctgaagatggaccagaagtccttgatgaggaaggaactcaagaagacctagagtacaagttgaagggattaattgacctaaccctggataagagtgcgaagacaaggcaagcagctcttgaaggtattaaaaatgcactggcttcaaaaatgctgtatgaatttattctggaaaggagaatgactttaactgatagcattgaacgctgcctgaaaaaaggtaagagtgatgagcaacgtgcagctgcagcgttagcatctgttctttgtattcagctgggccctggaattgaaagtgaagagattttgaaaactcttggaccaatcctaaagaaaatcatttgtgatgggtcagctagtatgcaggctaggcaaacttgtgcaacttgctttggtgtttgctgttttattgccacagatgacattactgaactatactcaactctggaatgtttggaaaatatcttcactaaatcctatctcaaagagaaagacactactgttatttgcagcactcctaatacagtgcttcatatcagctctcttcttgcatggacactactgctgaccatatgcccaatcaatgaagtgaagaaaaagcttgagatgcatttccataagcttccaagcctcctctcttgtgatgatgtaaacatgagaatagctgctggtgaatctttggcacttctctttgaattggccagaggaatagagagtgactttttttatgaagacatggagtccttgacgcagatgcttagggccttggcaacagatggaaataaacaccgggccaaagtggacaagagaaagcagcggtcagttttcagagatgtcctgagggcagtggaggaacgggattttccaacagaaaccattaaatttggtcctgaacgcatgtatattgattgctgggtaaaaaaacacacctatgacacctttaaggaggttcttggatcagggatgcagtaccacttgcagtcaaatgaattccttcgaaatgtatttgaacttggacccccagtgatgcttgatgctgcaacgcttaaaacgatgaagatttctcgtttcgaaaggcatttatataactctgcagccttcaaagctcgaaccaaagctagaagcaaatgtcgagataagagagcagatgttggagaattcttctagattttcagaacttgaagactattttctaatttctatttttttttctatttcaatgtatttaaactctagacacagtttttatcctggattaacttagataacttttgtagcagtggttatattgcttataatttaatgtacaatactattgaaactggtgagttctgattattaaatattctctgtaaatcagtaaacatgtataaagtatttgtaatgtttggtcataatttatttatgaagacagcaaaagactgatttcatgatggggaaaacaattagccaaagtttaatttcttacactgtggttgtcaagaatactgatttactataatgatatatacatgcaagatatttaacttaatatcttagacaagagttctgggtacaattttgggatctagttcccctggaaaagctgctgtatttttaatttttaatggaatgtagcttttaaaatcctgtcactggcatcaacaaaaggaattataccatgagaccttatagctgtacttaaaagccattcagttcagctattgggagttcatgatgaattagcatatgccagaaaggttgctaaccttaacatctgagagcagtaacactgattttatctgctgtatgagactttgtgcattttactttgaaataaagatttttttccacactgaaa

SEQ ID NO: 9701 - DNA, 1938 bp, Homo sapiens
  source 1..1938: mol_type = unassigned DNA; mol_type = unassigned DNA
ccgccttagctcccgcgctagagagaaacatgtatcgttttcgatcacagctcttcacggggatttctgctgccgccaccgcccactcttacccccgccgcttctcgactctgttgttagccgaagactcgcctctcagccgcccgccgcacagacgcacgagtaaaaagtgcagctccatcggctgatcctcgctaagctccgactctgggcggcaccgggcgtcccacgatgccgaagaacaagaagcggaacactccccaccgcggtagcagtgctggcggcggcgggtcaggagcagccgcagcgacggcggcgacagcaggtggccagcatcgaaatgttcagccttttagtgatgaagatgcatcaattgaaacaatgagccattgcagtggttatagcgatccttccagttttgctgaagatggaccagaagtccttgatgaggaaggaactcaagaagacctagagtacaagttgaagggattaattgacctaaccctggataagagtgcgaagacaaggcaagcagctcttgaaggtattaaaaatgcactggcttcaaaaatgctgtatgaatttattctggaaaggagaatgactttaactgatagcattgaacgctgcctgaaaaaaggtaatgcccttatttttgagtcacagacgtacaactaataaggagtgtgttatcttcttttcagtaacatttagtaatagcactggaacactggcccactcttaaaattttctaatagtcaaggagtgcaccatcttgttatggctcaaaatgagacttgttagaactttgtttttgtattacgtaaaccaaaaaaaaatagcttgaaactaagaaggattagggtagattgtcatcaaccttttttgtatcagaagaggtgatggtcattctcttgttataccagaaaagcttgaaagtgtgtgtcagacatctagctcattttcccttgcacttatataaaacattgattgtacctgtaaattacatcattttcaggatatcccttggaatacttgaattctagaactttgtaatagaaattctggaattcaaattgttacagtgatagaacttttaagaccaaagagaaatcttaaagataattttatcagaccttaaagtccagtgttagtaggcttactagatttaggaaccaccaaatttaaaaagacttgtgactcggcatggtggttcacatctgtaattgtggcactttgggagaccgaggtgggaggattgctggaagccaggagttggagaccacctgggcaacaaagcgatacttggtttctattataacaaacaaaacaaaacgagatttggtgtctgccaacttattcagccaagtaagaacattatgaaaataattatcctccactatcattattttattagcaaaatattatagcaccaaaaatgtagaaatgcacttttaaaaaattgaatgaactaataagctttatatccttatttttctcattttacctgagagtaaaaattttgttgtaagtgaaacctttgatcaaattcactcttccattgaatagaataaagaaaggcctaggaaaactgaggtgggtctaagctgatatatcttgttattggtatagttgatagcagacccaactttttaaagataacacaatggcgctattaaaggtgttttacattcaaactatatgctataatggttgttggactagatgacctttaaaaattccattttagtttgcgtattttttacatttttaatttatcaggtaataatttaagctcagtatttgccccacacttgtggtgtatacagttctcaagagttaatttatatgtacctttatataaatgtattttttgtaccactgcattccagcttgggcgacagagtgagaccctgtctcaaaaaaaaaaaaaaataa

SEQ ID NO: 9702 - DNA, 486 bp, Homo sapiens
  source 1..486: mol_type = unassigned DNA; mol_type = unassigned DNA
gggtccttgggcctgagagtgtgtcgggacaggggctgaccgggagctgggcgggaaaggaaccattgtcagagttcctttctcggcggcgatctcgcccgatctctccccgaccacgggtggccagcatcgaaatgttcagccttttagtgatgaagatgcatcaattgaaacaatgagccattgcagtggttatagcgatccttccagttttgctgaagatggaccagaagtccttgatgaggaaggaactcaagaagacctagagtacaagttgaagggattaattgacctaaccctggataagagtgcgaagacaaggcaagcagctcttgaaggtattaaaaatgcactggcttcaaaaatgctgtatgaatttattctggaaaggagaatgactttaactgatagcattgaacgctgcctgaaaaaaggtaagagtgatgagcaacgtgcagctgcagcgttagcatctgttctttgtat

SEQ ID NO: 9703 - DNA, 891 bp, Homo sapiens
  source 1..891: mol_type = unassigned DNA; mol_type = unassigned DNA
tttgaatgctctccatgttgatgaaattcattctttatcaagatgtaaaatatgtaatttattgtggcctctggttgctctatgtgaattgaggatactttttttttttttgttaagggaaagagggagtctggctctgtcgcccaggctggagtgcggtgtggtgtgatcatagctcactgcaacctcttaactcctgggctcaagcagctctccctcctcagcctcctgtagctaggactacaggcatgtgacaccattcctggctattttttacattttttgtggagacaaggtctatgttggccaggctggtcacgagtccctcgtccccagggatcttcctgcctaagcctcccacaatgctgggacggtgcctggtctgaggatatttcttaccactgtgtttcagcttttcctcatctgaatcaaacatttgaattctttctagaaggtggccagcatcgaaatgttcagccttttagtgatgaagatgcatcaattgaaacaatgagccattgcagtggttatagcgatccttccagttttgctgaagatggaccagaagtccttgatgaggaaggaactcaagaagacctagagtacaagttgaagggattaattgacctaaccctggataagagtgcgaagacaaggcaagcagctcttgaaggtattaaaaatgcactggcttcaaaaatgctgtatgaatttattctggaaaggagaatgactttaactgatagcattgaacgctgcctgaaaaaaggtaagagtgatgagcaacgtgcagctgcagcgttagcatctgttctttgtattcagctgggccctggaattgaaagtgaagagattttgaaaactcttggaccaatcctaaagaaaatcatt

SEQ ID NO: 9704 - DNA, 555 bp, Homo sapiens
  source 1..555: mol_type = unassigned DNA; mol_type = unassigned DNA
agaatgactttaactgatagcattgaacgctgcctgaaaaaaggtaagagtgatgagcaacgtgcagctgcagcgttagcatctgttctttgtattcagctgggccctggaattgaaagtgaagagattttgaaaactcttggaccaatcctaaagaaaatcatttgtgatgggtcagctagtatgcaggctaggcaaacttgtgcaacttgctttggtgtttgctgttttattgccacagatgacattactgaactatactcaactctggaatgtttggaaaatatcttcactaaatcctatctcaaagagaaagacactactgttatttgcagcactcctaatacagtgcttcatatcagctctcttcttgcatggacactactgctgaccatatgcccaatcaatgaagtgaagaaaaagcttgagatgactttttttatgaagacatggagtccttgacgcagatgcttagggccttggcaacagatggaaataaacaccgggccaaagtggacaagagaaagcagcggtcagttttcagagatgtcctga

SEQ ID NO: 9705 - DNA, 567 bp, Homo sapiens
  source 1..567: mol_type = unassigned DNA; mol_type = unassigned DNA
agaccttaaagtccagtgttagtaggcttactagatttaggaaccaccaaatttaaaaagacttgtgactcggcatggtggttcacatctgtaattgtggcactttgggagaccgaggtgggaggattgctggaagccaggagttggagaccacctgggcaacaaagcgatacttggtttctattataacaaacaaaacaaaacgagatttggtgtctgccaacttattcagccaagtaagagtgatgagcaacgtgcagctgcagcgttagcatctgttctttgtattcagctgggccctggaattgaaagtgaagagattttgaaaactcttggaccaatcctaaagaaaatcatttgtgatgggtcagctagtatgcaggctaggcaaacttgtgcaacttgctttggtgtttgctgttttattgccacagatgacattactgaactatactcaactctggaatgtttggaaaatatcttcactaaatcctatctcaaagagaaagacactactgttatttgcagcactcctaatacagtgcttcatatcagctctcttcttgc

SEQ ID NO: 9706 - DNA, 1034 bp, Homo sapiens
  source 1..1034: mol_type = unassigned DNA; mol_type = unassigned DNA
attgtaatgtgttttaaaggctttttgatagagggtaggcttctttagctcatatgtctaagctttctatctttgaattacagttgaagtttaatgatctagtaagcacctgtaaagcatacagaaaggaaacaaggggatagttcaccctttcagaatgctttactgacatagactcataaaaatgattcaataatttaaattatagattatggagctgcaattgtttcagaaattatgtaattcttttgcatgcttttgattttatggatcaataaaagaagactgaagaggaacagaatcactttgttaaagtcatgctgtgaatttagtagcagagcttgagctgaaacgcacttcctttgatcttagttcaatattctttctctcctcacctcttttatgtataatgtttgggacctaatatattatgctgctgagaacattttcacgttgaattataaaagcaggaagatgtagaattaataagaaataaaatcattaatgtctatatatatatatttttttttttagtgtgcaacttgctttggtgtttgctgttttattgccacagatgacattactgaactatactcaactctggaatgtttggaaaatatcttcactaaatcctatctcaaagagaaagacactactgttatttgcagcactcctaatacagtgcttcatatcagctctcttcttgcatggacactactgctgaccatatgcccaatcaatgaagtgaagaaaaagcttgagatgcatttccataagcttccaagcctcctctcttgtgatgatgtaaacatgagaatagctgctggtgaatctttggcacttctctttgaattggccagaggaatagagagtgactttttttatgaagacatggagtccttgacgcagatgcttagggccttggcaacagatggaaataaacaccgggccaaagtggacaagagaaagcagcggtcagttttcagagatgtcctgagggcagtggaggaacgggattttccaacagaaaccat

SEQ ID NO: 9707 - DNA, 1721 bp, Homo sapiens
  source 1..1721: mol_type = unassigned DNA; mol_type = unassigned DNA
catagccacgttaactgtgacaaggaagcccataatctgcttaaggtcacagcaaatttcaatacattttgcagctgtcccccaaaagggattaaaacttgttcttaccttaaataatttaatcacctgaattatgtgctttattgcttatttgaaatatggcagtaaattagaaagtagatgctttaattgtagctttatgcctttgggataagaataattggaagtctgtgaatgtttggtttggggactggggagccaagggtagaagctatattggtatatctgtctctcactgaactttgaaatcccagtaatgtcttatatatggtgggaacacaagaaatatttgttggatgcatttacttggaagggaaatgttaattgttttgctgtagtacatcatcttgtagtcagcatttctgggttcgatttttgcatgaaaacatgtgtttatgtgtgcctagtccctaaataccatgaagatttacattgccttatgcaactggatattttccaaatgtagactgttctttgttagctctatatgaggtcagaaaagaaaaataataataaaggaaacaaaattgcttttcttgtccaggactttttttatgaagacatggagtccttgacgcagatgcttagggccttggcaacagatggaaataaacaccgggccaaagtggacaagagaaagcagcggtcagttttcagagatgtcctgagggcagtggaggaacgggattttccaacagaaaccattaaatttggtcctgaacgcatgtatattgattgctgggtaaaaaaacacacctatgacacctttaaggaggttcttggatcagggatgcagtaccacttgcagtcaaatgaattccttcgaaatgtatttgaacttggacccccagtgatgcttgatgctgcaacgcttaaaacgatgaagatttctcgtttcgaaaggcatttatataactctgcagccttcaaagctcgaaccaaagctagaagcaaatgtcgagataagagagcagatgttggagaattcttctagattttcagaacttgaagactattttctaatttctatttttttttctatttcaatgtatttaaactctagacacagtttttatcctggattaacttagataacttttgtagcagtggttatattgcttataatttaatgtacaatactattgaaactggtgagttctgattattaaatattctctgtaaatcagtaaacatgtataaagtatttgtaatgtttggtcataatttatttatgaagacagcaaaagactgatttcatgatggggaaaacaattagccaaagtttaatttcttacactgtggttgtcaagaatactgatttactataatgatatatacatgcaagatatttaacttaatatcttagacaagagttctgggtacaattttgggatctagttcccctggaaaagctgctgtatttttaatttttaatggaatgtagcttttaaaatcctgtcactggcatcaacaaaaggaattataccatgagaccttatagctgtacttaaaagccattcagttcagctattgggagttcatgatgaattagcatatgccagaaaggttgctaaccttaacatctgagagcagtaacactgattttatctgctgtatgagactttgtgcattttactttgaaataaagatttttttccaca

SEQ ID NO: 9708 - DNA, 664 bp, Homo sapiens
  source 1..664: mol_type = unassigned DNA; mol_type = unassigned DNA
ctttgaaatcccagtaatgtcttatatatggtgggaacacaagaaatatttgttggatgcatttacttggaagggaaatgttaattgttttgctgtagtacatcatcttgtagtcagcatttctgggttcgatttttgcatgaaaacatgtgtttatgtgtgcctagtccctaaataccatgaagatttacattgccttatgcaactggatattttccaaatgtagactgttctttgttagctctatatgaggtcagaaaagaaaaataataataaaggaaacaaaattgcttttcttgtccaggactttttttatgaagacatggagtccttgacgcagatgcttagggccttggcaacagatggaaataaacaccgggccaaagtggacaagagaaagcagcggtcagttttcagagatgtcctgagggcagtggaggaacgggattttccaacagaaaccattaaatttggtcctgaacgcatgtatattgattgctgggtaaaaaaacacacctatgacacctttaaggaggttcttggatcagggatgcagtaccacttgcagtcaaatgaattccttcgaaatgtatttgaacttggacccccagtgatgcttgatgctgcaacgcttaaaacgatgaagatttctcgtttcgaaagg

SEQ ID NO: 9709 - DNA, 437 bp, Homo sapiens
  source 1..437: mol_type = unassigned DNA; mol_type = unassigned DNA
gttttcagagatgtcctgagggcagtggaggaacgggattttccaacagaaaccattaaatttggtcctgaacgcatgtatattgattgctgggtaaaaaaacacacctatgacacctttaaggaggttcttggatcagggatgcagtaccacttgcagtcaaatgaattccttcgaaatgtatttgaacttggacccccagtgatgcttgatgctgcaacgcttaaaacgatgaagatttctcgtttcgaaaggttctctggtttgtctggagtgtttgcaagtcagtcatcatagtggcagcttccgcctgctacaggatatttatatatggaagcataccatggcaggagtgctggaaaggtggtgtcagctaacagttgcttcagccagataaggacggtaacttcagtccaataaaaacctcatcagttacc

SEQ ID NO: 9710 - DNA, 3232 bp, Homo sapiens
  source 1..3232: mol_type = unassigned DNA; mol_type = unassigned DNA
gttaaaaccagactgcactccttctggctcctggttcattcaaggtctacatagttaaaggttgttccagagggatgtgtgtaattcctcccagtatttgatgttcctttattacttattttcacttgagccaacagcctgaactggtcaggctttgggctgatgccagctgctttatctggtagcactgttacataaaattaacatttattggtgatcactaggtgccaacattatgcgaagaactttacgtggacatcccatttaattctcagaagccgatcacaaggtggccagcatcgaaatgttcagccttttagtgatgaagatgcatcaattgaaacaatgagccattgcagtggttatagcgatccttccagttttgctgaagatggaccagaagtccttgatgaggaaggaactcaagaagacctagagtacaagttgaagggattaattgacctaaccctggataagagtgcgaagacaaggcaagcagctcttgaaggtattaaaaatgcactggcttcaaaaatgctgtatgaatttattctggaaaggagaatgactttaactgatagcattgaacgctgcctgaaaaaaggtaagagtgatgagcaacgtgcagctgcagcgttagcatctgttctttgtattcagctgggccctggaattgaaagtgaagagattttgaaaactcttggaccaatcctaaagaaaatcatttgtgatgggtcagctagtatgcaggctaggcaaacttgtgcaacttgctttggtgtttgctgttttattgccacagatgacattactgaactatactcaactctggaatgtttggaaaatatcttcactaaatcctatctcaaagagaaagacactactgttatttgcagcactcctaatacagtgcttcatatcagctctcttcttgcatggacactactgctgaccatatgcccaatcaatgaagtgaagaaaaagcttgagatgcatttccataagcttccaagcctcctctcttgtgatgatgtaaacatgagaatagctgctggtgaatctttggcacttctctttgaattggccagaggaatagagagtgactttttttatgaagacatggagtccttgacgcagatgcttagggccttggcaacagatggaaataaacaccgggccaaagtggacaagagaaagcagcggtcagttttcagagatgtcctgagggcagtggaggaacgggattttccaacagaaaccattaaatttggtcctgaacgcatgtatattgattgctgggtaaaaaaacacacctatgacacctttaaggaggttcttggatcagggatgcagtaccacttgcagtcaaatgaattccttcgaaatgtatttgaacttggacccccagtgatgcttgatgctgcaacgcttaaaacgatgaagatttctcgtttcgaaaggcatttatataactctgcagccttcaaagctcgaaccaaagctagaagcaaatgtcgagataagagagcagatgttggagaattcttctagattttcagaacttgaagactattttctaatttctatttttttttctatttcaatgtatttaaactctagacacagtttttatcctggattaacttagataacttttgtagcagtggttatattgcttataatttaatgtacaatactattgaaactggtgagttctgattattaaatattctctgtaaatcagtaaacatgtataaagtatttgtaatgtttggtcataatttatttatgaagacagcaaaagactgatttcatgatggggaaaacaattagccaaagtttaatttcttacactgtggttgtcaagaatactgatttactataatgatatatacatgcaagatatttaacttaatatcttagacaagagttctgggtacaattttgggatctagttcccctggaaaagctgctgtatttttaatttttaatggaatgtagcttttaaaatcctgtcactggcatcaacaaaaggaattataccatgagaccttatagctgtacttaaaagccattcagttcagctattgggagttcatgatgaattagcatatgccagaaaggttgctaaccttaacatctgagagcagtaacactgattttatctgctgtatgagactttgtgcattttactttgaaataaagatttttttccacactgaaagtgcttctcttctaatagaagaaatattatttatggctttgaggtacagagtccaaaatgactaggccaggtgggcagggagacaaagctttatgtgtatatttacaaacattaaagtagatgaaaagaatgtagcaatacataattgggattaaggtttctgactttcaagaatatttctgcttggcaacatgcagtgtggctcatgcctataatcagcactctggggaggctgaggcgggaggatggcatgagcccagtttgagaccagcctgggcaacatagcgagaccctgtctctaccagaaatttaaaaaatgagtgtggtggtgtgtgcttctactctttatctacttgggtgctgaggcaagagggtaacttgagcccaggaggtcaaagctgcagtgagccgtgattgtgccactccagcctgggtgacgagtgagaccttgtctcaaaagcaaaacaaaaaagaatattgctgcttgtttgcccatgaggtatatttctttcattttatgaaaagcattttgacaacacgttaacatttaataaactttagattaaaatatatagtgcaagcaacatgccatttcaaatccgtagacttgtttctttgatactcttgctgtaggtcgccgtgaggggtagggaagcatatatactgtagggagaagtatcaaaatcatttaaggtcttttttccaaactagtgttcccctcccacatcccaacaactcttggaagtctggtgctccctctaggtgaaaatcatttgctggcttatggagtcactgttgctgagtcccatcccccagttacagtgcagtggaaaacaggtttagaatctagaacttgtttgtatgttgtcacttggttatgttccaagtaggttagaaccatggaaaagagattgcaaatggtagtttcttctagatattcaaatgcatatatgtatgtacatgtaattataaataaataatgaatttttattaaagtgttgtatgaac

SEQ ID NO: 9711 - DNA, 3397 bp, Homo sapiens
  source 1..3397: mol_type = unassigned DNA; mol_type = unassigned DNA
tttgaatgctctccatgttgatgaaattcattctttatcaagatgtaaaatatgtaatttattgtggcctctggttgctctatgtgaattgaggatactttttttttttttgttaagggaaagagggagtctggctctgtcgcccaggctggagtgcggtgtggtgtgatcatagctcactgcaacctcttaactcctgggctcaagcagctctccctcctcagcctcctgtagctaggactacaggcatgtgacaccattcctggctattttttacattttttgtggagacaaggtctatgttggccaggctggtcacgagtccctcgtccccagggatcttcctgcctaagcctcccacaatgctgggacggtgcctggtctgaggatatttcttaccactgtgtttcagcttttcctcatctgaatcaaacatttgaattctttctagaaggtggccagcatcgaaatgttcagccttttagtgatgaagatgcatcaattgaaacaatgagccattgcagtggttatagcgatccttccagttttgctgaagatggaccagaagtccttgatgaggaaggaactcaagaagacctagagtacaagttgaagggattaattgacctaaccctggataagagtgcgaagacaaggcaagcagctcttgaaggtattaaaaatgcactggcttcaaaaatgctgtatgaatttattctggaaaggagaatgactttaactgatagcattgaacgctgcctgaaaaaaggtaagagtgatgagcaacgtgcagctgcagcgttagcatctgttctttgtattcagctgggccctggaattgaaagtgaagagattttgaaaactcttggaccaatcctaaagaaaatcatttgtgatgggtcagctagtatgcaggctaggcaaacttgtgcaacttgctttggtgtttgctgttttattgccacagatgacattactgaactatactcaactctggaatgtttggaaaatatcttcactaaatcctatctcaaagagaaagacactactgttatttgcagcactcctaatacagtgcttcatatcagctctcttcttgcatggacactactgctgaccatatgcccaatcaatgaagtgaagaaaaagcttgagatgcatttccataagcttccaagcctcctctcttgtgatgatgtaaacatgagaatagctgctggtgaatctttggcacttctctttgaattggccagaggaatagagagtgactttttttatgaagacatggagtccttgacgcagatgcttagggccttggcaacagatggaaataaacaccgggccaaagtggacaagagaaagcagcggtcagttttcagagatgtcctgagggcagtggaggaacgggattttccaacagaaaccattaaatttggtcctgaacgcatgtatattgattgctgggtaaaaaaacacacctatgacacctttaaggaggttcttggatcagggatgcagtaccacttgcagtcaaatgaattccttcgaaatgtatttgaacttggacccccagtgatgcttgatgctgcaacgcttaaaacgatgaagatttctcgtttcgaaaggcatttatataactctgcagccttcaaagctcgaaccaaagctagaagcaaatgtcgagataagagagcagatgttggagaattcttctagattttcagaacttgaagactattttctaatttctatttttttttctatttcaatgtatttaaactctagacacagtttttatcctggattaacttagataacttttgtagcagtggttatattgcttataatttaatgtacaatactattgaaactggtgagttctgattattaaatattctctgtaaatcagtaaacatgtataaagtatttgtaatgtttggtcataatttatttatgaagacagcaaaagactgatttcatgatggggaaaacaattagccaaagtttaatttcttacactgtggttgtcaagaatactgatttactataatgatatatacatgcaagatatttaacttaatatcttagacaagagttctgggtacaattttgggatctagttcccctggaaaagctgctgtatttttaatttttaatggaatgtagcttttaaaatcctgtcactggcatcaacaaaaggaattataccatgagaccttatagctgtacttaaaagccattcagttcagctattgggagttcatgatgaattagcatatgccagaaaggttgctaaccttaacatctgagagcagtaacactgattttatctgctgtatgagactttgtgcattttactttgaaataaagatttttttccacactgaaagtgcttctcttctaatagaagaaatattatttatggctttgaggtacagagtccaaaatgactaggccaggtgggcagggagacaaagctttatgtgtatatttacaaacattaaagtagatgaaaagaatgtagcaatacataattgggattaaggtttctgactttcaagaatatttctgcttggcaacatgcagtgtggctcatgcctataatcagcactctggggaggctgaggcgggaggatggcatgagcccagtttgagaccagcctgggcaacatagcgagaccctgtctctaccagaaatttaaaaaatgagtgtggtggtgtgtgcttctactctttatctacttgggtgctgaggcaagagggtaacttgagcccaggaggtcaaagctgcagtgagccgtgattgtgccactccagcctgggtgacgagtgagaccttgtctcaaaagcaaaacaaaaaagaatattgctgcttgtttgcccatgaggtatatttctttcattttatgaaaagcattttgacaacacgttaacatttaataaactttagattaaaatatatagtgcaagcaacatgccatttcaaatccgtagacttgtttctttgatactcttgctgtaggtcgccgtgaggggtagggaagcatatatactgtagggagaagtatcaaaatcatttaaggtcttttttccaaactagtgttcccctcccacatcccaacaactcttggaagtctggtgctccctctaggtgaaaatcatttgctggcttatggagtcactgttgctgagtcccatcccccagttacagtgcagtggaaaacaggtttagaatctagaacttgtttgtatgttgtcacttggttatgttccaagtaggttagaaccatggaaaagagattgcaaatggtagtttcttctagatattcaaatgcatatatgtatgtacatgtaattataaataaataatgaatttttattaaagtgttgtatgaac

SEQ ID NO: 9712 - DNA, 574 bp, Homo sapiens; identical to SEQ ID NO: 9695
  source 1..574: mol_type = unassigned DNA; mol_type = unassigned DNA

SEQ ID NO: 9713 - DNA, 1834 bp, Homo sapiens; identical to SEQ ID NO: 9696
  source 1..1834: mol_type = unassigned DNA; mol_type = unassigned DNA

SEQ ID NO: 9714 - DNA, 440 bp, Homo sapiens; identical to SEQ ID NO: 9697
  source 1..440: mol_type = unassigned DNA; mol_type = unassigned DNA

SEQ ID NO: 9715 - DNA, 570 bp, Homo sapiens; identical to SEQ ID NO: 9698
  source 1..570: mol_type = unassigned DNA; mol_type = unassigned DNA

SEQ ID NO: 9716 - DNA, 429 bp, Homo sapiens; identical to SEQ ID NO: 9699
  source 1..429: mol_type = unassigned DNA; mol_type = unassigned DNA

SEQ ID NO: 9717 - DNA, 2290 bp, Homo sapiens; identical to SEQ ID NO: 9700
  source 1..2290: mol_type = unassigned DNA; mol_type = unassigned DNA

SEQ ID NO: 9718 - DNA, 1938 bp, Homo sapiens; identical to SEQ ID NO: 9701
  source 1..1938: mol_type = unassigned DNA; mol_type = unassigned DNA

SEQ ID NO: 9719 - DNA, 486 bp, Homo sapiens; identical to SEQ ID NO: 9702
  source 1..486: mol_type = unassigned DNA; mol_type = unassigned DNA

SEQ ID NO: 9720 - DNA, 891 bp, Homo sapiens; identical to SEQ ID NO: 9703
  source 1..891: mol_type = unassigned DNA; mol_type = unassigned DNA

SEQ ID NO: 9721 - DNA, 555 bp, Homo sapiens; identical to SEQ ID NO: 9704
  source 1..555: mol_type = unassigned DNA; mol_type = unassigned DNA

SEQ ID NO: 9722 - DNA, 567 bp, Homo sapiens; identical to SEQ ID NO: 9705
  source 1..567: mol_type = unassigned DNA; mol_type = unassigned DNA

SEQ ID NO: 9723 - DNA, 1034 bp, Homo sapiens; identical to SEQ ID NO: 9706
  source 1..1034: mol_type = unassigned DNA; mol_type = unassigned DNA

SEQ ID NO: 9724 - DNA, 1721 bp, Homo sapiens; identical to SEQ ID NO: 9707
  source 1..1721: mol_type = unassigned DNA; mol_type = unassigned DNA

SEQ ID NO: 9725 - DNA, 664 bp, Homo sapiens; identical to SEQ ID NO: 9708
  source 1..664: mol_type = unassigned DNA

SEQ ID NO: 9726 - DNA, 437 bp, Homo sapiens; identical to SEQ ID NO: 9709
  source 1..437: mol_type = unassigned DNA

SEQ ID NO: 9727 - DNA, 3232 bp, Homo sapiens; identical to SEQ ID NO: 9710
  source 1..3232: mol_type = unassigned DNA

SEQ ID NO: 9728 - DNA, 3397 bp, Homo sapiens; identical to SEQ ID NO: 9711
  source 1..3397: mol_type = unassigned DNA

SEQ ID NO: 9729 - DNA, 1102 bp, Homo sapiens
  source 1..1102: mol_type = unassigned DNA
cgcggagatggaggatttgctcgacttggacgaggagcttcgctacagcttggctacctccagggccaagatgggtcgccgagctcaacaggagtcagcgcaggccgagaatcacctcaatggcaagaattcctctttgactctgactggagagacttcctctgctaaattacctcgctgccgacagggaggctgggcaggtgattccgtgaaggcttcgaagtttaggaggaaggcttctgaagaaatagaagatttccgcctcagaccacagagcctgaatggatcagattatggaggagcggtacccaaacaggcaaacaacagctggatctgaacgcatgctatcacaaaacgcatcacagagatttggggctggcttcattggaagaggcagatattcctatcattccggatctggaggaagtacaggaagaagactttgttttgcaggtggcagcccctcccaggtaggttaaatcagatatgattggggaggcaaagaacacgtgaattaatacactccagatatcatctatagtggaccttgatgtcaatctggatctttctggtgttgggctccatccagggttcccattttgttattcccattctggtcatcccctgctgtatacaaggttctggggacggtggcccggcagcactcctggaacaggtcctgcctggggttcccgcctctcgctctctctttccttcagcatccagataaagcgggtgatgacctaccgtgacctggacaatgacctcatgaagtactcagccattcagacactggatggggagatcgacctgaaactcctcaccaaagtgctcgcgccggagcacgaagtccgggaggatgatgtcggctgggactgggaccatctgttcactgaggtgtcctcagaggtcctcactgagtgggacccactgcagacggagaaggaggaccctgcggggcaggccaggcacacctgagcccgtcacccatgctctagacatgaagaaatgcaatgagcttaaagctaaagaagcttgtaagcagctccgaatttttacctggaatattttgtaataaaaatatttatattcagtcaaccac

SEQ ID NO: 9730 - DNA, 1765 bp, Homo sapiens
  source 1..1765: mol_type = unassigned DNA
cgcggagatggaggatttgctcgacttggacgaggagcttcgctacagcttggctacctccagggccaagatgggtcgccgagctcaacaggagtcagcgcaggccgagaatcacctcaatggcaagaattcctctttgactctgactggagagacttcctctgctaaattacctcgctgccgacagggaggctgggcaggtgattccgtgaaggcttcgaagtttaggaggaaggcttctgaagaaatagaagatttccgcctcagaccacagagcctgaatggatcagattatggaggagatattcctatcattccggatctggaggaagtacaggaagaagactttgttttgcaggtggcagcccctcccaggtaggttaaatcagatatgattggggaggcaaagaacacgtgaattaatacactccagatatcatctatagtggaccttgatgtcaatctggatctttctggtgttgggctccatccagggttcccattttgttattcccattctggtcatcccctgctgtatacaaggttctggggacggtggcccggcagcactcctggaacaggtcctgcctggggttcccgcctctcgctctctctttccttcagcatccagataaagcgggtgatgacctaccgtgacctggacaatgacctcatgaagtactcagccattcagacactggatggggagatcgacctgaaactcctcaccaaagtgctcgcgccggagcacgaagtccgggaggatgatgtcggctgggactgggaccatctgttcactgaggtgtcctcagaggtcctcactgagtgggacccactgcagacggagaaggaggaccctgcggggcaggccaggcacacctgagcccgtcacccatgctctagacatgaagaaatgcaatgagcttaaagctaaagaagctttctcttcttggaaaatgtatcacaagtgaaggagaacagcttttaaaccagctgataggaactcagaactcgcggccttgttgcggagcatgtgggagagttcgattcaggcggagaaggagtgggcactcctactgaaagctgttcacttctcgggaggtttcaaacagttgcctgctggggttctggggcggggcctcccttcccgtgggtgctctgggccctttgtgaccttagtgacgcagcactgccacctgcatcataggcttccaggcagctgcagcggagggaggaggcggcgggagggataaggagactcattcttcactcgcatcagggtttggtggctgttgtgacaatattctcctttctcccctcttcctgcagtccatgccttgagctccaaaagcttctacaggttcccagagcctcatttctgattctcatgggaaggggccagccagcagccctgagaattccatggaagccctctcttacagagcctgggcctcccttctccttatccttttagatacgttgcagccatctccaccgctgcaagtattataaccgcctggttccaagatgtgctgagatcaggagcagagtcccacccttctcctaaacagagctgtcttttgtttttgtttttctcttttcctccctgagacttcttatctgaggacagagccccttcgctgcctgcttctcttggatgcggctttgggttaggctggcagcagctaactaaggcccactccccggccatagggagcgctgagtgcttctgttatcctgcctggaaagcccttcattaaaattc

SEQ ID NO: 9731 - DNA, 460 bp, Homo sapiens
  source 1..460: mol_type = unassigned DNA
cggagatggaggatttgctcgacttggacgaggagcttcgctacagcttggctacctccagccccgagtgcgaacttccccagaacagatcgatcacagggtgataggggagccccggccggggtcgcactcgctcccatcctagagtttttcctttgggacacctcgtcgcagaagttcctgcaaaagccgcactgttttatgcatggaagggagagggccaagatgggtcgccgagctcaacaggagtcagcgcaggccgagaatcacctcaatggcaagaattcctctttgactctgactggagagacttcctctgctaaattacctcgctgccgacagggaggctgggcaggtgattccgtgaaggcttcgaagtttaggaggaaggcttctgaagaaatagaagatttccgcctcagaccacagagcctgaatggatcagattatggaggaggta

SEQ ID NO: 9732 - DNA, 816 bp, Homo sapiens
  source 1..816: mol_type = unassigned DNA
cggagatggaggatttgctcgacttggacgaggagcttcgctacagcttggctacctccagggccaagatgggtcgccgagctcaacaggagtcagcgcaggccgagaatcacctcaatggcaagaattcctctttgactctgactggagagacttcctctgctaaattacctcgctgccgacagggaggctgggcaggtgattccgtgaaggcttcgaacggtacccaaacaggcaaacaacagctggatctgaacgcatgctatcacaaaacgcatcacagagatttggggctggcttcattggaagaggcagatattcctatcattccggatctggaggaagtacaggaagaagactttgttttgcaggtggcagcccctcccagcatccagataaagcgggtgatgacctaccgtgacctggacaatgacctcatgaagtactcagccattcagacactggatggggagatcgacctgaaactcctcaccaaagtgctcgcgccggagcacgaagtccgggaggatgatgtcggctgggactgggaccatctgttcactgaggtgtcctcagaggtcctcactgagtgggacccactgcagacggagaaggaggaccctgcggggcaggccaggcacacctgagcccgtcacccatgctctagacatgaagaaatgcaatgagcttaaagctaaagaagcttgtaagcagctccgaatttttacctggaatattttgtaataaaaatatttatattcagtcaaccacattggataattcaattgcaataaattgcttattctgtgccatctc

SEQ ID NO: 9733 - DNA, 848 bp, Homo sapiens
  source 1..848: mol_type = unassigned DNA
gagatggaggatttgctcgacttggacgaggagcttcgctacagcttggctacctccagggccaagatgggtcgccgagctcaacaggagtcagcgcaggccgagaatcacctcaatggcaagaattcctctttgactctgactggagagacttcctctgctaaattacctcgctgccgacagggaggctgggcaggtgattccgtgaaggcttcgaagtttaggaggaaggcttctgaagaaatagaagagtacgtttccagtattcttattcttatggtatcctatgttgatcttggtcaacagtgcagtcttggtggtcatgatctgttccacctatgttgaacactgtgttagaagtctggggctagaattattgatgcctgctgaatccaaggtttggttaatcccgcttcctcaactgaaggtctggaccctggcattgatgcccatgtcctatctcccactgtgtggttttagaattatatgtccaggtatcagggtactggcccatgccttctgcattattgatatagatgggcagaagcaataccagcttctaagccttgccttctcataagacttatatcagaaaagaaagaagttttctagataaaggtgctgtgaaggtagggccacccagtttcctactcccaggggcggaagctgcattcatgtcatagcctctgtgatgctgtcctctggaatagtgcatcgcacagcctgtgcaaccacacacggcacacccagtggcctaattaggtttgactaagttgacagagaaaaacaggttcagggacattttcatctaggagaaagaatggatacaataaacatttgggatgttc

SEQ ID NO: 9734 - DNA, 684 bp, Homo sapiens
  source 1..684: mol_type = unassigned DNA
atttgctcgacttggacgaggagcttcgctacagcttggctacctccgtgaggaccaattcgggggccttgggggccaggatttggcgggtggggaggagcgaccccgccggccccgacttctctgaggcgactcagggcggcaggcctcgcgccgcgccgggtgaggcccagaaggaggcagcctcaccgccccgcccccaggccactgtgggctccgccgctgctggcctggggtttgctttctttaaaatcctcagaaagtagaaaacaccctgtccccgccggcgtctaggaccgtgggaaatttccgagcctttctccgttttctagagccccgagtgcgaacttccccagaacagatcgatcacagggtgataggggagccccggccggggtcgcactcgctcccatcctagagtttttcctttgggacacctcgtcgcagaagttcctgcaaaagccgcactgttttatgcatggaagggaggcaggcagggacggcctttcttcccgagggccaagatgggtcgccgagctcaacaggagtcagcgcaggccgagaatcacctcaatggcaagaattcctctttgactctgactggagagacttcctctgctaaattacctcgctgccgacagggaggctgggcaggtgattccgtgaaggcttcgaagtgagtac

SEQ ID NO: 9735 - DNA, 472 bp, Homo sapiens
  source 1..472: mol_type = unassigned DNA
agacttcctctgctaaattacctcgctgccgacagggaggctgggcaggtgattccgtgaaggcttcgaaccgcaaagaacccggaatcagtatggcatgaccggagtcctgggcaacgtgggttcttaactgtcagtcagatattcctatcattccggatctggaggaagtacaggaagaagactttgttttgcaggtggcagcccctcccaggtaggttaaatcagatatgattggggaggcaaagaacacgtgaattaatacactccagatatcatctatagtggaccttgatgtcaatctggatctttctggtgttgggctccatccagggttcccattttgttattcccattctggtcatcccctgctgtatacaaggttctggggacggtggcccggcagcactcctggaacaggtcctgcctggggttcccgcctctcgctctctctttccttcagcatccagat

SEQ ID NO: 9736 - DNA, 526 bp, Homo sapiens
  source 1..526: mol_type = unassigned DNA
gtgtgaagggcacagaaaagcagttccaaagtctgaagcctgaactgcgaggcgaggacatccctttttgctcgttgcaagtcgcaagtgctgacagctaacaacaccaaataagacccagggtctcagtcctaagaaagcactctataaatcagtcagttaattgctgaaagaaaagagggcactgaatcatctgtatctatttgaattttaagccactcgctcaacctgcacttacactctcaacaatccaatttggagtgaggctgacataaagctgtaagaaggcactacagcatcttcagttctctcatgctggttgtggggcttgtctctaaagaggactgcagacaaataaagcacttgagatatactaatttgcctccacttttgaaaccttcctcaagatactacctggtgcatgagactagtgggctctcaaaaaccttgtcttttctttttttttttcaggtttaggaggaaggcttctgaagaaatagaagatttccgcctcagaccacagagc

SEQ ID NO: 9737 - DNA, 635 bp, Homo sapiens
  source 1..635: mol_type = unassigned DNA
agtcagttaattgctgaaagaaaagagggcactgaatcatctgtatctatttgaattttaagccactcgctcaacctgcacttacactctcaacaatccaatttggagtgaggctgacataaagctgtaagaaggcactacagcatcttcagttctctcatgctggttgtggggcttgtctctaaagaggactgcagacaaataaagcacttgagatatactaatttgcctccacttttgaaaccttcctcaagatactacctggtgcatgagactagtgggctctcaaaaaccttgtcttttctttttttttttcaggtttaggaggaaggcttctgaagaaatagaagatttccgcctcagaccacagagcctgaatggatcagattatggaggaggtaagaggcccttggaggaagtcaaaaggtcttctagagaggccccagaacatttcctgggctacagctaaggcactgttggctgcagcatcactgaagacatttgcagtggtcttctgacgcatgctgatgcacatcttcatgccttgctgaatgctgccacctctacctggagtatctctcccttctttatctgataaccctgcttatccttcaaaaggtcagccaaagcatcac

SEQ ID NO: 9738 - DNA, 833 bp, Homo sapiens
  source 1..833: mol_type = unassigned DNA
ggtttccaggaagtgacgtcaggcggccgcggagatggaggatttgctcgacttggacgaggagcttcgctacagcttggctacctccagggccaagatgggtcgccgagctcaacaggagtcagcgcaggccgagaatcacctcaatggcaagaattcctctttgactctgactggagagacttcctctgctaaattacctcgctgccgacagggaggctgggcaggtgattccgtgaaggcttcgaagtttaggaggaaggcttctgaagaaatagaagatttccgcctcagaccacagagcctgaatggatcagattatggaggagatattcctatcattccggatctggaggaagtacaggaagaagactttgttttgcaggtggcagcccctcccagcatccagataaagcgggtgatgacctaccgtgacctggacaatgacctcatgaagtactcagccattcagacactggatggggagatcgacctgaaactcctcaccaaagtgctcgcgccggagcacgaagtccgggaggatgatgtcggctgggactgggaccatctgttcactgaggtgtcctcagaggtcctcactgagtgggacccactgcagacggagaaggaggaccctgcggggcaggccaggcacacctgagcccgtcacccatgctctagacatgaagaaatgcaatgagcttaaagctaaagaagcttgtaagcagctccgaatttttacctggaatattttgtaataaaaatatttatattcagtcaaccacattggataattcaattgcaataaattgcttattctgtgccatctcctc

SEQ ID NO: 9739 - DNA, 487 bp, Homo sapiens
  source 1..487: mol_type = unassigned DNA
tttcagagggtcctccgcggaagggcagctgaatggactccagagcagccttaaccctgcagcctttgtgcccatcaccagctctacagagggccaagatgggtcgccgagctcaacaggagtcagcgcaggccgagaatcacctcaatggcaagaattcctctttgactctgactggagagacttcctctgctaaattacctcgctgccgacagggaggctgggcaggtgattccgtgaaggcttcgaagtgagtaccagcagctcataagagtatgggtgggggtgcacacggttggggggactttgctcctgtgttgttttattttttacaatagctttattgagaaaaaatttatataccatacaattcacccacttaaaatgcacaatttaatcattcttaatatattcacagagttgtgcaaccattaacacaatcaattttacaacattttcatcacctccccaccaaaagaaaccctgt

SEQ ID NO: 9740 - DNA, 1014 bp, Homo sapiens
  source 1..1014: mol_type = unassigned DNA
gtcaggcggccgcggagatggaggatttgctcgacttggacgaggagcttcgctacagcttggctacctccagggccaagatgggtcgccgagctcaacaggagtcagcgcaggccgagaatcacctcaatggcaagaattcctctttgactctgactggagagacttcctctgctaaattacctcgctgccgacagggaggctgggcaggtgattccgtgaaggcttcgaagtttaggaggaaggcttctgaagaaatagaagatttccgcctcagaccacagagcctgaatggatcagattatggaggagatattcctatcattccggatctggaggaagtacaggaagaagactttgttttgcaggtggcagcccctcccagcatccagataaagcgggtgatgacctaccgtgacctggacaatgacctcatgaagtactcagccattcagacactggatggggagatcgacctgaaactcctcaccaaagtgctcgcgccggagcacgaagtccgggaggatgatgtcggctgggactgggaccatctgttcactgaggtgtcctcagaggtcctcactgagtgggacccactgcagacggagaaggaggaccctgcggggcaggccaggcacacctgagcccgtcacccatgctctagacatgaagaaatgcaatgagcttaaagctaaagaagctttctcttcttggaaaatgtatcacaagtgaaggagaacagcttttaaaccagctgataggaactcagaactcgcggccttgttgcggagcatgtgggagagttcgattcaggcggagaaggagtgggcactcctactgaaagctgttcacttctcgggaggtttcaaacagttgcctgctggggttctggggcggggcctcccttcccgtgggtgctctgggccctttgtgaccttagtgacgcagcactgccacctgcatcataggcttccaggcagctgcagcggagggaggaggcggcgggagggataa

SEQ ID NO: 9741 - DNA, 4479 bp, Homo sapiens
  source 1..4479: mol_type = unassigned DNA
agcggtgcgagtgtggagcgcgcaccccgggcgaggctgacagatcgcccgggtgggtgcaagatggcgcaagcggcgctccccctgcgccccccgcgctgctgagcaggcatgcggccccagtcccccaccgcctgggctcggccccggccggagccccagccccggccccggcgccggccccgcgggacgctgtgagccgcgagaggcccgggagccgcgcgtcgccgagccgagctgaccgagagccccatggctgtgcagcgcgccgcgtctccgcgccgcccgcccgccccgctctggccccggctcctgctgccgctgctgttgctgctgctgcccgcgccgagcgagggtcttggccactctgctgaactggcatttgctgtggagccaagtgatgatgttgccgtccccgggcagcctatagtgctggactgcagggtggaggggacccctccagtgcgaatcacctggaggaagaatggggtagagctgccagagagtacccactccaccttgctggccaatgggtccttgatgatccgtcacttcaggctggagccgggaggcagcccttcggatgaaggtgactatgagtgtgtggcccagaaccgctttgggctggtggtcagccggaaggctcgcatccaagctgcaaccatgtcggacttccacgtgcatccccaggccaccgtgggtgaggagggtggtgtggcccgcttccagtgccaaatccatgggcttcccaaacccctgatcacttgggagaagaacagagtcccaattgacacggacaatgagaggtacacattgctgcccaagggggtcctgcagatcacaggacttcgagctgaggacggtggcatcttccactgtgtggcctcaaacatcgccagtatccggatcagccacggggccaggctcactgtgtcaggctcgggctctggggcctacaaggagccagccatcctcgtggggcctgagaacctcaccctgacagtgcaccagaccgcggtgcttgagtgtgtcgccacgggcaacccgcgccccattgtgtcctggagccgcctggatggtcgccctatcggggtggagggcatccaggtgctgggcacaggaaacctcatcatctcagacgtgacggtccagcactctggcgtctacgtctgtgcagccaacagacctggcacccgggtgaggagaacggcacagggccggctggtggtgcaagccccagctgagtttgtgcagcatccccagtccatctccaggccagctgggaccacagccatgttcacctgccaagcccagggtgagccaccgcctcatgtcacgtggctgaaaaatggacaggtgctggggccaggaggccacgtcaggctcaagaataacaacagcacactgaccatttctggaatcggtcctgaggatgaagccatttatcagtgtgtggccgagaacagtgcgggctcatcacaggccagtgccaggctgaccgtactgtgggctgaggggctccccgggcctccccgcaatgtgcgggcagtctctgtgtcttccactgaggtgcgtgtgtcctggagtgagccgctggccaacaccaaggagatcatcggctacgtcctgcacatcaggaaggctgctgacccaccggagctggagtatcaggaggcagtcagcaagagcacctttcagcacctggtcagcgacctggagccctccacagcctacagtttctacatcaaggcctacacaccaaggggggccagctcagcctctgtgcccaccctagctagcaccctgggtgaagcccctgccccacccccactgtcagtgcgagtcctgggcagctcctccttgcagctgctgtgggagccttggccccggctggcccagcacgagggcggcttcaagctgttttaccgcccagcaagcaagacctccttcaccggccccatcctgctgcctggaaccgtctcctcctacaacctcagccagctcgaccccactgcagtgtatgaggtgaagctgctcgcctacaaccagcatggagatggcaatgccacagtccgctttgtgtctttgaggggagcatctgagaggacagccttgagcccaccatgtgactgccggaaggaggaggccgccaaccagacgtccaccacaggcatcgtcatcggcatccacatcggggtcacttgcatcatcttctgtgtcctcttcctcctgttcggccaaaggggcagggtcctcctgtgtaaagatgtggaaaaccagctgtcccctccacagggtccccggagccagagggaccctggcattctagccctaaatggggcgagacggggacagcggggccagctgggccgagacgagaaacgtgtggatatgaaggagctggagcagctgttccccccggccagcgcagcagggcagccggaccccagacccacacaggatcctgcagcccccgctccgtgtgaggagacccagctctccgtgctgccacttcaggggtgcggcctgatggaggggaagacgacggaggcgaagaccacagaggccacggctccctgcgccggcctggcggctgccccaccacccccagatggaggccctggcctcctcagtgaaggccaggcttccaggcctgcagcggcccgggttacccagccagctcactcggaacagtagccagtgtctggcaggctccagagggtggacggagcggggcccattctcaggtcaaaagcaagatttctactgtcatgtgggatttggatggtcctgggggctccccagcatttctatcctgactgcctcttgggttgtcaaaacccaaggcagccttgacagggaccccccggccctaacacccatcaggagttggagcagttcctgcaggagcctgttccttccctgggctgacgcccccttgcctctgcctggtacccacatgacttggaactgaactaacatttttctttaaaaagcaaaacttaaaaaaaaaaaaaaagaggagagagatagaggaaggtgaattagactccaaaagatgaccctgctgtagctgggccctgacactgtcaccctccaccgactttgttttctcaggatggatttttgctgttttggctctcagcacctacctcagccggaatgaatgtcctggggggcagtggggcggtggcctcagcccccttaccccacagagcccgaatgcactcctacctcaagtccccttgctggggaccccctctcccttcccacactgttgtccagagtaaaaaaaaaaaaaaaaaaaaaagcacttccccgtttccaggtgtgaaagaaaaaaaaaagcacttccccatttccagatgtgaaagaaaatgtctacctcaaggctcgctggctctgtgggctgtgttgtcactggacctgcctccccgcccctcctgcccacagcccacctacctctcctgcagaggagaggccagaggttgggccaccaaggggaactcttgtggcctacagaaatagaaatggattgggcagagaaaaaatgtgaaagcagccaaaaatgagaggaaatttgttccttgaagtataaattgtccaaacgagccacctcccagcacaccgcctgtccccgtcttgtctgtccactcccattttgagccagcccatccttgatggggatgcccatgaggaacctgggcttgggagggtggcatcagctggccgcctgcctcctgtcctgcaggcccggcccctggaatgtaccatgtgtgggatgggtgtgtgggagggtgagggggtgtgggtgtcccctgcagaggcgccccagcctcaggcacccagccagcctgatccacccctcgacaggggagcatccactgtcagcagccatggccggaagctatttttatacaaggtgtgttaagggttatgttcttgtgactttttgttactcttttctgttgtgttgttctttgaactacttagttaaagaagaagaaaagaaaaccaaggaaacaaatacctatttttggttatactcagaaacatttttttaaatagcagaagaaaaactttttttaaagaaaaaagataagtgtattccttaagaatgagaccataaatatccctgacccccaatcctctagggacacctccaccctgaactttagttaattagctgaagaagatagaatttgtggtgttttcctagaaaactagagctgtgtccgcgtggacttggggaagggtagtcccttcccttctcccaaatgatgtgtggatgcccagggctccacaaagctccaaggcagtgccccctctgttcccaaagcagcttctctcgggagcctccctctcccttgggaagggtgcggctggggcaggagggggctggggggccacctggccttacttgggttttgtcacactctgctcattttgactgaataaaagtcctgttgccaaagtgaa

SEQ ID NO: 9742 - DNA, 1783 bp, Homo sapiens
  source 1..1783: mol_type = unassigned DNA
atttccctcttcccgactcctctagtcccttcatcagtccaggctccccacagtgccccatcttccctcttcttttcccagtctttctctcctgccttctctacccgcatctctcccagccattgcctaaacctcggcagtcctttcaggttggtggcacacagctgggcactaagccatgtcggacttccacgtgcatccccaggccaccgtgggtgaggagggtggtgtggcccgcttccagtgccaaatccatgggcttcccaaacccctgatcacttgggagaagaacagagtcccaattgacacggacaatgagaggtacacattgctgcccaagggggtcctgcagatcacaggacttcgagctgaggacggtggcatcttccactgtgtggcctcaaacatcgccagtatccggatcagccacggggccaggctcactgtgtcaggctcgggctctggggcctacaaggagccagccatcctcgtggggcctgagaacctcaccctgacagtgcaccagaccgcggtgcttgagtgtgtcgccacgggcaacccgcgccccattgtgtcctggagccgcctggatggtcgccctatcggggtggagggcatccaggtgctgggcacaggaaacctcatcatctcagacgtgacggtccagcactctggcgtctacgtctgtgcagccaacagacctggcacccgggtgaggagaacggcacagggccggctggtggtgcaagccccagctgagtttgtgcagcatccccagtccatctccaggccagctgggaccacagccatgttcacctgccaagcccagggtgagccaccgcctcatgtcacgtggctgaaaaatggacaggtgctggggccaggaggccacgtcaggctcaagaataacaacagcacactgaccatttctggaatcggtcctgaggatgaagccatttatcagtgtgtggccgagaacagtgcgggctcatcacaggccagtgccaggctgaccgtactgtgggctgaggggctccccgggcctccccgcaatgtgcgggcagtctctgtgtcttccactgaggtgcgtgtgtcctggagtgagccgctggccaacaccaaggagatcatcggctacgtcctgcacatcaggaaggctgctgacccaccggagctggagtatcaggaggcagtcagcaagagcacctttcagcacctggtcagcgacctggagccctccacagcctacagtttctacatcaaggcctacacaccaaggggggccagctcagcctctgtgcccaccctagctagcaccctgggtgaagcccctgccccacccccactgtcagtgcgagtcctgggcagctcctccttgcagctgctgtgggagccttggccccggctggcccagcacgagggcggcttcaagctgttttaccgcccagcaagcaagacctccttcaccggccccatcctgctgcctggaaccgtctcctcctacaacctcagccagctcgaccccactgcagtgtatgaggtgaagctgctcgcctacaaccagcatggagatggcaatgccacagtccgctttgtgtctttgaggggagcatctgagaggacagccttgagcccaccatgtgactgccggaaggaggaggccgccaaccagacgtccaccacaggcatcgtcatcggcatccacatcggggtcacttgcatcatcttctgtgtcctcttcctcctgttcggccaaaggggcagggtcctcctgtgtaaagat

SEQ ID NO: 9743 - DNA, 748 bp, Homo sapiens
  source 1..748: mol_type = unassigned DNA
gggaatgtggaatcctgtttgttctctgtgggggtccattctatccctgtgacctgggaagaggatggtcgccctatcggggtggagggcatccaggtgctgggcacaggaaacctcatcatctcagacgtgacggtccagcactctggcgtctacgtctgtgcagccaacagacctggcacccgggtgaggagaacggcacagggccggctggtggtgcaagccccagctgagtttgtgcagcatccccagtccatctccaggccagctgggaccacagccatgttcacctgccaagcccagggtgagccaccgcctcatgtcacgtggctgaaaaatggacaggtgctggggccaggaggccacgtcaggctcaagaataacaacagcacactgaccatttctggaatcggtcctgaggatgaagccatttatcagtgtgtggccgagaacagtgcgggctcatcacaggccagtgccaggctgaccgtactgtgggctgaggggctccccgggcctccccgcaatgtgcgggcagtctctgtgtcttccactgaggtgcgtgtgtcctggagtgagccgctggccaacaccaaggagatcatcggctacgtcctgcacatcaggaaggctgctgacccaccggagctggagtatcaggaggcagtcagcaagagcacctttcagcacctggtcagcgacctggagccctccacagcctacagtttctacatcaaggcctacacac

SEQ ID NO: 9744 - DNA, 564 bp, Homo sapiens
  source 1..564: mol_type = unassigned DNA
cgcgagtgcgccggggccgggcccagctggggaatccgaggctctgggggagggggtggcgggaaatggtgcctcgctcgccccagcgacatcaaaccctcgtttggcgtgcgaggacaatggctgtcttattttctccattcgccgcgcacaatgccggattctctcattcacccgcggtggtgcgagcgagccatgtcggacttccacgtgcatccccaggccaccgtgggtgaggagggtggtgtggcccgcttccagtgccaaatccatgggcttcccaaacccctgatcacttgggagaagaacagagtcccaattgacacggacaatgagaggtacacattgctgcccaagggggtcctgcagatcacaggacttcgagctgaggacggtggcatcttccactgtgtggcctcaaacatcgccagtatccggatcagccacggggccaggctcactgtgtcaggctcgggctctggggcctacaaggagccagccatcctcgtggggcctgagaacctcaccctgacagtgcaccagaccgcggtgcttgagtgtgtc

SEQ ID NO: 9745 - DNA, 844 bp, Homo sapiens
  source 1..844: mol_type = unassigned DNA
ctccagtgcgaatcacctggaggaagaatggggtagagctgccagagagtacccactccaccttgctggccaatgggtccttgatgatccgtcacttcaggctggagccgggaggcagcccttcggatgaaggtgactatgagtgtgtggcccagaaccgctttgggctggtggtcagccggaaggctcgcatccaagctgcaaagtcttgttctgtcacccaggctggagtgcagtggcacgatctcgactgactgcaacttctatctcccgggttcaagcaattcttgtgcctcagcttccccagtagctgggattacaggtgcgcacaattacgcccggctaatttttgaattttttggtaaagatggggtttcaccatgtttgccgggctggtctcgaactcttggcctcaagtgatcctcccgcctcagcctcccaaagtgctgggattacaggcgtgagctcctgcacccaggtctagctaacactttttaagtacttgctgcatgctgggcaccctgtccaagtgctttacatgaattacttcattttgtcatcacaacagccctgggagaatggaagataggtcattatcatcccccttttacagaagagaaaactgagccttagggggactcaatggcattctggtagcagaagagccaggactgtcatctgggcagcctgaacccacaccctcccacttagctcccgtggcacgccgcctctttcctgtctgatcgctgacaagtttcttcctggctctgagggcatttgcacagttgctctgaacggctggtgagtgatgaatcagtttgaggcaggagccctctcgctgggt

SEQ ID NO: 9746 - DNA, 6508 bp, Homo sapiens
  source 1..6508: mol_type = unassigned DNA
ctcgcccaagatggcgatggaggggcgggtgaggcggcagcggccctggcccccgcgccggccccagctcgggcccgggcccccgaggccgcgcccccgcccgcggcgccgcgcctccccgggccactgacgcccggcgcgctctccccccgcggcggcggccgaagcacggggaggcggcggcggcggcggcggcccgagcccagccccatggcgcggggggacgccggccgcggccgcgggctcctcgcgttgaccttctgcctgttggccgcgcgcggggagctgctgttgccccaggagacgactgtggagctgagctgtggagtggggccactgcaagtgatcctgggcccagagcaggctgcagtgctaaactgtagcctgggggctgctgccgctggaccccccaccagggtgacctggagcaaggatggggacaccctgctggagcacgaccacttacacctgctgcccaatggttccctgtggctgtcccagccactagcacccaatggcagtgacgagtcagtccctgaggctgtgggggtcattgaaggcaactattcgtgcctagcccacggccccctcggagtgctggccagccagactgctgtcgtcaagcttgccacactcgcagacttctctctgcacccggagtctcagacggtggaggagaacgggacagctcgctttgagtgccacattgaagggctgccagctcccatcattacttgggagaaggaccaggtgacattgcctgaggagcctcggctcatcgtgcttcccaacggcgtccttcagatcctggatgttcaggagagtgatgcaggcccctaccgctgcgtggccaccaactcagctcgccagcacttcagccaggaggccctactcagtgtggcccacagagggtccctggcgtccaccagggggcaggacgtggtcattgtggcagccccagagaacaccacagtggtgtctggccagagtgtggtgatggaatgtgtggcctcagctgaccccaccccttttgtgtcctgggtccgacaagacgggaagcccatctccacagatgtcatcgtcctgggccgcaccaacctactaattgccaacgcgcagccctggcactccggcgtctatgtctgccgcgccaacaagccccgcacgcgcgacttcgccactgcagccgctgagctccgtgtgctggcggctcccgccatcactcaggcgcccgaggcgctgtcgcggacgcgggcgagcacagcgcgcttcgtgtgccgcgcgtcgggggagccgcggccagcgctgcgctggctgcacaacggggcgccgctgcggcccaacgggcgcgtcaaggtccagggcggcggtggcagcctggtcatcacacagatcggcctgcaggacgccggctactaccagtgcgtggctgagaacagcgcgggaatggcgtgcgctgccgcgtcgctggccgtggtggtgcgcgaggggctgcccagcgcccccacgcgggtcactgctacgccactgagcagctccgctgtgttggtggcctgggagcggcccgagatgcacagcgagcagatcatcggcttctctctccactaccagaaggcacggggcatggacaatgtggaataccagtttgcagtgaacaacgacaccacagaactacaggttcgggacctggaacccaacacagattatgagttctacgtggtggcctactcccagctgggagccagccgcacctccaccccagcactggtgcacacactggatgatgtccccagtgcagcaccccagctctccctgtccagccccaacccttcggacatcagggtggcgtggctgcccctgccccccagcctgagcaatgggcaggtggtgaagtacaagatagaatacggtttgggaaaggaagatcagattttctctactgaggtgcgaggaaatgagacacagcttatgctgaactcgcttcagccaaacaaggtgtatcgagtacggatttcggctggtacagcagccggcttcggggccccctcccagtggatgcatcacaggacgcccagtatgcacaaccagagccatgtcccttttgcccctgcagagttgaaggtgcaggcaaagatggagtccctggtcgtgtcatggcagccaccccctcaccccacccagatctctggctacaaactatattggcgggaggtgggggctgaggaggaggccaatggcgatcgcctgccagggggccgtggagaccaggcttgggatgtggggcctgtccggctcaagaagaaagtgaagcagtatgagctgacccagctagtccctggccggctgtacgaggtgaagctcgtggctttcaacaaacatgaggatggctatgcagcagtgtggaagggcaagacggagaaggcgccggcaccagacatgcctatccagaggggaccacccctgcctccagcccacgtccatgcggaatcaaacagctccacatccatctggcttcggtggaaaaagccagatttcaccacagtcaagattgtcaactacactgtgcgcttcagcccctgggggctcaggaatgcctccctggtcacctattacaccagttctggagaagacatcctcattggcggcttgaagccattcaccaaatacgagtttgcagtgcagtctcacggcgtggacatggatgggcctttcggctctgtggtggagcgctccaccctgcctgaccggccctccacacccccatccgacctgcgactgagccccctgacaccgtccacggttcggctgcactggtgcccccccacagagcccaacggggagatcgtggagtatctgatcctgtacagcagcaaccacacgcagcctgagcaccagtggaccttgctcaccacgcagggaaacatcttcagtgctgaggtccatggcctggagagcgacactcggtacttcttcaagatgggggcgcgcacagaggtgggacctgggcctttctcccgcctgcaggatgtgatcacgctccaggagaagctgtcagactcgctggacatgcactcagtcacgggcatcatcgtgggtgtctgcctgggcctcctctgcctcctggcctgcatgtgtgctggcctgcgccgcagcccccacagggaatccctcccaggcctgtcctccaccgccacccccgggaatcccgcgctgtactccagagctcggcttggcccccccagccccccagctgcccatgaattggagtcccttgtgcacccccatccccaggactggtccccgccaccctcagacgtggaggacagggctgaagtgcacagccttatgggtggcggtgtttctgaaggccggagtcactccaaaagaaagatctcctgggctcaaccaagcgggctgagctgggctggttcctgggcaggctgtgagctgccccaggcaggcccccggccggctctgacccgggccctgctgccccctgctggaactgggcagacgctgttgctgcaggctctggtgtacgacgccataaagggcaatgggaggaagaagtcacccccagcctgcaggaaccaggtggaggctgaagtcattgtccactctgactttagtgcatctaacgggaaccctgacctccatctccaagacctggagcctgaggaccccctgcctccagaggctcctgatctcatctcgggtgttggggatccagggcagggggcagcctggctggacagggagttgggagggtgtgagctggcagcccccgggccagacagacttacctgcttgccagaggcagccagtgcttcctgctcctacccggacctccagccaggcgaggtgctagaggagacccctggagatagctgccagctcaaatccccctgccctctaggagccagcccaggcctgcccagatccccggtctcctcctctgcctagctcttcccagaggatgtggtttggggcaggcaggtatggatcacataggatgcgatacctgtggccgtgtatgtccacatgtgtgcctgtagatacatcatcaagccctttggagcttcctaagttgctttggctgaggggagaggaaaacatggattattcactccccccatactctttgtgatacacatgtgacatgtgaaagacatacgagacatagctacatgtgatgtgcacatgtgtgaagtgcatgtatgcgtactggttgttgagctgggaaaccgtggcccaggcagtggtcactacagcctgattggtcctccaggtcagaacggtgccccacagtggtcagtccccagccctgtgggcccccacctccatcgcccagccttttattacacactctgagagtgtctccaatgcctgtctgacaaagacagtcccagcccattctcctgtctggctgggttgggtgcaagcaggctctgaatgcctggcatttcagctgcatcacctcccagctccttattgcccaaatagagagggtggccctggctcccctccgagcaactctgcatttaattttgtaatctgggaagtgcctggttttgaaaatccgctttctctcactcttcccctccttccttgcccctggctgctctagtgttctgtctcccagtcacctcgctctcccagcaccagtgcccttctcctgctcccagatactctttcctttcctctctcctgttttccttcctctgctatctctcacacctctcccagactatgtcatcttgttctcctgcctgggttcaaactctgcatccttctctaacaacgtgactacctcatgtctgcttcaaggcccccgtgcccttcctgtatccgcggctgccgcgcactcgcctgccatcctcctgcctcctcttcactcagtgcttctgcttgccctgccccaggcagcccacccacgcccagtgcgggtgtggagaagatcttctggcttccctgcatcttgcctttgggattgggatccaagggttctccatggatggatccaagtcatagaggggaatgtttgagacagggaagggggctgtgatccagaggctcagaataaaaagatgccctcccttctatgcaggggggcaagtttactggatggagatgatttgggcctctcttccagaagaagctaaaggaagagaaggggagtgagagttcagggaggcccttcccaccctgtgaggcttgacttgatctggattggggatgacaggaatctcaccctctggggtgctggcaaggaggtctttgcacaggaaaaggggtagctcatttcagtttgttttttctttaaattgaatcctcaagtcattttctgttcacctgccgcacagggacaagcttgacttctattttctgtgtagtgaaaacaatgtcatttatttggtttttcacctcagccctctcataggagcatagaatgttagggtctttactccctaatgatgtctgattggcacatcaagagttaactctgccttctgggccaaattcgaaataaccagtccatttttccttttttttttttttttttttaaatggtggaatgtctctcagcacagttgcggcttcctcaaaccctgaaagcatctgtgtttattatactcgggtgtcactcactgttgatgtctgcacctacgtttccacctcctccccctccttcagccagcctatgataacactaaagattattaatgttggttttgtatctcgttaaagacagaattgtcacttgtagtatttctgtagcattcagcgctgctgtggctaacaccactgtgtatgtttcatcattgctctgaaggtcaaaagcctcattttattttgctggtttgattttttttttttaaagaagaaaaaaaaactgccctgaattaaatggctgttttaacagtaggctcttagcattataccacatagtcatttttcatgttcttgtttaacaggcactgaggttctggtttaaattaaatagctgcaaatgagacaatttataacccattaggttgggtggaaaattgtttctcaaaagcaaataagtaataaatctggtatctgcctataactcacagttgataagaaagtggccatttctcactagcactatatatgatttgggctctgggtaatttggaagtgttaggtttgtgtctttgtagcagtatttttattagaaaagaatctattggccttttacagggtattaatccctttgtcacctaccattgatgccttaagttttctgagtctcaattaaaaatcttccttttcttgatgcatgacaagtgtaatcagtacttgctcatttatttgtctgtatttagtttatgctgtactatttaattatccttccagcgttttttttttctccttacaaatatgatactctttagtgttaagctaaggcattgattcatgtatctgtccttataatgaattaataaactattttccagaaatgtggaattctcttttggaa

SEQ ID NO: 9747 - DNA, 3407 bp, Homo sapiens
  source 1..3407: mol_type = unassigned DNA
acaacgcgtggctatgcgagcatggctctacctcctcttcggagccggctgcggacgctagggcctctctccctcctccacggaatggttggctgtcagggaagcacatgggcctccatatcccggcggaataggtcagcttggttctcacgaaggaaagggcctcccagcaggtgacccagggtagccagaacacccagctccctcctcatccctggagctggggagacctctgagacccagacatccccgtgtggggagaagaggccagtcggcttggctgtggccaagtgggactgggaccaggataagatctcctgggctcaaccaagcgggctgagctgggctggttcctgggcaggctgtgagctgccccaggcaggcccccggccggctctgacccgggccctgctgccccctgctggaactgggcagacgctgttgctgcaggctctggtgtacgacgccataaagggcaatgggaggaagaagtcacccccagcctgcaggaaccaggtggaggctgaagtcattgtccactctgactttagtgcatctaacgggaaccctgacctccatctccaagacctggagcctgaggaccccctgcctccagaggctcctgatctcatctcgggtgttggggatccagggcagggggcagcctggctggacagggagttgggagggtgtgagctggcagcccccgggccagacagacttacctgcttgccagaggcagccagtgcttcctgctcctacccggacctccagccaggcgaggtgctagaggagacccctggagatagctgccagctcaaatccccctgccctctaggagccagcccaggcctgcccagatccccggtctcctcctctgcctagctcttcccagaggatgtggtttggggcaggcaggtatggatcacataggatgcgatacctgtggccgtgtatgtccacatgtgtgcctgtagatacatcatcaagccctttggagcttcctaagttgctttggctgaggggagaggaaaacatggattattcactccccccatactctttgtgatacacatgtgacatgtgaaagacatacgagacatagctacatgtgatgtgcacatgtgtgaagtgcatgtatgcgtactggttgttgagctgggaaaccgtggcccaggcagtggtcactacagcctgattggtcctccaggtcagaacggtgccccacagtggtcagtccccagccctgtgggcccccacctccatcgcccagccttttattacacactctgagagtgtctccaatgcctgtctgacaaagacagtcccagcccattctcctgtctggctgggttgggtgcaagcaggctctgaatgcctggcatttcagctgcatcacctcccagctccttattgcccaaatagagagggtggccctggctcccctccgagcaactctgcatttaattttgtaatctgggaagtgcctggttttgaaaatccgctttctctcactcttcccctccttccttgcccctggctgctctagtgttctgtctcccagtcacctcgctctcccagcaccagtgcccttctcctgctcccagatactctttcctttcctctctcctgttttccttcctctgctatctctcacacctctcccagactatgtcatcttgttctcctgcctgggttcaaactctgcatccttctctaacaacgtgactacctcatgtctgcttcaaggcccccgtgcccttcctgtatccgcggctgccgcgcactcgcctgccatcctcctgcctcctcttcactcagtgcttctgcttgccctgccccaggcagcccacccacgcccagtgcgggtgtggagaagatcttctggcttccctgcatcttgcctttgggattgggatccaagggttctccatggatggatccaagtcatagaggggaatgtttgagacagggaagggggctgtgatccagaggctcagaataaaaagatgccctcccttctatgcaggggggcaagtttactggatggagatgatttgggcctctcttccagaagaagctaaaggaagagaaggggagtgagagttcagggaggcccttcccaccctgtgaggcttgacttgatctggattggggatgacaggaatctcaccctctggggtgctggcaaggaggtctttgcacaggaaaaggggtagctcatttcagtttgttttttctttaaattgaatcctcaagtcattttctgttcacctgccgcacagggacaagcttgacttctattttctgtgtagtgaaaacaatgtcatttatttggtttttcacctcagccctctcataggagcatagaatgttagggtctttactccctaatgatgtctgattggcacatcaagagttaactctgccttctgggccaaattcgaaataaccagtccatttttccttttttttttttttttttttaaatggtggaatgtctctcagcacagttgcggcttcctcaaaccctgaaagcatctgtgtttattatactcgggtgtcactcactgttgatgtctgcacctacgtttccacctcctccccctccttcagccagcctatgataacactaaagattattaatgttggttttgtatctcgttaaagacagaattgtcacttgtagtatttctgtagcattcagcgctgctgtggctaacaccactgtgtatgtttcatcattgctctgaaggtcaaaagcctcattttattttgctggtttgattttttttttttaaagaagaaaaaaaaactgccctgaattaaatggctgttttaacagtaggctcttagcattataccacatagtcatttttcatgttcttgtttaacaggcactgaggttctggtttaaattaaatagctgcaaatgagacaatttataacccattaggttgggtggaaaattgtttctcaaaagcaaataagtaataaatctggtatctgcctataactcacagttgataagaaagtggccatttctcactagcactatatatgatttgggctctgggtaatttggaagtgttaggtttgtgtctttgtagcagtatttttattagaaaagaatctattggccttttacagggtattaatccctttgtcacctaccattgatgccttaagttttctgagtctcaattaaaaatcttccttttcttgatgcatgacaagtgtaatcagtacttgctcatttatttgtctgtatttagtttatgctgtactatttaattatccttccagcgttttttttttctccttacaaatatgatactctttagtgttaagctaaggcattgattcatgtatctgtccttataatgaattaataaactattttccag

SEQ ID NO: 9748 - DNA, 5544 bp, Homo sapiens
  source 1..5544: mol_type = unassigned DNA
agcaatatttaggggaggctgaggaggcctggggacagttttgggagagaaagagaatggtcgttgtggggctggggtaaatggggagaagaaagggtaggtctgcgctgagccggagtagtttggaaagggtgaatcagggagaggttaaagtgattggaaggggagcgagggagggcggtggggggcaggcttggggtactggggggggggcagagaccttagttgcgggatcccgcgctcagcgtcgcccctcgcgcccctagcggctcccgccatcactcaggcgcccgaggcgctgtcgcggacgcgggcgagcacagcgcgcttcgtgtgccgcgcgtcgggggagccgcggccagcgctgcgctggctgcacaacggggcgccgctgcggcccaacgggcgcgtcaaggtccagggcggcggtggcagcctggtcatcacacagatcggcctgcaggacgccggctactaccagtgcgtggctgagaacagcgcgggaatggcgtgcgctgccgcgtcgctggccgtggtggtgcgcgaggggctgcccagcgcccccacgcgggtcactgctacgccactgagcagctccgctgtgttggtggcctgggagcggcccgagatgcacagcgagcagatcatcggcttctctctccactaccagaaggcacggggcatggacaatgtggaataccagtttgcagtgaacaacgacaccacagaactacaggttcgggacctggaacccaacacagattatgagttctacgtggtggcctactcccagctgggagccagccgcacctccaccccagcactggtgcacacactggatgatgtccccagtgcagcaccccagctctccctgtccagccccaacccttcggacatcagggtggcgtggctgcccctgccccccagcctgagcaatgggcaggtggtgaagtacaagatagaatacggtttgggaaaggaagatcagattttctctactgaggtgcgaggaaatgagacacagcttatgctgaactcgcttcagccaaacaaggtgtatcgagtacggatttcggctggtacagcagccggcttcggggccccctcccagtggatgcatcacaggacgcccagtatgcacaaccagagccatgtcccttttgcccctgcagagttgaaggtgcaggcaaagatggagtccctggtcgtgtcatggcagccaccccctcaccccacccagatctctggctacaaactatattggcgggaggtgggggctgaggaggaggccaatggcgatcgcctgccagggggccgtggagaccaggcttgggatgtggggcctgtccggctcaagaagaaagtgaagcagtatgagctgacccagctagtccctggccggctgtacgaggtgaagctcgtggctttcaacaaacatgaggatggctatgcagcagtgtggaagggcaagacggagaaggcgccggcaccagacatgcctatccagaggggaccacccctgcctccagcccacgtccatgcggaatcaaacagctccacatccatctggcttcggtggaaaaagccagatttcaccacagtcaagattgtcaactacactgtgcgcttcagcccctgggggctcaggaatgcctccctggtcacctattacaccagttctggagaagacatcctcattggcggcttgaagccattcaccaaatacgagtttgcagtgcagtctcacggcgtggacatggatgggcctttcggctctgtggtggagcgctccaccctgcctgaccggccctccacacccccatccgacctgcgactgagccccctgacaccgtccacggttcggctgcactggtgcccccccacagagcccaacggggagatcgtggagtatctgatcctgtacagcagcaaccacacgcagcctgagcaccagtggaccttgctcaccacgcagggaaacatcttcagtgctgaggtccatggcctggagagcgacactcggtacttcttcaagatgggggcgcgcacagaggtgggacctgggcctttctcccgcctgcaggatgtgatcacgctccaggagaagctgtcagactcgctggacatgcactcagtcacgggcatcatcgtgggtgtctgcctgggcctcctctgcctcctggcctgcatgtgtgctggcctgcgccgcagcccccacagggaatccctcccaggcctgtcctccaccgccacccccgggaatcccgcgctgtactccagagctcggcttggcccccccagccccccagctgcccatgaattggagtcccttgtgcacccccatccccaggactggtccccgccaccctcagacgtggaggacagggctgaagtgcacagccttatgggtggcggtgtttctgaaggccggagtcactccaaaagaaagatctcctgggctcaaccaagcgggctgagctgggctggttcctgggcaggctgtgagctgccccaggcaggcccccggccggctctgacccgggccctgctgccccctgctggaactgggcagacgctgttgctgcaggctctggtgtacgacgccataaagggcaatgggaggaagaagtcacccccagcctgcaggaaccaggtggaggctgaagtcattgtccactctgactttagtgcatctaacgggaaccctgacctccatctccaagacctggagcctgaggaccccctgcctccagaggctcctgatctcatctcgggtgttggggatccagggcagggggcagcctggctggacagggagttgggagggtgtgagctggcagcccccgggccagacagacttacctgcttgccagaggcagccagtgcttcctgctcctacccggacctccagccaggcgaggtgctagaggagacccctggagatagctgccagctcaaatccccctgccctctaggagccagcccaggcctgcccagatccccggtctcctcctctgcctagctcttcccagaggatgtggtttggggcaggcaggtatggatcacataggatgcgatacctgtggccgtgtatgtccacatgtgtgcctgtagatacatcatcaagccctttggagcttcctaagttgctttggctgaggggagaggaaaacatggattattcactccccccatactctttgtgatacacatgtgacatgtgaaagacatacgagacatagctacatgtgatgtgcacatgtgtgaagtgcatgtatgcgtactggttgttgagctgggaaaccgtggcccaggcagtggtcactacagcctgattggtcctccaggtcagaacggtgccccacagtggtcagtccccagccctgtgggcccccacctccatcgcccagccttttattacacactctgagagtgtctccaatgcctgtctgacaaagacagtcccagcccattctcctgtctggctgggttgggtgcaagcaggctctgaatgcctggcatttcagctgcatcacctcccagctccttattgcccaaatagagagggtggccctggctcccctccgagcaactctgcatttaattttgtaatctgggaagtgcctggttttgaaaatccgctttctctcactcttcccctccttccttgcccctggctgctctagtgttctgtctcccagtcacctcgctctcccagcaccagtgcccttctcctgctcccagatactctttcctttcctctctcctgttttccttcctctgctatctctcacacctctcccagactatgtcatcttgttctcctgcctgggttcaaactctgcatccttctctaacaacgtgactacctcatgtctgcttcaaggcccccgtgcccttcctgtatccgcggctgccgcgcactcgcctgccatcctcctgcctcctcttcactcagtgcttctgcttgccctgccccaggcagcccacccacgcccagtgcgggtgtggagaagatcttctggcttccctgcatcttgcctttgggattgggatccaagggttctccatggatggatccaagtcatagaggggaatgtttgagacagggaagggggctgtgatccagaggctcagaataaaaagatgccctcccttctatgcaggggggcaagtttactggatggagatgatttgggcctctcttccagaagaagctaaaggaagagaaggggagtgagagttcagggaggcccttcccaccctgtgaggcttgacttgatctggattggggatgacaggaatctcaccctctggggtgctggcaaggaggtctttgcacaggaaaaggggtagctcatttcagtttgttttttctttaaattgaatcctcaagtcattttctgttcacctgccgcacagggacaagcttgacttctattttctgtgtagtgaaaacaatgtcatttatttggtttttcacctcagccctctcataggagcatagaatgttagggtctttactccctaatgatgtctgattggcacatcaagagttaactctgccttctgggccaaattcgaaataaccagtccatttttccttttttttttttttttttttaaatggtggaatgtctctcagcacagttgcggcttcctcaaaccctgaaagcatctgtgtttattatactcgggtgtcactcactgttgatgtctgcacctacgtttccacctcctccccctccttcagccagcctatgataacactaaagattattaatgttggttttgtatctcgttaaagacagaattgtcacttgtagtatttctgtagcattcagcgctgctgtggctaacaccactgtgtatgtttcatcattgctctgaaggtcaaaagcctcattttattttgctggtttgattttttttttttaaagaagaaaaaaaaactgccctgaattaaatggctgttttaacagtaggctcttagcattataccacatagtcatttttcatgttcttgtttaacaggcactgaggttctggtttaaattaaatagctgcaaatgagacaatttataacccattaggttgggtggaaaattgtttctcaaaagcaaataagtaataaatctggtatctgcctataactcacagttgataagaaagtggccatttctcactagcactatatatgatttgggctctgggtaatttggaagtgttaggtttgtgtctttgtagcagtatttttattagaaaagaatctattggccttttacagggtattaatccctttgtcacctaccattgatgccttaagttttctgagtctcaattaaaaatcttccttttcttgatgcatgacaagtgtaatcagtacttgctcatttatttgtctgtatttagtttatgctgtactatttaattatccttccagcgttttttttttctccttacaaatatgatactctttagtgttaagctaaggcattgattcatgtatctgtccttataatgaattaataaactattttccag

SEQ ID NO: 9749 - DNA, 469 bp, Homo sapiens
  source 1..469: mol_type = unassigned DNA
gccacccccgggaatcccgcgctgtactccagagctcggcttggcccccccagccccccagctgcccatgaattggagtcccttgtgcacccccatccccaggactggtccccgccaccctcagacgtggaggacagggctgaagtgcacagccttatgggtggcggtgtttctgaaggccggagtcactccaaaagaaagatctcctgggctcaaccaagcgggctgagctgggctggttcctgggcaggctgtgagctgccccaggcaggcccccggccggctctgacccgggccctgctgccccctgctggaactgggcagacgctgttgctgcaggctctggtgtacgacgccataaaggtcagcgtcctggaaggaaggggcaggaaaggaggaaagggtctctgtgcttgtgaagaggaagtaatgagttctctggagacccctgggtggtaactttcctggg

SEQ ID NO: 9750 - DNA, 539 bp, Homo sapiens
  source 1..539: mol_type = unassigned DNA
atgcactcagtcacgggcatcatcgtgggtgtctgcctgggcctcctctgcctcctggcctgcatgtgtgctggcctgcgccgcagcccccacagggaatccctcccaggcctgtcctccaccgccacccccgggaatcccgcgctgtactccagagctcggcttggcccccccagccccccagctgcccatgaattggagtcccttgtgcacccccatccccaggactggtccccgccaccctcagacgtggaggacagggctgaagtgcacagccttatgggtggcggtgtttctgaaggccggagtcactccaaaagaaaggtaagtcagagccccacattgcggctcttttctaaataggacaccagggggcgacagagcacaacgcgtggctatgcgagcatggctctacctcctcttcggagccggctgcggacgctagggcctctctccctcctccacggaatggttggctgtcagggaagcacatgggcctccatatcccggcggaataggtcagcttggttctcacgaag

SEQ ID NO: 9751 - DNA, 578 bp, Homo sapiens
  source 1..578: mol_type = unassigned DNA
attcgtgcctagcccacggccccctcggagtgctggccagccagactgctgtcgtcaagcttgccagtctcttcctggtattgtctatcctcattcttgggtattccataatcttcccgcttcttctccactcccctgttccttctgcttttctttccctttgagtcctagagtctgggcttgtgctgtcctccagggagcctgccagagtgccccctttgtgtcagaggcacaaagctgcctcctaagggagctcctgcctgcacggcaggtggaacatgtggagccaaaccccacgctccagccttaccccttagggggctctcaggaggcacagatcaccatgaagtaactttcaggccagaagaagtgtgcatcttactgtatagtttgaccatcatgatgatgttgggcaggggggctttggaattcattctgctggcagtatctgaccgctaatcaccacttcttgttgtgtctccctcggtctgaattggctctgctgtgtgtttctgtgactgtgtgtttctgtgtctccatgcggatgtgtttcactgtttgtgcttgctgtggcttct

SEQ ID NO: 9752 - DNA, 5585 bp, Homo sapiens
  source 1..5585: mol_type = unassigned DNA
gcctgctctccggcggagctgcgtgaggcccggccggccccggccccccccttccggccgcccccgcctcctggcccacgcctgcccgcgctctgcccaccagcgcctccatcgggcaaggcggccccgcgtcgacgccgcccgctgcctcgctgctgactcccgtcccgggcgccgtccgcggggtcgcgctccgccgggcctgcggattccccgccgcctcctcttcatctacctcaactccccccatccccgcttcgcccgaggaggcggttccccccgcaggcagtccggctcgcaggccgccggcgttgtcacccccccccgcgctccccctccagccctccccccggcgcgcagcctcgggccgctcccctttccgcgctgcgtcccggagcggccccggtgccgccaccgcctgtccccctcccgaggcccgggctcgcgacggcagagggctccgtcggcccaaaccgagctgggcgcccgcggtccgggtgcagcctccactccgccccccagtcaccgcctcccccggcccctcgacgtggcgcccttccctccgcttctctgtgctccccgcgcccctcttggcgtctggccccggcccccgctctttctcccgcaaccttcccttcgctccctcccgtcccccccagctcctagcctccgactccctccccccctcacgcccgccctctcgccttcgccgaaccaaagtggattaattacacgctttctgtttctctccgtgctgttctctcccgctgtgcgcctgcccgcctctcgctgtcctctctccccctcgccctctcttcggcccccccctttcacgttcactctgtctctcccactatctctgcccccctctatccttgatacaacagctgacctcatttcccgataccttttcccccccgaaaagtacaacatctggcccgccccagcccgaagacagcccgtcctccctggacaatcagacgaattctccccccccccccaaaaaaaagccatccccccgctctgccccgtcgcacattcggcccccgcgactcggccagagcggcgctggcagaggagtgtccggcaggagggccaacgcccgctgttcggtttgcgacacgcagcagggaggtgggcggcagcgtcgccggcttccagacaccaatgggaatcccaatggggaagtcgatgctggtgcttctcaccttcttggccttcgcctcgtgctgcattgctgcttaccgccccagtgagaccctgtgcggcggggagctggtggacaccctccagttcgtctgtggggaccgcggcttctacttcagcaggcccgcaagccgtgtgagccgtcgcagccgtggcatcgttgaggagtgctgtttccgcagctgtgacctggccctcctggagacgtactgtgctacccccgccaagtccgagagggacgtgtcgacccctccgaccgtgcttccggacaacttccccagataccccgtgggcaagttcttccaatatgacacctggaagcagtccacccagcgcctgcgcaggggcctgcctgccctcctgcgtgcccgccggggtcacgtgctcgccaaggagctcgaggcgttcagggaggccaaacgtcaccgtcccctgattgctctacccacccaagaccccgcccacgggggcgcccccccagagatggccagcaatcggaagtgagcaaaactgccgcaagtctgcagcccggcgccaccatcctgcagcctcctcctgaccacggacgtttccatcaggttccatcccgaaaatctctcggttccacgtccccctggggcttctcctgacccagtccccgtgccccgcctccccgaaacaggctactctcctcggccccctccatcgggctgaggaagcacagcagcatcttcaaacatgtacaaaatcgattggctttaaacacccttcacataccctccccccaaattatccccaattatccccacacataaaaaatcaaaacattaaactaacccccttcccccccccccacaacaaccctcttaaaactaattggctttttagaaacaccccacaaaagctcagaaattggctttaaaaaaaacaaccaccaaaaaaaatcaattggctaaaaaaaaaaagtattaaaaacgaattggctgagaaacaattggcaaaataaaggaatttggcactccccacccccctctttctcttctcccttggactttgagtcaaattggcctggacttgagtccctgaaccagcaaagagaaaagaaggaccccagaaatcacaggtgggcacgtcgctgctaccgccatctcccttctcacgggaattttcagggtaaactggccatccgaaaatagcaacaacccagactggctcctcactcccttttccatcactaaaaatcacagagcagtcagagggacccagtaagaccaaaggaggggaggacagagcatgaaaaccaaaatccatgcaaatgaaatgtaattggcacgaccctcacccccaaatcttacatctcaattcccatcctaaaaagcactcatactttatgcatccccgcagctacacacacacaacacacagcacacgcatgaacacagcacacacacgagcacagcacacacacaaacgcacagcacacacagcacacagatgagcacacagcacacacacaaacgcacagcacacacacgcacacacatgcacacacagcacacaaacgcacggcacacacacgcacacacatgcacacacagcacacacacaaacgcacagcacacacaaacgcacagcacacacgcacacacagcacacacacgagcacacagcacacaaacgcacagcacacgcacacacatgcacacacagcacacacactagcacacagcacacacacaaagacacagcacacacatgcacacacagcacacacacgcgaacacagcacacacgaacacagcacacacagcacacacacaaacacagcacacacatgcacacagcacacgcacacacagcacacacatgaacacagcacacagcacacacatgcacacacagcacacacgcatgcacagcacacatgaacacagcacacacacaaacacacagcacacacatgcacacacagcacacacactcatgcgcagcacatacatgaacacagctcacagcacacaaacacgcagcacacacgttgcacacgcaagcacccacctgcacacacacatgcgcacacacacgcacacccccacaaaattggatgaaaacaataagcatatctaagcaactacgatatctgtatggatcaggccaaagtcccgctaagattctccaatgttttcatggtctgagccccgctcctgttcccatctccactgcccctcggccctgtctgtgccctgcctctcagaggagggggctcagatggtgcggcctgagtgtgcggccggcggcatttgggatacacccgtagggtgggcggggtgtgtcccaggcctaattccatctttccaccatgacagagatgcccttgtgaggctggcctccttggcgcctgtccccacggcccccgcagcgtgagccacgatgctccccataccccacccattcccgatacaccttacttactgtgtgttggcccagccagagtgaggaaggagtttggccacattggagatggcggtagctgagcagacatgcccccacgagtagcctgactccctggtgtgctcctggaaggaagatcttggggacccccccaccggagcacacctagggatcatctttgcccgtctcctggggaccccccaagaaatgtggagtcctcgggggccgtgcactgatgcggggagtgtgggaagtctggcggttggaggggtgggtggggggcagtgggggctgggcggggggagttctggggtaggaagtggtcccgggagattttggatggaaaagtcaggaggattgacagcagacttgcagaattacatagagaaattaggaacccccaaatttcatgtcaattgatctattccccctctttgtttcttggggcatttttccttttttttttttttttgttttttttttacccctccttagctttatgcgctcagaaaccaaattaaaccccccccccatgtaacaggggggcagtgacaaaagcaagaacgcacgaagccagcctggagaccaccacgtcctgccccccgccatttatcgccctgattggattttgtttttcatctgtccctgttgcttgggttgagttgagggtggagcctcctggggggcactggccactgagcccccttggagaagtcagaggggagtggagaaggccactgtccggcctggcttctggggacagtggctggtccccagaagtcctgagggcggaggggggggttgggcagggtctcctcaggtgtcaggagggtgctcggaggccacaggagggggctcctggctggcctgaggctggccggaggggaaggggctagcaggtgtgtaaacagagggttccatcaggctggggcagggtggccgccttccgcacacttgaggaaccctcccctctccctcggtgacatcttgcccgcccctcagcaccctgccttgtctccaggaggtccgaagctctgtgggacctcttgggggcaaggtggggtgaggccggggagtagggaggtcaggcgggtctgagcccacagagcaggagagctgccaggtctgcccatcgaccaggttgcttgggccccggagcccacgggtctggtgatgccatagcagccaccaccgcggcgcctagggctgcggcagggactcggcctctgggaggtttacctcgcccccacttgtgcccccagctcagcccccctgcacgcagcccgactagcagtctagaggcctgaggcttctgggtcctggtgacggggctggcatgaccccgggggtcgtccatgccagtccgcctcagtcgcagagggtccctcggcaagcgccctgtgagtgggccattcggaacattggacagaagcccaaagagccaaattgtcacaattgtggaacccacattggcctgagatccaaaacgcttcgaggcaccccaaattacctgcccattcgtcaggacacccacccacccagtgttatattctgcctcgccggagtgggtgttcccgggggcacttgccgaccagccccttgcgtccccaggtttgcagctctcccctgggccactaaccatcctggcccgggctgcctgtctgacctccgtgcctagtcgtggctctccatcttgtctcctccccgtgtccccaatgtcttcagtggggggccccctcttgggtcccctcctctgccatcacctgaagacccccacgccaaacactgaatgtcacctgtgcctgccgcctcggtccaccttgcggcccgtgtttgactcaactcaactcctttaacgctaatatttccggcaaaatcccatgcttgggttttgtctttaaccttgtaacgcttgcaatcccaataaagcattaaaagtcatgatcttc

SEQ ID NO: 9753 - DNA, 1583 bp, Homo sapiens
  source 1..1583: mol_type = unassigned DNA
cactgcagcttccccaaccccgcgcacagcgggcactggtttcgggcctctctgtctcctacgaagtccccagagcaactcggatttgggaaatttctctctagcgttgcccaaacacacttgggtcggccgcgcgccctcaggacgtggacagggagggcttccccgtgtccaggaaagcgaccgggcattgcccccagtctcccccaaatttgggcattgtccccgggtcttccaacggactgggcgttgctcccggacactgaggactggccccggggtctcgctcaccttcagcagcgtccaccgcctgccacagagcgttcgatcgctcgctgcctgagctcctggtgcgcccgcggacgcagcctccagcttcgcggagatggtttccccagacccccaaattatcgtggtggcccccgagaccgaactcgcgtctatgcaagtccaacgcactgaggacggggtaaccattatccagatattttgggtgggccgcaaaggcgagctacttagacgcaccccggtgagctcggccatgcagacaccaatgggaatcccaatggggaagtcgatgctggtgcttctcaccttcttggccttcgcctcgtgctgcattgctgcttaccgccccagtgagaccctgtgcggcggggagctggtggacaccctccagttcgtctgtggggaccgcggcttctacttcagcaggcccgcaagccgtgtgagccgtcgcagccgtggcatcgttgaggagtgctgtttccgcagctgtgacctggccctcctggagacgtactgtgctacccccgccaagtccgagagggacgtgtcgacccctccgaccgtgcttccggacaacttccccagataccccgtgggcaagttcttccaatatgacacctggaagcagtccacccagcgcctgcgcaggggcctgcctgccctcctgcgtgcccgccggggtcacgtgctcgccaaggagctcgaggcgttcagggaggccaaacgtcaccgtcccctgattgctctacccacccaagaccccgcccacgggggcgcccccccagagatggccagcaatcggaagtgagcaaaactgccgcaagtctgcagcccggcgccaccatcctgcagcctcctcctgaccacggacgtttccatcaggttccatcccgaaaatctctcggttccacgtccccctggggcttctcctgacccagtccccgtgccccgcctccccgaaacaggctactctcctcggccccctccatcgggctgaggaagcacagcagcatcttcaaacatgtacaaaatcgattggctttaaacacccttcacataccctccccccaaattatccccaattatccccacacataaaaaatcaaaacattaaactaacccccttcccccccccccacaacaaccctcttaaaactaattggctttttagaaacaccccacaaaagctcagaaattggctttaaaaaaaacaaccaccaaaaaaaatcaattggctaaaaaaaaaaagtattaaaaacgaattggctgagaaacaattggcaaaataaaggaat

SEQ ID NO: 9754 - DNA, 1005 bp, Homo sapiens
  source 1..1005: mol_type = unassigned DNA
aactggacattagcttctcctgtgaaagagacttccagcttcctcctcctcctcttcctcctcctcctcctgccccagcgagccttctgctgagctgtagacaccaatgggaatcccaatggggaagtcgatgctggtgcttctcaccttcttggccttcgcctcgtgctgcattgctgcttaccgccccagtgagaccctgtgcggcggggagctggtggacaccctccagttcgtctgtggggaccgcggcttctacttcagacttccaggcaggcccgcaagccgtgtgagccgtcgcagccgtggcatcgttgaggagtgctgtttccgcagctgtgacctggccctcctggagacgtactgtgctacccccgccaagtccgagagggacgtgtcgacccctccgaccgtgcttccggacaacttccccagataccccgtgggcaagttcttccaatatgacacctggaagcagtccacccagcgcctgcgcaggggcctgcctgccctcctgcgtgcccgccggggtcacgtgctcgccaaggagctcgaggcgttcagggaggccaaacgtcaccgtcccctgattgctctacccacccaagaccccgcccacgggggcgcccccccagagatggccagcaatcggaagtgagcaaaactgccgcaagtctgcagcccggcgccaccatcctgcagcctcctcctgaccacggacgtttccatcaggttccatcccgaaaatctctcggttccacgtccccctggggcttctcctgacccagtccccgtgccccgcctccccgaaacaggctactctcctcggccccctccatcgggctgaggaagcacagcagcatcttcaaacatgtacaaaatcgattggctttaaacacccttcacataccctccccccaaattatccccaattatccccacacataaaaaatcaaaacattaaactaacccccttcccccccccccacaacaaccctcttaaaa

SEQ ID NO: 9755 - DNA, 1023 bp, Homo sapiens
  source 1..1023: mol_type = unassigned DNA
tccccgggtcttccaacggactgggcgttgctcccggacactgaggactggccccggggtctcgctcaccttcagcagcgtccaccgcctgccacagagcgttcgatcgctcgctgcctgagctcctggtgcgcccgcggacgcagcctccagcttcgcgacaccaatgggaatcccaatggggaagtcgatgctggtgcttctcaccttcttggccttcgcctcgtgctgcattgctgcttaccgccccagtgagaccctgtgcggcggggagctggtggacaccctccagttcgtctgtggggaccgcggcttctacttcagcaggcccgcaagccgtgtgagccgtcgcagccgtggcatcgttgaggagtgctgtttccgcagctgtgacctggccctcctggagacgtactgtgctacccccgccaagtccgagagggacgtgtcgacccctccgaccgtgcttccggacaacttccccagataccccgtgggcaagttcttccaatatgacacctggaagcagtccacccagcgcctgcgcaggggcctgcctgccctcctgcgtgcccgccggggtcacgtgctcgccaaggagctcgaggcgttcagggaggccaaacgtcaccgtcccctgattgctctacccacccaagaccccgcccacgggggcgcccccccagagatggccagcaatcggaagtgagcaaaactgccgcaagtctgcagcccggcgccaccatcctgcagcctcctcctgaccacggacgtttccatcaggttccatcccgaaaatctctcggttccacgtccccctggggcttctcctgacccagtccccgtgccccgcctccccgaaacaggctactctcctcggccccctccatcgggctgaggaagcacagcagcatcttcaaacatgtacaaaatcgattggctttaaacacccttcacataccctccccccaaattatccccaattatccccacacataaaaaatcaaaacattaaactaaccc

SEQ ID NO: 9756 - DNA, 934 bp, Homo sapiens
  source 1..934: mol_type = unassigned DNA
ggcactgaccagcctgcaaactggacattagcttctcctgtgaaagagacttccagcttcctcctcctcctcttcctcctcctcctcctgccccagcgagccttctgctgagctacaccaatgggaatcccaatggggaagtcgatgctggtgcttctcaccttcttggccttcgcctcgtgctgcattgctgcttaccgccccagtgagaccctgtgcggcggggagctggtggacaccctccagttcgtctgtggggaccgcggcttctacttcagcaggcccgcaagccgtgtgagccgtcgcagccgtggcatcgttgaggagtgctgtttccgcagctgtgacctggccctcctggagacgtactgtgctacccccgccaagtccgagagggacgtgtcgacccctccgaccgtgcttccggacaacttccccagataccccgtgggcaagttcttccaatatgacacctggaagcagtccacccagcgcctgcgcaggggcctgcctgccctcctgcgtgcccgccggggtcacgtgctcgccaaggagctcgaggcgttcagggaggccaaacgtcaccgtcccctgattgctctacccacccaagaccccgcccacgggggcgcccccccagagatggccagcaatcggaagtgagcaaaactgccgcaagtctgcagcccggcgccaccatcctgcagcctcctcctgaccacggacgtttccatcaggttccatcccgaaaatctctcggttccacgtccccctggggcttctcctgacccagtccccgtgccccgcctccccgaaacaggctactctcctcggccccctccatcgggctgaggaagcacagcagcatcttcaaacatgtacaaaatcgattggctttaaacacccttcacataccctccccccaaattatccc

SEQ ID NO: 9757 - DNA, 4527 bp, Homo sapiens
  source 1..4527: mol_type = unassigned DNA
gcaaactggacattagcttctcctgtgaaagagacttccagcttcctcctcctcctcttcctcctcctcctcctgccccagcgagccttctgctgagctgtagacaccaatgggaatcccaatggggaagtcgatgctggtgcttctcaccttcttggccttcgcctcgtgctgcattgctgcttaccgccccagtgagaccctgtgcggcggggagctggtggacaccctccagttcgtctgtggggaccgcggcttctacttcagcaggcccgcaagccgtgtgagccgtcgcagccgtggcatcgttgaggagtgctgtttccgcagctgtgacctggccctcctggagacgtactgtgctacccccgccaagtccgagagggacgtgtcgacccctccgaccgtgcttccggacaacttccccagataccccgtgggcaagttcttccaatatgacacctggaagcagtccacccagcgcctgcgcaggggcctgcctgccctcctgcgtgcccgccggggtcacgtgctcgccaaggagctcgaggcgttcagggaggccaaacgtcaccgtcccctgattgctctacccacccaagaccccgcccacgggggcgcccccccagagatggccagcaatcggaagtgagcaaaactgccgcaagtctgcagcccggcgccaccatcctgcagcctcctcctgaccacggacgtttccatcaggttccatcccgaaaatctctcggttccacgtccccctggggcttctcctgacccagtccccgtgccccgcctccccgaaacaggctactctcctcggccccctccatcgggctgaggaagcacagcagcatcttcaaacatgtacaaaatcgattggctttaaacacccttcacataccctccccccaaattatccccaattatccccacacataaaaaatcaaaacattaaactaacccccttcccccccccccacaacaaccctcttaaaactaattggctttttagaaacaccccacaaaagctcagaaattggctttaaaaaaaacaaccaccaaaaaaaatcaattggctaaaaaaaaaaagtattaaaaacgaattggctgagaaacaattggcaaaataaaggaatttggcactccccacccccctctttctcttctcccttggactttgagtcaaattggcctggacttgagtccctgaaccagcaaagagaaaagaaggaccccagaaatcacaggtgggcacgtcgctgctaccgccatctcccttctcacgggaattttcagggtaaactggccatccgaaaatagcaacaacccagactggctcctcactcccttttccatcactaaaaatcacagagcagtcagagggacccagtaagaccaaaggaggggaggacagagcatgaaaaccaaaatccatgcaaatgaaatgtaattggcacgaccctcacccccaaatcttacatctcaattcccatcctaaaaagcactcatactttatgcatccccgcagctacacacacacaacacacagcacacgcatgaacacagcacacacacgagcacagcacacacacaaacgcacagcacacacagcacacagatgagcacacagcacacacacaaacgcacagcacacacacgcacacacatgcacacacagcacacaaacgcacggcacacacacgcacacacatgcacacacagcacacacacaaacgcacagcacacacaaacgcacagcacacacgcacacacagcacacacacgagcacacagcacacaaacgcacagcacacgcacacacatgcacacacagcacacacactagcacacagcacacacacaaagacacagcacacacatgcacacacagcacacacacgcgaacacagcacacacgaacacagcacacacagcacacacacaaacacagcacacacatgcacacagcacacgcacacacagcacacacatgaacacagcacacagcacacacatgcacacacagcacacacgcatgcacagcacacatgaacacagcacacacacaaacacacagcacacacatgcacacacagcacacacactcatgcgcagcacatacatgaacacagctcacagcacacaaacacgcagcacacacgttgcacacgcaagcacccacctgcacacacacatgcgcacacacacgcacacccccacaaaattggatgaaaacaataagcatatctaagcaactacgatatctgtatggatcaggccaaagtcccgctaagattctccaatgttttcatggtctgagccccgctcctgttcccatctccactgcccctcggccctgtctgtgccctgcctctcagaggagggggctcagatggtgcggcctgagtgtgcggccggcggcatttgggatacacccgtagggtgggcggggtgtgtcccaggcctaattccatctttccaccatgacagagatgcccttgtgaggctggcctccttggcgcctgtccccacggcccccgcagcgtgagccacgatgctccccataccccacccattcccgatacaccttacttactgtgtgttggcccagccagagtgaggaaggagtttggccacattggagatggcggtagctgagcagacatgcccccacgagtagcctgactccctggtgtgctcctggaaggaagatcttggggacccccccaccggagcacacctagggatcatctttgcccgtctcctggggaccccccaagaaatgtggagtcctcgggggccgtgcactgatgcggggagtgtgggaagtctggcggttggaggggtgggtggggggcagtgggggctgggcggggggagttctggggtaggaagtggtcccgggagattttggatggaaaagtcaggaggattgacagcagacttgcagaattacatagagaaattaggaacccccaaatttcatgtcaattgatctattccccctctttgtttcttggggcatttttccttttttttttttttttgttttttttttacccctccttagctttatgcgctcagaaaccaaattaaaccccccccccatgtaacaggggggcagtgacaaaagcaagaacgcacgaagccagcctggagaccaccacgtcctgccccccgccatttatcgccctgattggattttgtttttcatctgtccctgttgcttgggttgagttgagggtggagcctcctggggggcactggccactgagcccccttggagaagtcagaggggagtggagaaggccactgtccggcctggcttctggggacagtggctggtccccagaagtcctgagggcggaggggggggttgggcagggtctcctcaggtgtcaggagggtgctcggaggccacaggagggggctcctggctggcctgaggctggccggaggggaaggggctagcaggtgtgtaaacagagggttccatcaggctggggcagggtggccgccttccgcacacttgaggaaccctcccctctccctcggtgacatcttgcccgcccctcagcaccctgccttgtctccaggaggtccgaagctctgtgggacctcttgggggcaaggtggggtgaggccggggagtagggaggtcaggcgggtctgagcccacagagcaggagagctgccaggtctgcccatcgaccaggttgcttgggccccggagcccacgggtctggtgatgccatagcagccaccaccgcggcgcctagggctgcggcagggactcggcctctgggaggtttacctcgcccccacttgtgcccccagctcagcccccctgcacgcagcccgactagcagtctagaggcctgaggcttctgggtcctggtgacggggctggcatgaccccgggggtcgtccatgccagtccgcctcagtcgcagagggtccctcggcaagcgccctgtgagtgggccattcggaacattggacagaagcccaaagagccaaattgtcacaattgtggaacccacattggcctgagatccaaaacgcttcgaggcaccccaaattacctgcccattcgtcaggacacccacccacccagtgttatattctgcctcgccggagtgggtgttcccgggggcacttgccgaccagccccttgcgtccccaggtttgcagctctcccctgggccactaaccatcctggcccgggctgcctgtctgacctccgtgcctagtcgtggctctccatcttgtctcctccccgtgtccccaatgtcttcagtggggggccccctcttgggtcccctcctctgccatcacctgaagacccccacgccaaacactgaatgtcacctgtgcctgccgcctcggtccaccttgcggcccgtgtttgactcaactcaactcctttaacgctaatatttccggcaaaatcccatgcttgggttttgtctttaaccttgtaacgcttgcaatcccaataaagcattaaaagtcatgatcttc

SEQ ID NO: 9758 - DNA, 5179 bp, Homo sapiens
  source 1..5179: mol_type = unassigned DNA
cgcctgtccccctcccgaggcccgggctcgcgacggcagagggctccgtcggcccaaaccgagctgggcgcccgcggtccgggtgcagcctccactccgccccccagtcaccgcctcccccggcccctcgacgtggcgcccttccctccgcttctctgtgctccccgcgcccctcttggcgtctggccccggcccccgctctttctcccgcaaccttcccttcgctccctcccgtcccccccagctcctagcctccgactccctccccccctcacgcccgccctctcgccttcgccgaaccaaagtggattaattacacgctttctgtttctctccgtgctgttctctcccgctgtgcgcctgcccgcctctcgctgtcctctctccccctcgccctctcttcggcccccccctttcacgttcactctgtctctcccactatctctgcccccctctatccttgatacaacagctgacctcatttcccgataccttttcccccccgaaaagtacaacatctggcccgccccagcccgaagacagcccgtcctccctggacaatcagacgaattctccccccccccccaaaaaaaagccatccccccgctctgccccgtcgcacattcggcccccgcgactcggccagagcggcgctggcagaggagtgtccggcaggagggccaacgcccgctgttcggtttgcgacacgcagcagggaggtgggcggcagcgtcgccggcttccagacaccaatgggaatcccaatggggaagtcgatgctggtgcttctcaccttcttggccttcgcctcgtgctgcattgctgcttaccgccccagtgagaccctgtgcggcggggagctggtggacaccctccagttcgtctgtggggaccgcggcttctacttcagacttccaggcaggcccgcaagccgtgtgagccgtcgcagccgtggcatcgttgaggagtgctgtttccgcagctgtgacctggccctcctggagacgtactgtgctacccccgccaagtccgagagggacgtgtcgacccctccgaccgtgcttccggacaacttccccagataccccgtgggcaagttcttccaatatgacacctggaagcagtccacccagcgcctgcgcaggggcctgcctgccctcctgcgtgcccgccggggtcacgtgctcgccaaggagctcgaggcgttcagggaggccaaacgtcaccgtcccctgattgctctacccacccaagaccccgcccacgggggcgcccccccagagatggccagcaatcggaagtgagcaaaactgccgcaagtctgcagcccggcgccaccatcctgcagcctcctcctgaccacggacgtttccatcaggttccatcccgaaaatctctcggttccacgtccccctggggcttctcctgacccagtccccgtgccccgcctccccgaaacaggctactctcctcggccccctccatcgggctgaggaagcacagcagcatcttcaaacatgtacaaaatcgattggctttaaacacccttcacataccctccccccaaattatccccaattatccccacacataaaaaatcaaaacattaaactaacccccttcccccccccccacaacaaccctcttaaaactaattggctttttagaaacaccccacaaaagctcagaaattggctttaaaaaaaacaaccaccaaaaaaaatcaattggctaaaaaaaaaaagtattaaaaacgaattggctgagaaacaattggcaaaataaaggaatttggcactccccacccccctctttctcttctcccttggactttgagtcaaattggcctggacttgagtccctgaaccagcaaagagaaaagaaggaccccagaaatcacaggtgggcacgtcgctgctaccgccatctcccttctcacgggaattttcagggtaaactggccatccgaaaatagcaacaacccagactggctcctcactcccttttccatcactaaaaatcacagagcagtcagagggacccagtaagaccaaaggaggggaggacagagcatgaaaaccaaaatccatgcaaatgaaatgtaattggcacgaccctcacccccaaatcttacatctcaattcccatcctaaaaagcactcatactttatgcatccccgcagctacacacacacaacacacagcacacgcatgaacacagcacacacacgagcacagcacacacacaaacgcacagcacacacagcacacagatgagcacacagcacacacacaaacgcacagcacacacacgcacacacatgcacacacagcacacaaacgcacggcacacacacgcacacacatgcacacacagcacacacacaaacgcacagcacacacaaacgcacagcacacacgcacacacagcacacacacgagcacacagcacacaaacgcacagcacacgcacacacatgcacacacagcacacacactagcacacagcacacacacaaagacacagcacacacatgcacacacagcacacacacgcgaacacagcacacacgaacacagcacacacagcacacacacaaacacagcacacacatgcacacagcacacgcacacacagcacacacatgaacacagcacacagcacacacatgcacacacagcacacacgcatgcacagcacacatgaacacagcacacacacaaacacacagcacacacatgcacacacagcacacacactcatgcgcagcacatacatgaacacagctcacagcacacaaacacgcagcacacacgttgcacacgcaagcacccacctgcacacacacatgcgcacacacacgcacacccccacaaaattggatgaaaacaataagcatatctaagcaactacgatatctgtatggatcaggccaaagtcccgctaagattctccaatgttttcatggtctgagccccgctcctgttcccatctccactgcccctcggccctgtctgtgccctgcctctcagaggagggggctcagatggtgcggcctgagtgtgcggccggcggcatttgggatacacccgtagggtgggcggggtgtgtcccaggcctaattccatctttccaccatgacagagatgcccttgtgaggctggcctccttggcgcctgtccccacggcccccgcagcgtgagccacgatgctccccataccccacccattcccgatacaccttacttactgtgtgttggcccagccagagtgaggaaggagtttggccacattggagatggcggtagctgagcagacatgcccccacgagtagcctgactccctggtgtgctcctggaaggaagatcttggggacccccccaccggagcacacctagggatcatctttgcccgtctcctggggaccccccaagaaatgtggagtcctcgggggccgtgcactgatgcggggagtgtgggaagtctggcggttggaggggtgggtggggggcagtgggggctgggcggggggagttctggggtaggaagtggtcccgggagattttggatggaaaagtcaggaggattgacagcagacttgcagaattacatagagaaattaggaacccccaaatttcatgtcaattgatctattccccctctttgtttcttggggcatttttccttttttttttttttttgttttttttttacccctccttagctttatgcgctcagaaaccaaattaaaccccccccccatgtaacaggggggcagtgacaaaagcaagaacgcacgaagccagcctggagaccaccacgtcctgccccccgccatttatcgccctgattggattttgtttttcatctgtccctgttgcttgggttgagttgagggtggagcctcctggggggcactggccactgagcccccttggagaagtcagaggggagtggagaaggccactgtccggcctggcttctggggacagtggctggtccccagaagtcctgagggcggaggggggggttgggcagggtctcctcaggtgtcaggagggtgctcggaggccacaggagggggctcctggctggcctgaggctggccggaggggaaggggctagcaggtgtgtaaacagagggttccatcaggctggggcagggtggccgccttccgcacacttgaggaaccctcccctctccctcggtgacatcttgcccgcccctcagcaccctgccttgtctccaggaggtccgaagctctgtgggacctcttgggggcaaggtggggtgaggccggggagtagggaggtcaggcgggtctgagcccacagagcaggagagctgccaggtctgcccatcgaccaggttgcttgggccccggagcccacgggtctggtgatgccatagcagccaccaccgcggcgcctagggctgcggcagggactcggcctctgggaggtttacctcgcccccacttgtgcccccagctcagcccccctgcacgcagcccgactagcagtctagaggcctgaggcttctgggtcctggtgacggggctggcatgaccccgggggtcgtccatgccagtccgcctcagtcgcagagggtccctcggcaagcgccctgtgagtgggccattcggaacattggacagaagcccaaagagccaaattgtcacaattgtggaacccacattggcctgagatccaaaacgcttcgaggcaccccaaattacctgcccattcgtcaggacacccacccacccagtgttatattctgcctcgccggagtgggtgttcccgggggcacttgccgaccagccccttgcgtccccaggtttgcagctctcccctgggccactaaccatcctggcccgggctgcctgtctgacctccgtgcctagtcgtggctctccatcttgtctcctccccgtgtccccaatgtcttcagtggggggccccctcttgggtcccctcctctgccatcacctgaagacccccacgccaaacactgaatgtcacctgtgcctgccgcctcggtccaccttgcggcccgtgtttgactcaactcaactcctttaacgctaatatttccggcaaaatcccatgcttgggttttgtctttaaccttgtaacgcttgcaatcccaataaagcattaaaagtcatgatcttc

SEQ ID NO: 9759 - DNA, 2322 bp, Homo sapiens
  source 1..2322: mol_type = unassigned DNA
agatgcgagcactgcggctgggcgctgaggatcagccgcttcctgcctggattccacagcttcgcgccgtgtactgtcgccccatccctgcgcgcccagcctgccaagcagcgtgccccggttgcaggcgtcatgcagcgggcgcgaccgctgcaggcgctgctggacggccgcgggctctgcgtcaacgctagtgccgtcagccgcctgcgcgcctacctgctgccagcgccgccagctccaggaaatgctagtgagtcggaggaagaccgcagcgccggcagtgtggagagcccgtccgtctccagcacgcaccgggtgtctgatcccaagttccaccccctccattcaaagataatcatcatcaagaaagggcatgctaaagacagccagcgctacaaagttgactacgagtctcagagcacagatacccagaacttctcctccgagtccaagcgggagacagaatatggtccctgccgtagagaaatggaagacacactgaatcacctgaagttcctcaatgtgctgagtcccaggggtgtacacattcccaactgtgacaagaagggattttataagaaaaagcagtgtcgcccttccaaaggcaggaagcggggcttctgctggtgtgtggataagtatgggcagcctctcccaggctacaccaccaaggggaaggaggacgtgcactgctacagcatgcagagcaagtagacgcctgccgcaaggttaatgtggagctcaaatatgccttattttgcacaaaagactgccaaggacatgaccagcagctggctacagcctcgatttatatttctgtttgtggtgaactgattttttttaaaccaaagtttagaaagaggtttttgaaatgcctatggtttctttgaatggtaaacttgagcatcttttcactttccagtagtcagcaaagagcagtttgaattttcttgtcgcttcctatcaaaatattcagagactcgagcacagcacccagacttcatgcgcccgtggaatgctcaccacatgttggtcgaagcggccgaccactgactttgtgacttaggcggctgtgttgcctatgtagagaacacgcttcacccccactccccgtacagtgcgcacaggctttatcgagaataggaaaacctttaaaccccggtcatccggacatcccaacgcatgctcctggagctcacagccttctgtggtgtcatttctgaaacaagggcgtggatccctcaaccaagaagaatgtttatgtcttcaagtgacctgtactgcttggggactattggagaaaataaggtggagtcctacttgtttaaaaaatatgtatctaagaatgttctagggcactctgggaacctataaaggcaggtatttcgggccctcctcttcaggaatcttcctgaagacatggcccagtcgaaggcccaggatggcttttgctgcggccccgtggggtaggagggacagagagacagggagagtcagcctccacattcagaggcatcacaagtaatggcacaattcttcggatgactgcagaaaatagtgttttgtagttcaacaactcaagacgaagcttatttctgaggataagctctttaaaggcaaagctttattttcatctctcatcttttgtcctccttagcacaatgtaaaaaagaatagtaatatcagaacaggaaggaggaatggcttgctggggagcccatccaggacactgggagcacatagagattcacccatgtttgttgaacttagagtcattctcatgcttttctttataattcacacatatatgcagagaagatatgttcttgttaacattgtatacaacatagccccaaatatagtaagatctatactagataatcctagatgaaatgttagagatgctatatgatacaactgtggccatgactgaggaaaggagctcacgcccagagactgggctgctctcccggaggccaaacccaagaaggtctggcaaagtcaggctcagggagactctgccctgctgcagacctcggtgtggacacacgctgcatagagctctccttgaaaacagaggggtctcaagacattctgcctacctattagcttttctttatttttttaactttttggggggaaaagtatttttgagaagtttgtcttgcaatgtatttataaatagtaaataaagtttttaccattaaaaaaatatctttccctttgttattgaccatctctgggctttgtatcactaattattttattttattatataataattattttattataataaaatcctgaaaggggaaaata

SEQ ID NO: 9760 - DNA, 2262 bp, Homo sapiens
  source 1..2262: mol_type = unassigned DNA
ccagatgcgagcactgcggctgggcgctgaggatcagccgcttcctgcctggattccacagcttcgcgccgtgtactgtcgccccatccctgcgcgcccagcctgccaagcagcgtgccccggttgcaggcgtcatgcagcgggcgcgacccacgctctgggccgctgcgctgactctgctggtgctgctccgcgggccgccggtggcgcgggctggcgcgagctcggcgggcttgggtcccgtggtgcgctgcgagccgtgcgacgcgcgtgcactggcccagtgcgcgcctccgcccgccgtgtgcgcggagctggtgcgcgagccgggctgcggctgctgcctgacgtgcgcactgagcgagggccagccgtgcggcatctacaccgagcgctgtggctccggccttcgctgccagccgtcgcccgacgaggcgcgaccgctgcaggcgctgctggacggccgcgggctctgcgtcaacgctagtgccgtcagccgcctgcgcgcctacctgctgccagcgccgccagctccaggaaatgctagtgagtcggaggaagaccgcagcgccggcagtgtggagagcccgtccgtctccagcacgcaccgggtgtctgatcccaagttccaccccctccattcaaagataatcatcatcaagaaagggcatgctaaagacagccagcgctacaaagttgactacgagtctcagagcacagatacccagaacttctcctccgagtccaagcgggagacagaatatggtccctgccgtagagaaatggaagacacactgaatcacctgaagttcctcaatgtgctgagtcccaggggtgtacacattcccaactgtgacaagaagggattttataagaaaaagcagtgtcgcccttccaaaggcaggaagcggggcttctgctggtgtgtggataagtatgggcagcctctcccaggctacaccaccaaggggaaggaggacgtgcactgctacagcatgcagagcaagtagacgcctgccgcaaggttaatgtggagctcaaatatgccttattttgcacaaaagactgccaaggacatgaccagcagctggctacagcctcgatttatatttctgtttgtggtgaactgattttttttaaaccaaagtttagaaagaggtttttgaaatgcctatggtttctttgaatggtaaacttgagcatcttttcactttccagtagtcagcaaagagcagtttgaattttcttgtcgcttcctatcaaaatattcagagactcgagcacagcacccagacttcatgcgcccgtggaatgctcaccacatgttggtcgaagcggccgaccactgactttgtgacttaggcggctgtgttgcctatgtagagaacacgcttcacccccactccccgtacagtgcgcacaggctttatcgagaataggaaaacctttaaaccccggtcatccggacatcccaacgcatgctcctggagctcacagccttctgtggtgtcatttctgaaacaagggcgtggatccctcaaccaagaagaatgtttatgtcttcaagtgacctgtactgcttggggactattggagaaaataaggtggagtcctacttgtttaaaaaatatgtatctaagaatgttctagggcactctgggaacctataaaggcaggtatttcgggccctcctcttcaggaatcttcctgaagacatggcccagtcgaaggcccaggatggcttttgctgcggccccgtggggtaggagggacagagagacagggagagtcagcctccacattcagaggcatcacaagtaatggcacaattcttcggatgactgcagaaaatagtgttttgtagttcaacaactcaagacgaagcttatttctgaggataagctctttaaaggcaaagctttattttcatctctcatcttttgtcctccttagcacaatgtaaaaaagaatagtaatatcagaacaggaaggaggaatggcttgctggggagcccatccaggacactgggagcacatagagattcacccatgtttgttgaacttagagtcattctcatgcttttctttataattcacacatatatgcagagaagatatgttcttgttaacattgtatacaacatagccccaaatatagtaagatctatactagataatcctagatgaaatgttagagatgctatatgatacaactgtggccatgactgaggaaaggagctcacgcccagagactgggctgct

SEQ ID NO: 9761 - DNA, 583 bp, Homo sapiens
  source 1..583: mol_type = unassigned DNA
ggtgtcatgtgaggctggatgtgggctccaaagtcatagctgtgacattcgcaggcagcggggatgttctcagtcccacatttggcagagaagtcagtcaagaggttctacaagggctggtgtccaccttatactcctagaaacacaaaactgcccccacccccgctttcttggagcaggaagttacacccacacgcatgcacaggcgcacactcagcgggcctaggcacgcatggctcttgtgttgccttagctgaaatttctgttgtgctttctcagcatagcagagtcacgctggcaaaccatcatgcgccctggccaccgacctgacaccagacccaggagcattcacttctctgtcttctgtttctctcccacagtgtcgcccttccaaaggcaggaagcggggcttctgctggtgtgtggataagtatgggcagcctctcccaggctacaccaccaaggggaaggaggacgtgcactgctacagcatgcagagcaagtagacgcctgccgcaaggttaatgtggagctcaaatatgccttattttgcacaaaagactgccaaggacatgaccagcag

SEQ ID NO: 9762 - DNA, 1050 bp, Homo sapiens
  source 1..1050: mol_type = unassigned DNA
gcgctgaggatcagccgcttcctgcctggattccacagcttcgcgccgtgtactgtcgccccatccctgcgcgcccagcctgccaagcagcgtgccccggttgcaggcgtcatgcagcgggcgcgacccacgctctgggccgctgcgctgactctgctggtgctgctccgcgggccgccggtggcgcgggctggcgcgagctcggcgggcttgggtcccgtggtgcgctgcgagccgtgcgacgcgcgtgcactggcccagtgcgcgcctccgcccgccgtgtgcgcggagctggtgcgcgagccgggctgcggctgctgcctgacgtgcgcactgagcgagggccagccgtgcggcatctacaccgagcgctgtggctccggccttcgctgccagccgtcgcccgacgaggcgcgaccgctgcaggcgctgctggacggccgcgggctctgcgtcaacgctagtgccgtcagccgcctgcgcgcctacctgctgccagcgccgccagctccaggtgagccgcccgcgccaggaaatgctagtgagtcggaggaagaccgcagcgccggcagtgtggagagcccgtccgtctccagcacgcaccgggtgtctgatcccaagttccaccccctccattcaaagataatcatcatcaagaaagggcatgctaaagacagccagcgctacaaagttgactacgagtctcagagcacagatacccagaacttctcctccgagtccaagcgggagacagaatatggtccctgccgtagagaaatggaagacacactgaatcacctgaagttcctcaatgtgctgagtcccaggggtgtacacattcccaactgtgacaagaagggattttataagaaaaagcagtgtcgcccttccaaaggcaggaagcggggcttctgctggtgtgtggataagtatgggcagcctctcccaggctacaccaccaaggggaaggaggacgtgcactgctacagcatgcagagcaagtagacgcctgccgcaaggttaatgtggagctcaaatatgccttatttt

SEQ ID NO: 9763 - DNA, 894 bp, Homo sapiens
  source 1..894: mol_type = unassigned DNA
tggagagcccgtccgtctccagcacgcaccgggtgtctgatcccaagttccaccccctccattcaaagataatcatcatcaagaaagggcatgctaaagacagccagcgctacaaagttgactacgagtctcagagcacagatacccagaacttctcctccgagtccaagcgggagacagaatatggtccctgccgtagagaaatggaagacacactgaatcacctgaagttcctcaatgtgctgagtcccaggggtgtacacattcccaactgtgacaagaagggattttataagaaaaagcagtgtcgcccttccaaaggcaggaagcggggcttctgctggtgtgtggataagtatgggcagcctctcccaggctacaccaccaaggggaaggaggacgtgcactgctacagcatgcagagcaagtagacgcctgccgcaaggatacctcacagcacctaagctatcattcatccacacacaaagtgaagattttcaaagttaggctttacccgtgaggtctggaggtccatttatcttcacagagaaaccgttttaatccgcaagaacctgctaaagatacatgtttctaaattaaagatgtgaatgtgagacagctgaaatagctcagttgggagagcatcagtttgaagatgcagctttttttttctgtaaaatatataatgaatattctgttagtctgtggctaatataattttaataaagttaatttaaatctgatagaaaaatgaaattttaaacgataattttagagaatgctattatatccagtcttcttttttcttttaataaatgagggaactattgggggaaaggaataaatacattttctttcattttattaagacaaatttagtaagcagaagaaatt

SEQ ID NO: 9764 - DNA, 810 bp, Homo sapiens
  source 1..810: mol_type = unassigned DNA
gtcggaggaagaccgcagcgccggcagtgtggagagcccgtccgtctccagcacgcaccgggtgtctgatcccaagttccaccccctccattcaaagataatcatcatcaagaaagggcatgctaaagacagccagcgctacaaagttgactacgagtctcagagcacagatacccagaacttctcctccgagtccaagcgggagacagaatatggtccctgccgtagagaaatggaagacacactgaatcacctgaagttcctcaatgtgctgagtcccaggggtgtacacattcccaactgtgacaagaagggattttataagaaaaagcagtgtcgcccttccaaaggcaggaagcggggcttctgctggtgtgtggataagtatgggcagcctctcccaggctacaccaccaaggggaaggaggacgtgcactgctacagcatgcagagcaagtagacgcctgccgcaagggtgagtactcaggaggggcagcctggggctccagggcctcactgtccttggaccagcctcaggggctgggcgtggccactggcccttccccaggcttacagacccaggagctgcagctcagggccagaaagagcaaagcaaataggacagagccctcagaagggtgcagggagagggagaccccatcaacccaaccaaacaagtgtggggaaggaggccggccagtgcacctcagggacactctgctttatctcagatacctcacagcacctaagctatcattcatccacacacaaagtgaagattttcaaagttaggctttacccgtgaggtct

SEQ ID NO: 9765 - DNA, 571 bp, Homo sapiens
  source 1..571: mol_type = unassigned DNA; mol_type = unassigned DNA
gggcgcatcttcagatgcgtatttgtgggcccctggggatataaacagcccagcgggtgtaaattaaaccccgcagtgccttggctccctgagacccaaatgtaagtcagaaatgtcccaagacttcgcctgccaacggaattaaattttagaaagctccacgaggtacacacgaatgcggagcgctgtatgccagtttccccgacaccggctcgccgcagggagacctcaccccgagagcggaaggggaaatgctagtgagtcggaggaagaccgcagcgccggcagtgtggagagcccgtccgtctccagcacgcaccgggtgtctgatcccaagttccaccccctccattcaaagataatcatcatcaagaaagggcatgctaaagacagccagcgctacaaagttgactacgagtctcagagcacagatacccagaacttctcctccgagtccaagcgggagacagaatatggtccctgccgtagagaaatggaagacacactgaatcacctgaagttcctcaatgtgctgagtcccaggggtgtacacattcccaactgtgacaag

SEQ ID NO: 9766 - DNA, 663 bp, Homo sapiens
  source 1..663: mol_type = unassigned DNA; mol_type = unassigned DNA
attctcctcgccccgcacgggggtgcacacggactgcaatcccagggatgcttggggatgggggggatataggcggatttggaccaaggaaggtgggcaggcacgttgtaggaaatagtacctctcttttaaaatactgactttgcacagccttttggtttgcaaagcaatgtctagtcccggtatgtccaaaaacaagtaaagtggattcgggttttgatatcttctgcggttggaaaacctgaagctgaaaaagaagtaacttcttaaggttacccagcggccacaacagagtgtaggtttgaactccgcgtgccactttcagtaccataccattcttacaactcgggccacccctgcacctgcgccgacctcaaacaaacttccaggaaatgctagtgagtcggaggaagaccgcagcgccggcagtgtggagagcccgtccgtctccagcacgcaccgggtgtctgatcccaagttccaccccctccattcaaagataatcatcatcaagaaagggcatgctaaagacagccagcgctacaaagttgactacgagtctcagagcacagatacccagaacttctcctccgagtccaagcgggagacagaatatggtccctgccgtagagaaatggaagacacactgaatcacctgaagtt

SEQ ID NO: 9767 - DNA, 574 bp, Homo sapiens
  source 1..574: mol_type = unassigned DNA; mol_type = unassigned DNA
cttcgctgccagccgtcgcccgacgaggcgcgaccgctgcaggcgctgctggacggccgcgggctctgcgtcaacgctagtgccgtcagccgcctgcgcgcctacctgctgccagcgccgccagctccaggaaatgctagtgagtcggaggaagaccgcagcgccggcagtgtggagagcccgtccgtctccagcacgcaccgggtgtctgatcccaagttccaccccctccattcaaagataatcatcatcaagaaagggcatgctaaagacagccagcgctacaaagttgactacgagtctcagagcacagatacccagaacttctcctccgagtccaagcgggagacagaatatgtgagagcttttcctcttgttaaaggaggagggcaagacctgccaagcctgggtactcagagcctcttgagggcaattcttactcaacaaaccccagcgcctggctgatgggtgggcaacccctagcccctctgtgccctacctctctcctctccttacataaagaatattgacccttttggagaatcttatgaggatcaagctgaaataacactct

SEQ ID NO: 9768 - DNA, 2412 bp, Homo sapiens
  source 1..2412: mol_type = unassigned DNA; mol_type = unassigned DNA
atgcagcgggcgcgacccacgctctgggccgctgcgctgactctgctggtgcgctgcgagccgtgcgacgcgcgtgcactggcccagtgcgcgcctccgcccgccgtgtgcgcggagctggtgcgcgagccgggctgcggctgctgcctgacgtgcgcactgagcgagggccagccgtgcggcatctacaccgagcgctgtggctccggccttcgctgccagccgtcgcccgacgaggcgcgaccgctgcaggcgctgctggacggccgcgggctctgcgtcaacgctagtgccgtcagccgcctgcgcgcctacctgctgccagcgccgccagctccaggaaatgctagtgagtcggaggaagaccgcagcgccggcagtgtggagagcccgtccgtctccagcacgcaccgggtgtctgatcccaagttccaccccctccattcaaagataatcatcatcaagaaagggcatgctaaagacagccagcgctacaaagttgactacgagtctcagagcacagatacccagaacttctcctccgagtccaagcgggagacagaatatggtccctgccgtagagaaatggaagacacactgaatcacctgaagttcctcaatgtgctgagtcccaggggtgtacacattcccaactgtgacaagaagggattttataagaaaaagcagtgtcgcccttccaaaggcaggaagcggggcttctgctggtgtgtggataagtatgggcagcctctcccaggctacaccaccaaggggaaggaggacgtgcactgctacagcatgcagagcaagtagacgcctgccgcaaggttaatgtggagctcaaatatgccttattttgcacaaaagactgccaaggacatgaccagcagctggctacagcctcgatttatatttctgtttgtggtgaactgattttttttaaaccaaagtttagaaagaggtttttgaaatgcctatggtttctttgaatggtaaacttgagcatcttttcactttccagtagtcagcaaagagcagtttgaattttcttgtcgcttcctatcaaaatattcagagactcgagcacagcacccagacttcatgcgcccgtggaatgctcaccacatgttggtcgaagcggccgaccactgactttgtgacttaggcggctgtgttgcctatgtagagaacacgcttcacccccactccccgtacagtgcgcacaggctttatcgagaataggaaaacctttaaaccccggtcatccggacatcccaacgcatgctcctggagctcacagccttctgtggtgtcatttctgaaacaagggcgtggatccctcaaccaagaagaatgtttatgtcttcaagtgacctgtactgcttggggactattggagaaaataaggtggagtcctacttgtttaaaaaatatgtatctaagaatgttctagggcactctgggaacctataaaggcaggtatttcgggccctcctcttcaggaatcttcctgaagacatggcccagtcgaaggcccaggatggcttttgctgcggccccgtggggtaggagggacagagagacagggagagtcagcctccacattcagaggcatcacaagtaatggcacaattcttcggatgactgcagaaaatagtgttttgtagttcaacaactcaagacgaagcttatttctgaggataagctctttaaaggcaaagctttattttcatctctcatcttttgtcctccttagcacaatgtaaaaaagaatagtaatatcagaacaggaaggaggaatggcttgctggggagcccatccaggacactgggagcacatagagattcacccatgtttgttgaacttagagtcattctcatgcttttctttataattcacacatatatgcagagaagatatgttcttgttaacattgtatacaacatagccccaaatatagtaagatctatactagataatcctagatgaaatgttagagatgctatatgatacaactgtggccatgactgaggaaaggagctcacgcccagagactgggctgctctcccggaggccaaacccaagaaggtctggcaaagtcaggctcagggagactctgccctgctgcagacctcggtgtggacacacgctgcatagagctctccttgaaaacagaggggtctcaagacattctgcctacctattagcttttctttatttttttaactttttggggggaaaagtatttttgagaagtttgtcttgcaatgtatttataaatagtaaataaagtttttaccattaaaaaaatatctttccctttgttattgaccatctctgggctttgtatcactaattattttattttattatataataattattttattataataaaatcctgaaagggg

SEQ ID NO: 9769 - DNA, 792 bp, Homo sapiens
  source 1..792: mol_type = unassigned DNA; mol_type = unassigned DNA
atgcagcgggcgcgacccacgctctgggccgcttgcgagccgtgcgacgcgcgtgcactggcccagtgcgcgcctccgcccgccgtgtgcgcggagctggtgcgcgagccgggctgcggctgctgcctgacgtgcgcactgagcgagggccagccgtgcggcatctacaccgagcgctgtggctccggccttcgctgccagccgtcgcccgacgaggcgcgaccgctgcaggcgctgctggacggccgcgggctctgcgtcaacgctagtgccgtcagccgcctgcgcgcctacctgctgccagcgccgccagctccaggaaatgctagtgagtcggaggaagaccgcagcgccggcagtgtggagagcccgtccgtctccagcacgcaccgggtgtctgatcccaagttccaccccctccattcaaagataatcatcatcaagaaagggcatgctaaagacagccagcgctacaaagttgactacgagtctcagagcacagatacccagaacttctcctccgagtccaagcgggagacagaatatggtccctgccgtagagaaatggaagacacactgaatcacctgaagttcctcaatgtgctgagtcccaggggtgtacacattcccaactgtgacaagaagggattttataagaaaaagcagtgtcgcccttccaaaggcaggaagcggggcttctgctggtgtgtggataagtatgggcagcctctcccaggctacaccaccaaggggaaggaggacgtgcactgctacagcatgcagagcaagtag

SEQ ID NO: 9770 - DNA, 6215 bp, Homo sapiens
  source 1..6215: mol_type = unassigned DNA; mol_type = unassigned DNA
ggggaaaagagctaggaaagagctgcaaagcagtgtgggctttttcccttttttgctccttttcattacccctcctccgttttcacccttctccggacttcgcgtagaacctgcgaatttcgaagaggaggtggcaaagtgggagaaaagaggtgttagggtttggggtttttttgtttttgtttttgttttttaatttcttgatttcaacattttctcccaccctctcggctgcagccaacgcctcttacctgttctgcggcgccgcgcaccgctggcagctgagggttagaaagcggggtgtattttagattttaagcaaaaattttaaagataaatccatttttctctcccacccccaacgccatctccactgcatccgatctcattatttcggtggttgcttgggggtgaacaattttgtggctttttttcccctataattctgacccgctcaggcttgagggtttctccggcctccgctcactgcgtgcacctggcgctgccctgcttcccccaacctgttgcaaggctttaattcttgcaactgggacctgctcgcaggcaccccagccctccacctctctctacatttttgcaagtgtctgggggagggcacctgctctacctgccagaaattttaaaacaaaaacaaaaacaaaaaaatctccgggggccctcttggcccctttatccctgcactctcgctctcctgccccaccccgaggtaaagggggcgactaagagaagatggtgttgctcaccgcggtcctcctgctgctggccgcctatgcggggccggcccagagcctgggctccttcgtgcactgcgagccctgcgacgagaaagccctctccatgtgcccccccagccccctgggctgcgagctggtcaaggagccgggctgcggctgctgcatgacctgcgccctggccgaggggcagtcgtgcggcgtctacaccgagcgctgcgcccaggggctgcgctgcctcccccggcaggacgaggagaagccgctgcacgccctgctgcacggccgcggggtttgcctcaacgaaaagagctaccgcgagcaagtcaagatcgagagagactcccgtgagcacgaggagcccaccacctctgagatggccgaggagacctactcccccaagatcttccggcccaaacacacccgcatctccgagctgaaggctgaagcagtgaagaaggaccgcagaaagaagctgacccagtccaagtttgtcgggggagccgagaacactgcccacccccggatcatctctgcacctgagatgagacaggagtctgagcagggcccctgccgcagacacatggaggcttccctgcaggagctcaaagccagcccacgcatggtgccccgtgctgtgtacctgcccaattgtgaccgcaaaggattctacaagagaaagcagtgcaaaccttcccgtggccgcaaacgtggcatctgctggtgcgtggacaagtacgggatgaagctgccaggcatggagtacgttgacggggactttcagtgccacaccttcgacagcagcaacgttgagtgatgcgtccccccccaacctttccctcaccccctcccacccccagccccgactccagccagcgcctccctccaccccaggacgccactcatttcatctcatttaagggaaaaatatatatctatctatttgaggaaactgaggacctcggaatctctagcaagggctcaacttcgaaaatggcaacaacagagatgcaaaaagctaaaaagacaccccccccctttaaatggttttctttttgaggcaagttggatgaacagagaagggaagagaggaagaacgagaggaagagaagggaaggaagtgtttgtgtagaagagagagaaagacgaatagagttaggaaaaggaagacaagcaggtgggcaggaaggacatgcaccgagaccaggcaggggcccaactttcacgtccagccctggcctggggtcgggagaggtgggcgctagaagatgcagcccaggatgtggcaatcaatgacactattggggtttcccaggatggattggtcagggggagaaaggaaaaggcaaaacactccaggacctctcccggatctgtctcctcctctagccagcagtatggacagctggacccctgaacttcctctcctcttacctgggcagagtgttgtctctccccaaatttataaaaactaaaatgcattccattcctctgaaagcaaaacaaattcataattgagtgatattaaatagagaggttttcggaagcagatctgtgaatatgaaatacatgtgcatatttcattccccaggcagacattttttagaaatcaatacatgccccaatattggaaagacttgttcttccacggtgactacagtacatgctgaagcgtgccgtttcagccctcatttaattcaatttgtaagtagcgcagcagcctctgtgggggaggataggctgaaaaaaaaaagtgggctcgtatttatctacaggactccatatagtcatatataggcatataaatctattctttttctttgtttttttctttcttcctttctttcaaaggtttgcattaacttttcaaagtagttcctataggggcattgaggagcttcctcattctgggaaaactgagaaaacccatattctcctaatacaacccgtaatagcatttttgcctgcctcgaggcagagtttcccgtgagcaataaactcagcttttttgtggggcacagtactggatttgacagtgattccccacgtgtgttcatctgcacccaccgagccaggcagaggccagccctccgtggtgcacacagcacgcgcctcagtccatcccattttagtctttaaaccctcaggaagtcacagtctccggacaccacaccacatgagcccaacaggtccacgatggatccaccagtcccaccccagccttttcctttcatctgaacagaatgtgcatttttggaagcctccctcactctccatgctggcagagcaggagggagactgaagtaagagatggcagagggagatggtggcaaaaaggtttagatgcaggagaacagtaagatggatggttccggccagagtcgatgtggggaggaacagagggctgaagggagagggggctgactgttccattctagctttggcacaaagcagcagaaagggggaaaagccaatagaaatttccttagcttccccaccatatgtattttctaggatttgagaggaaagagaggaaaatgggggaatgggttgcaaaatagaaatgagcttaatccaggccgcagagccagggaaggtgagtaactttaggagggtgctagactttagaagccagataggaagaatcagtctaaactggccatgctttggaagggacaagactatgtgctccgctgcccaccttcagcctgcaatgagggactgaggcccacgagtctttccagctcttcctccattctggccagtccctgcatcctccctggggtggaggatggaaggaaagctgggacaagcagggaacgcatgattcagggatgctgtcactcggcagccagattccgaaactcccattctccaatgacttcctcaaccaatgggtggccttgtgactgttctttaaggctgaagatatccaggaaagggggcttggacactggccaaggagaccccttcgtgctgtggacacagctctcttcactctttgctcatggcatgacacagcggagaccgcctccaacaacgaatttggggctacgaagaggaatagcgaaaaagcaaatctgtttcaactgatgggaaccctatagctatagaacttgggggctatctcctatgcccctggacaggacagttggctggggacaggagaagtgctcaatcttcatgagacaaaggggcccgatagggccagcagccacaaggccttgacctgccgagtcagcatgccccatctctctgcacagctgtcccctaaacccaactcacgtttctgtatgtcttaggccagtatcccaaacctcttccacgtcactgttctttccacccattctccctttgcatcttgagcagttatccaactaggatctgccaagtggatactggggtgccactcccctgagaaaagactgagccaggaactacaagctccccccacattcctcccagcctggacctaattcttgagaggggctctctcttcacggactgtgtctggactttgagcaggcttctgccccttgcgttggctctttgctgccagccatcaggtgggggattagagcctggtgtaagtgcgccagactcttccggtttccaaagttcgtgcctgcgaacccaaacctgtgagtctcttctgcatgcaggagtttctcctgggcagctggtcactccccagagaagctgggccttcatggacacatggaactaagcctcccaaatgggagttctggctgagcccagggtggggagatcctgggaagggaggcactggaggaagacggcacctcttcccccatggcagggtgtgagggaggcaggtttggaatggtgcgagtatggcaatctaagcaggggtctggtctctttgactccaggctggcctttggccgactgtctgctcacccagagaccttggactccggactatccatggctccgaatctaagtgctgcccactcccatgctcacacccacagaaggtcttcccatcccctttagattcgtgcctcactccaccagtgaggaagatgcctctgtctttcccacgactgccaggagatagggaagcccagccaggactgaccctccttcctccagcctgccctgacccacctggcaaagcagggcacatggggaggaagagactggaacctttctttgacagccaggcctagacagacaggcctggggacactggccccatgaggggaggaaggcaggcgcacgaggtccagggaggcccttttctgatcatgccccttctctcccaccccatctccccaccaccacctctgtggcctccatggtacccccacagggctggcctcccctagagggtgggcctcaaccacctgctcccgccacgcaccggttagtgagacagggctgccacggcaaccgccaagcccccctcaaggtgggacagtaccccggacccatccactcactcctgagagggctccggcccagaatgggaacctcagagaagagctctaaggagaagaaaccccatagcgtcagagaggatatgtctggcttccaagagaaaggaggctccgttttgcaaagtggaggagggacgagggacaggggtttcaccagccagcaacctgggccttgtactgtctgtgtttttaaaaccactaaagtgcaagaattacattgcactgtttctccactttttattttctcttaggcttttgtttctatttcaaacatactttcttggttttctaatggagtatatagtttagtcatttcacagactctggcctcctctcctgaaatccttttggatggggaaagggaaggtggggagggtccgaggggaaggggaccccagcttccctgtgcccgctcaccccactccaccagtccccggtcgccagccggagtctcctctctaccgccactgtcacaccgtagcccacatggatagcacagttgtcagacaagattccttcagattccgagttgcctaccggttgttttcgttgttgttgttgttgtttttctttttctttttttttttgaagacagcaataaccacagtacatattactgtagttctctatagttttacatacattcataccataactctgttctctcctcttttttgttttcaactttaaaaacaaaaataaacgatgataatctttactggtgaaaaggatggaaaaataaatcaacaaatgcaaccagtttgtgagaaaaaaaaaaaaaagccgaaaaaaaaaaaaaaaacacctgaatgcggaagagctcggctcccgtttagcattttgtacttaaggaaataaaaaaccaacaaaggatctcacattttcttaaaaagtgaagattgctgtatactatttattcaacttataatttatgttactccttgatctttgtcttttgtcatgacaaagcatttatttaataaagttatgcattcagtta

SEQ ID NO: 9771 - DNA, 551 bp, Homo sapiens
  source 1..551: mol_type = unassigned DNA; mol_type = unassigned DNA
atgtgcccccccagccccctgggctgcgagctggtcaaggagccgggctgcggctgctgcatgacctgcgccctggccgaggggcagtcgtgcggcgtctacaccgagcgctgcgcccaggggctgcgctgcctcccccggcaggacgaggagaagccgctgcacgccctgctgcacggccgcggggtttgcctcaacgaaaagagctaccgcgagcaagtcaagatcgagagagactcccgtgagcacgaggagcccaccacctctgagatggccgaggagacctactcccccaagatcttccggcccaaacacacccgcatctccgagctgaaggctgaagcagtgaagaaggaccgcagaaagaagctgacccagtccaagtttgtcgggggagccgagaacactgcccacccccggatcatctctgcacctgagatgagacaggagtctgagcaggtgcatctcggggattccctcattccctcccagcttttgaccttttcctgcatctaaatggacattcatggcggcaggaggtgctagactag

SEQ ID NO: 9772 - DNA, 718 bp, Homo sapiens
  source 1..718: mol_type = unassigned DNA; mol_type = unassigned DNA
agggggcgactaagagaagatggtgttgctcaccgcggtcctcctgctgctggccgcctatgcggggccggcccagagcctgggctccttcgtgcactgcgagccctgcgacgagaaagccctctccatgtgcccccccagccccctgggctgcgagctggtcaaggagccgggctgcggctgctgcatgacctgcgccctggccgaggggcagtcgtgcggcgtctacaccgagcgctgcgcccaggggctgcgctgcctcccccggcaggacgaggagaagccgctgcacgccctgctgcacggccgcggggtttgcctcaacgaaaagagctaccgcgagcaagtcaagatcgggtgtgctccaggagggcagagacacatctgcttcagcctttattactcccctcaccccaaactgcccagccctgggctctggccgtgtgcaccttggcccacgggggctgaccctccggctccttctcctgcagagagagactcccgtgagcacgaggagcccaccacctctgagatggccgaggagacctactcccccaagatcttccggcccaaacacacccgcatctccgagctgaaggctgaagcagtgaagaaggaccgcagaaagaagctgacccagtccaagtttgtcgggggagccgagaacactgcccacccccggatcatctctgcacctgagatgagacaggagtctgag

SEQ ID NO: 9773 - DNA, 3525 bp, Homo sapiens
  source 1..3525: mol_type = unassigned DNA; mol_type = unassigned DNA
gtgcgtcagggagagtggccgtcccgctgttgtaagtggagggacggcagtcagctgaccctgcagtgtgcaggcgagcgcagggagtacgccatgtcctgagaaggggcgattctcaggctctggcagttacagcttctcctcaccctgccgagcaaccaggccacggggctccgtgcatcgccacctagagtgttaccctcttccttgttcacagaggttctccgcagtgtgtgagaaagaggccctctctcaggcaagaagaataaatgtctctggtggaacttttgctctggtggaactgcttttctagaactggtgttgcagcatccctggaagtgtcagagagccctgggagtatccaggtggcccggggtcagccagcagtcctgccctgcactttcactaccagcgctgccctcattaacctcaatgtcatttggatggtcactcctctctccaatgccaaccaacctgaacaggtcatcctgtatcagggtggacagatgtttgatggtgccccccggttccacggtagggtaggatttacaggcaccatgccagctaccaatgtctctatcttcattaataacactcagttatcagacactggcacctaccagtgcctggtcaacaaccttccagacatagggggcaggaacattggggtcaccggtctcacagtgttagttcccccttctgccccacactgccaaatccaaggatcccaggatattggcagcgatgtcatcctgctctgtagctcagaggaaggcattcctcgaccaacttacctttgggagaagttagacaataccctcaaactacctccaacagctactcaggaccaggtccagggaacagtcaccatccggaacatcagtgccctgtcttcaggtttgtaccagtgcgtggcttctaatgctattggaaccagcacctgtcttctggatctccaggttatttcaccccagcccaggaacattggactaatagctggagccattggcactggtgcagttattatcattttttgcattgcactaattttaggggcattcttttactggagaagcaaaaataaagaggaggaagaagaagaaattcctaatgaaataagagaggatgatcttccacccaagtgttcttctgccaaagcatttcacactgagatttcctcctcggacaacaacacactaacctcttccaatgcctacaacagtcgatactggagcaacaatccaaaagttcatagaaacacagagtcagtcagccacttcagtgacttgggccaatctttctctttccactcaggcaatgccaacataccatccatttatgctaatgggacccatctggtcccgggtcaacataagactctggtagtgacagccaacagagggtcatcaccacaggtgatgtccaggagcaatggctcagtcagtaggaagcctcggcctccacacactcattcctacaccatcagccacgcaacactggaacgaattggtgcagtacctgtcatggtaccagcccagagtcgggccgggtccttggtataggacatgaggaaatgttgtgttcagaaatgaataaatggaatgccctcatacaagggggagggtggggtggggagtgctgggaaagaaacacttccttataattatattagtaaaatgcacaaagaagaaggcagtgctgttacttggccactaagatgtgtaaaatggactgaaatgctccatcatgaagacttgcttccccaccaaagatgtcctgggattctgctggatctcaaagatgtgccaagccaaggaaaaagatacaagagcagaatagtacttaaaatccaaactgccgcccagatgggcttgttcttcatgcctaacttaataatttttaagagattaaagtgccagatggagtttaaatattgaaattattttaaaaggtaggtgtctttaagaaaataacaagcaaccctgtgatatgttccgtctctcccaattccctcgttatatagagggcttaatggtataaatggttaatattggtcccaacagggctgactcttctatcatataatcaaaactttttacatgagcaaaattcagtaagaaatgggggaagacaaaggaaacgtctttgagaagccccttcatatttatttatttatctcttcctgaaccatgaatttcatatgtggaatattgctatattgacagattcttgcctgtctgtgttattctaggatctgttacaggtccatggcaattactgtttattttttcctggaaaaatatttttttataaaaggcttttttttttttttaaatacatgagaggcattgggctaagaaagaaaagactgttgtataataccttgttcaatggttgtatttagtgagctcatagaggtccatcatatcatgaccgagctaggttgtgtgggcaggaaggtagggctaaggggttgtagccttgctgggcagcctctcagagcaaggttgttcagatctcccttgctattacagtaggttactattaatgagggcagcacctgatgccttttgtactgaggtatgtaactttctccttatttgacaagtagaagttaacttacttgtcagggagggcagacgtttttttgttctgtttcgtttttcaaaataatgctttttgcaaaagaggtaagactgagactaaaggtgttatcttctggtgtgctcctggaagtgtctaccctacatttgtgtcagctcagggttgcagtgttgcccagatgcattttacatcactgtaaagagattacttttgtggttactacctggcttggctggccttgcggttcaccagattaatttacaaactcccccactttattttgtgctatgtagatctggccatacttgcattagtgactgtcttgccttaaccacacttaagcaacccacaaatttcttctcagatttgtttcctagattacttatgatactcatcccatgtctcaataagagtgtcttttctttctggatgtgttctcttactccctcttaccaccatactttttgctctcttctcctgcaagcgtagtcttcacagggagtggcttcctgacatttttttcagttatgtgaatgaatggaaaccaacagctgctgcaaacactgtttttccaagaaggctacactcagaacctaaccattgccaaccatttcagtattgataaaaagctgaatttactttagcattacttatttttttttccatttgatggttcttactttgtaaaaatttaaataaatgaatgtctatactttttataaagaaaagtgaaaataccatgacactgaaaagatgatgctatcagatgctgtttagaaagcatttatcttgcatttctttattctttctaattatctaaaattcaataaaattttattcatataaaataagttgtcattaattatcaatactaacgagtatgtcattttaaaacttagtattctctttaatgttacaaga

SEQ ID NO: 9774 - DNA, 3495 bp, Homo sapiens
  source 1..3495: mol_type = unassigned DNA; mol_type = unassigned DNA
agttggggggagtggctccccggactgcgcgaggggtcggctagtcctggggcagggctgggtggcacggctggcgagcccggaacgcctctggtcacagctcagcgtccgcggagccgggcggcgctgcagctgcacttggctcgtctgtgggtctgacagtcccagctctgcgcggggaacagcggcccggcgctgggtgtgggaggaccaggctgccccaagagcgcggagactcacgcccgctcctctcctgttgcgaccgggagccgggtaggaggcaggcgcgctccctgcggccccgggatgacttctcagcgttcccctctggcgcctttgctgctcctctctctgcacggtgttgcagcatccctggaagtgtcagagagccctgggagtatccaggtggcccggggtcagccagcagtcctgccctgcactttcactaccagcgctgccctcattaacctcaatgtcatttggatggtcactcctctctccaatgccaaccaacctgaacaggtcatcctgtatcagggtggacagatgtttgatggtgccccccggttccacggtagggtaggatttacaggcaccatgccagctaccaatgtctctatcttcattaataacactcagttatcagacactggcacctaccagtgcctggtcaacaaccttccagacatagggggcaggaacattggggtcaccggtctcacagtgttagttcccccttctgccccacactgccaaatccaaggatcccaggatattggcagcgatgtcatcctgctctgtagctcagaggaaggcattcctcgaccaacttacctttgggagaagttagacaataccctcaaactacctccaacagctactcaggaccaggtccagggaacagtcaccatccggaacatcagtgccctgtcttcaggtttgtaccagtgcgtggcttctaatgctattggaaccagcacctgtcttctggatctccaggttatttcaccccagcccaggaacattggactaatagctggagccattggcactggtgcagttattatcattttttgcattgcactaattttaggggcattcttttactggagaagcaaaaataaagaggaggaagaagaagaaattcctaatgaaataagagaggatgatcttccacccaagtgttcttctgccaaagcatttcacactgagatttcctcctcggacaacaacacactaacctcttccaatgcctacaacagtcgatactggagcaacaatccaaaagttcatagaaacacagagtcagtcagccacttcagtgacttgggccaatctttctctttccactcaggcaatgccaacataccatccatttatgctaatgggacccatctggtcccgggtcaacataagactctggtagtgacagccaacagagggtcatcaccacaggtgatgtccaggagcaatggctcagtcagtaggaagcctcggcctccacacactcattcctacaccatcagccacgcaacactggaacgaattggtgcagtacctgtcatggtaccagcccagagtcgggccgggtccttggtataggacatgaggaaatgttgtgttcagaaatgaataaatggaatgccctcatacaagggggagggtggggtggggagtgctgggaaagaaacacttccttataattatattagtaaaatgcacaaagaagaaggcagtgctgttacttggccactaagatgtgtaaaatggactgaaatgctccatcatgaagacttgcttccccaccaaagatgtcctgggattctgctggatctcaaagatgtgccaagccaaggaaaaagatacaagagcagaatagtacttaaaatccaaactgccgcccagatgggcttgttcttcatgcctaacttaataatttttaagagattaaagtgccagatggagtttaaatattgaaattattttaaaaggtaggtgtctttaagaaaataacaagcaaccctgtgatatgttccgtctctcccaattccctcgttatatagagggcttaatggtataaatggttaatattggtcccaacagggctgactcttctatcatataatcaaaactttttacatgagcaaaattcagtaagaaatgggggaagacaaaggaaacgtctttgagaagccccttcatatttatttatttatctcttcctgaaccatgaatttcatatgtggaatattgctatattgacagattcttgcctgtctgtgttattctaggatctgttacaggtccatggcaattactgtttattttttcctggaaaaatatttttttataaaaggcttttttttttttttaaatacatgagaggcattgggctaagaaagaaaagactgttgtataataccttgttcaatggttgtatttagtgagctcatagaggtccatcatatcatgaccgagctaggttgtgtgggcaggaaggtagggctaaggggttgtagccttgctgggcagcctctcagagcaaggttgttcagatctcccttgctattacagtaggttactattaatgagggcagcacctgatgccttttgtactgaggtatgtaactttctccttatttgacaagtagaagttaacttacttgtcagggagggcagacgtttttttgttctgtttcgtttttcaaaataatgctttttgcaaaagaggtaagactgagactaaaggtgttatcttctggtgtgctcctggaagtgtctaccctacatttgtgtcagctcagggttgcagtgttgcccagatgcattttacatcactgtaaagagattacttttgtggttactacctggcttggctggccttgcggttcaccagattaatttacaaactcccccactttattttgtgctatgtagatctggccatacttgcattagtgactgtcttgccttaaccacacttaagcaacccacaaatttcttctcagatttgtttcctagattacttatgatactcatcccatgtctcaataagagtgtcttttctttctggatgtgttctcttactccctcttaccaccatactttttgctctcttctcctgcaagcgtagtcttcacagggagtggcttcctgacatttttttcagttatgtgaatgaatggaaaccaacagctgctgcaaacactgtttttccaagaaggctacactcagaacctaaccattgccaaccatttcagtattgataaaaagctgaatttactttagcattacttatttttttttccatttgatggttcttactttgtaaaaatttaaataaatgaatgtctatactttttataaagaaaagtgaaaataccatgacactgaaaagatgatgctatcagatgctgtttagaaagcatttatcttgcatttctttattctttctaattatctaaaattcaataaaattttattcatataaaataa

SEQ ID NO: 9775 - DNA, 3320 bp, Homo sapiens
  source 1..3320: mol_type = unassigned DNA; mol_type = unassigned DNA
acagctcagcgtccgcggagccgggcggcgctgcagctgcacttggctcgtctgtgggtctgacagtcccagctctgcgcggggaacagcggcccggcgctgggtgtgggaggaccaggctgccccaagagcgcggagactcacgcccgctcctctcctgttgcgaccgggagccgggtaggaggcaggcgcgctccctgcggccccgggatgacttctcagcgttcccctctggcgcctttgctgctcctctctctgcacggtgttgcagcatccctggaagtgtcagagagccctgggagtatccaggtggcccggggtcagccagcagtcctgccctgcactttcactaccagcgctgccctcattaacctcaatgtcatttggatggtcactcctctctccaatgccaaccaacctgaacaggtcatcctgtatcagggtggacagatgtttgatggtgccccccggttccacggtagggtaggatttacaggcaccatgccagctaccaatgtctctatcttcattaataacactcagttatcagacactggcacctaccagtgcctggtcaacaaccttccagacatagggggcaggaacattggggtcaccggtctcacagtgttagttcccccttctgccccacactgccaaatccaaggatcccaggatattggcagcgatgtcatcctgctctgtagctcagaggaaggcattcctcgaccaacttacctttgggagaagttagacaataccctcaaactacctccaacagctactcaggaccaggtccagggaacagtcaccatccggaacatcagtgccctgtcttcagcccagcccaggaacattggactaatagctggagccattggcactggtgcagttattatcattttttgcattgcactaattttaggggcattcttttactggagaagcaaaaataaagaggaggaagaagaagaaattcctaatgaaataagagaggatgatcttccacccaagtgttcttctgccaaagcatttcacactgagatttcctcctcggacaacaacacactaacctcttccaatgcctacaacagtcgatactggagcaacaatccaaaagttcatagaaacacagagtcagtcagccacttcagtgacttgggccaatctttctctttccactcaggcaatgccaacataccatccatttatgctaatgggacccatctggtcccgggtcaacataagactctggtagtgacagccaacagagggtcatcaccacaggtgatgtccaggagcaatggctcagtcagtaggaagcctcggcctccacacactcattcctacaccatcagccacgcaacactggaacgaattggtgcagtacctgtcatggtaccagcccagagtcgggccgggtccttggtataggacatgaggaaatgttgtgttcagaaatgaataaatggaatgccctcatacaagggggagggtggggtggggagtgctgggaaagaaacacttccttataattatattagtaaaatgcacaaagaagaaggcagtgctgttacttggccactaagatgtgtaaaatggactgaaatgctccatcatgaagacttgcttccccaccaaagatgtcctgggattctgctggatctcaaagatgtgccaagccaaggaaaaagatacaagagcagaatagtacttaaaatccaaactgccgcccagatgggcttgttcttcatgcctaacttaataatttttaagagattaaagtgccagatggagtttaaatattgaaattattttaaaaggtaggtgtctttaagaaaataacaagcaaccctgtgatatgttccgtctctcccaattccctcgttatatagagggcttaatggtataaatggttaatattggtcccaacagggctgactcttctatcatataatcaaaactttttacatgagcaaaattcagtaagaaatgggggaagacaaaggaaacgtctttgagaagccccttcatatttatttatttatctcttcctgaaccatgaatttcatatgtggaatattgctatattgacagattcttgcctgtctgtgttattctaggatctgttacaggtccatggcaattactgtttattttttcctggaaaaatatttttttataaaaggcttttttttttttttaaatacatgagaggcattgggctaagaaagaaaagactgttgtataataccttgttcaatggttgtatttagtgagctcatagaggtccatcatatcatgaccgagctaggttgtgtgggcaggaaggtagggctaaggggttgtagccttgctgggcagcctctcagagcaaggttgttcagatctcccttgctattacagtaggttactattaatgagggcagcacctgatgccttttgtactgaggtatgtaactttctccttatttgacaagtagaagttaacttacttgtcagggagggcagacgtttttttgttctgtttcgtttttcaaaataatgctttttgcaaaagaggtaagactgagactaaaggtgttatcttctggtgtgctcctggaagtgtctaccctacatttgtgtcagctcagggttgcagtgttgcccagatgcattttacatcactgtaaagagattacttttgtggttactacctggcttggctggccttgcggttcaccagattaatttacaaactcccccactttattttgtgctatgtagatctggccatacttgcattagtgactgtcttgccttaaccacacttaagcaacccacaaatttcttctcagatttgtttcctagattacttatgatactcatcccatgtctcaataagagtgtcttttctttctggatgtgttctcttactccctcttaccaccatactttttgctctcttctcctgcaagcgtagtcttcacagggagtggcttcctgacatttttttcagttatgtgaatgaatggaaaccaacagctgctgcaaacactgtttttccaagaaggctacactcagaacctaaccattgccaaccatttcagtattgataaaaagctgaatttactttagcattacttatttttttttccatttgatggttcttactttgtaaaaatttaaataaatgaatgtctatactttttataaagaaaagtgaaaataccatgacactgaaaagatgatgctatcagatgctgtttagaaagcatttatcttgcatttctttattctttctaattatctaaaattcaataaaattttattcatat

SEQ ID NO: 9776 - DNA, 1952 bp, Homo sapiens
  source 1..1952: mol_type = unassigned DNA; mol_type = unassigned DNA
aagtggagggacggcagtcagctgaccctgcagtgtgcaggcgagcgcagggagtacgccatgtcctgagaaggggcgattctcaggctctggcagttacagcttctcctcaccctgccgagcaaccaggccacggggctccgtgcatcgccacctagagtgttaccctcttccttgttcacagaggttctccgcagtgtgtgagaaagaggccctctctcagatgaatggataaagaaaatgcaggacatatggtgggaggagccaagatggccgaataggaacagctccggtctacagctcccagtgtgagcgacacagaagacaggtgatttctgcatttccatctgaggcaagaagaataaatgtctctggtggaacttttgctctggtggaactgcttttctagaactggtgttgcagcatccctggaagtgtcagagagccctgggagtatccaggtggcccggggtcagccagcagtcctgccctgcactttcactaccagcgctgccctcattaacctcaatgtcatttggatggtcactcctctctccaatgccaaccaacctgaacaggtcatcctgtatcagggtggacagatgtttgatggtgccccccggttccacggtagggtaggatttacaggcaccatgccagctaccaatgtctctatcttcattaataacactcagttatcagacactggcacctaccagtgcctggtcaacaaccttccagacatagggggcaggaacattggggtcaccggtctcacagtgttagttcccccttctgccccacactgccaaatccaaggatcccaggatattggcagcgatgtcatcctgctctgtagctcagaggaaggcattcctcgaccaacttacctttgggagaagttagacaataccctcaaactacctccaacagctactcaggaccaggtccagggaacagtcaccatccggaacatcagtgccctgtcttcagcccagcccaggaacattggactaatagctggagccattggcactggtgcagttattatcattttttgcattgcactaattttaggggcattcttttactggagaagcaaaaataaagaggaggaagaagaagaaattcctaatgaaataagagaggatgatcttccacccaagtgttcttctgccaaagcatttcacactgagatttcctcctcggacaacaacacactaacctcttccaatgcctacaacagtcgatactggagcaacaatccaaaagttcatagaaacacagagtcagtcagccacttcagtgacttgggccaatctttctctttccactcaggcaatgccaacataccatccatttatgctaatgggacccatctggtcccgggtcaacataagactctggtagtgacagccaacagagggtcatcaccacaggtgatgtccaggagcaatggctcagtcagtaggaagcctcggcctccacacactcattcctacaccatcagccacgcaacactggaacgaattggtgcagtacctgtcatggtaccagcccagagtcgggccgggtccttggtataggacatgaggaaatgttgtgttcagaaatgaataaatggaatgccctcatacaagggggagggtggggtggggagtgctgggaaagaaacacttccttataattatattagtaaaatgcacaaagaagaaggcagtgctgttacttggccactaagatgtgtaaaatggactgaaatgctccatcatgaagacttgcttccccaccaaagatgtcctgggattctgctggatctcaaagatgtgccaagccaaggaaaaagatacaagagcagaatagtacttaaaatccaaactgccgcccagatgggcttgttcttcatgcctaacttaataatttttaagagattaaagtgccagatggagttt

SEQ ID NO: 9777 - DNA, 1487 bp, Homo sapiens
  source 1..1487: mol_type = unassigned DNA; mol_type = unassigned DNA
agtcccagctctgcgcggggaacagcggcccggcgctgggtgtgggaggaccaggctgccccaagagcgcggagactcacgcccgctcctctcctgttgcgaccgggagccgggtaggaggcaggcgcgctccctgcggccccgggatgacttctcagcgttcccctctggcgcctttgctgctcctctctctgcacggtgttgcagcatccctggaagtgtcagagagccctgggagtatccaggtggcccggggtcagccagcagtcctgccctgcactttcactaccagcgctgccctcattaacctcaatgtcatttggatggtcactcctctctccaatgccaaccaacctgaacaggtcatcctgtatcagggtggacagatgtttgatggtgccccccggttccacggtagggtaggatttacaggcaccatgccagctaccaatgtctctatcttcattaataacactcagttatcagacactggcacctaccagtgcctggtcaacaaccttccagacatagggggcaggaacattggggtcaccggtctcacagtgttagttcccccttctgccccacactgccaaatccaaggatcccaggatattggcagcgatgtcatcctgctctgtagctcagaggaaggcattcctcgaccaacttacctttgggagaagttagacaataccctcaaactacctccaacagctactcaggaccaggtccagggaacagtcaccatccggaacatcagtgccctgtcttcaggtttgtaccagtgcgtggcttctaatgctattggaaccagcacctgtcttctggatctccaggttatttcacgggcattcttttactggagaagcaaaaataaagaggaggaagaagaagaaattcctaatgaaataagagaggatgatcttccacccaagtgttcttctgccaaagcatttcacactgagatttcctcctcggacaacaacacactaacctcttccaatgcctacaacagtcgatactggagcaacaatccaaaagttcatagaaacacagagtcagtcagccacttcagtgacttgggccaatctttctctttccactcaggcaatgccaacataccatccatttatgctaatgggacccatctggtcccgggtcaacataagactctggtagtgacagccaacagagggtcatcaccacaggtgatgtccaggagcaatggctcagtcagtaggaagcctcggcctccacacactcattcctacaccatcagccacgcaacactggaacgaattggtgcagtacctgtcatggtaccagcccagagtcgggccgggtccttggtataggacatgaggaaatgttgtgttcagaaatgaataaatggaatgccctcatacaagggggagggtggggtggggagtgctgggaaagaaacacttccttataattatattagtaaaatgcacaaagaagaa

SEQ ID NO: 9778 - DNA, 684 bp, Homo sapiens
  source 1..684: mol_type = unassigned DNA; mol_type = unassigned DNA
gtcagagagccctgggagtatccaggtggcccggggtcagccagcagtcctgccctgcactttcactaccagcgctgccctcattaacctcaatgtcatttggatggtcactcctctctccaatgccaaccaacctgaacaggtcatcctgtatcagggtggacagatgtttgatggtgccccccggttccacggtagggtaggatttacaggcaccatgccagctaccaatgtctctatcttcattaataacactcagttatcagacactggcacctaccagtgcctggtcaacaaccttccagacatagggggcaggaacattggggtcaccggtctcacagtgttagttcccccttctgccccacactgccaaatccaaggatcccaggatattggcagcgatgtcatcctgctctgtagctcagaggaaggcattcctcgaccaacttacctttgggagaagttagacaataccctcaaactacctccaacagctactcagggtatgtacagtgctgctttacccattttattagttatcatggacaattctaatattcaaaaagtaattaactttaataggttttgaaaaataacaccctataactgctgaaaaagctttctggatcattttgtgttttcaaatttaaagtgaataaaagattttctctctcttctcta

SEQ ID NO: 9779 - DNA, 864 bp, Homo sapiens
  source 1..864: mol_type = unassigned DNA; mol_type = unassigned DNA
aggggcagaagaagtgagcctagaaggatggacttgctgaacttctgtttatcctccaagatgtgattagtcttcatagaactccatagaagttcaggaagcaaggagcaatttgactttagcagcagtgtggaggatggattggaagtggaccggaggagatcagttgaggctgtcgtggttgttaaagatcatctctacacatatttgagggccagtgtccttaactgtgtcttgtatatttgagaagccgtatgccataatgtattctggagcacacttcttagatttgaatctcagctagcccacttacacacttagacccagaaagaagagggcagcacacctcagggccagcaggaggaaggggagtcatccaggacatgtactctcaactggcggttgggaagaagacagaaagagatagacatgtgggtcgaagtctttactggggtccgtcgtgttacccaagtggctaaagcaatcctagtgagacaatggcatgagtaatagtaacagaggagttaagcagttgtgattttctgctccaataatagaatggtgttgcagcatccctggaagtgtcagagagccctgggagtatccaggtggcccggggtcagccagcagtcctgccctgcactttcactaccagcgctgccctcattaacctcaatgtcatttggatggtcactcctctctccaatgccaaccaacctgaacaggtcatcctgtatcagggtggacagatgtttgatggtgccccccggttccacggtagggtaggatttacaggcaccatgccagctaccaatgtctctatcttcattaataacactcagttatcagacactggcacctacc

SEQ ID NO: 9780 - DNA, 738 bp, Homo sapiens
  source 1..738: mol_type = unassigned DNA; mol_type = unassigned DNA
ggagaccaagcggggcgagtgggcggcgcggcgaggagccgagctgcggctggagtagcggggcgtgagttggggggagtggctccccggactgcgcgaggggtcggctagtcctggggcagggctgggtggcacggctggcgagcccggaacgcctctggtcacagctcagcgtccgcggagccgggcggcgctgcagctgcacttggctcgtctgtgggtctgacagtcccagctctgcgcggggaacagcggcccggcgctgggtgtgggaggaccaggctgccccaagagcgcggagactcacgcccgctcctctcctgttgcgaccgggagccgggtaggaggcaggcgcgctccctgcggccccgggatgacttctcagcgttcccctctggcgcctttgctgctcctctctctgcacggtggctaaagcaatcctagtgagacaatggcatgagtaatagtaacagaggagttaagcagttgtgattttctgctccaataatagaatggtgttgcagcatccctggaagtgtcagagagccctgggagtatccaggtggcccggggtcagccagcagtcctgccctgcactttcactaccagcgctgccctcattaacctcaatgtcatttggatggtcactcctctctccaatgccaaccaacctgaacaggtcatcctgtatcagggtggacagatgtttgatggtgccccccggttccacggtagggt

SEQ ID NO: 9781 - DNA, 503 bp, Homo sapiens
  source 1..503: mol_type = unassigned DNA; mol_type = unassigned DNA
gagcgcagggagtacgccatgtcctgagaaggggcgattctcaggctctggcagttacagcttctcctcaccctgccgagcaaccaggccacggggctccgtgcatcgccacctagagtgttaccctcttccttgttcacagaggttctccgcagtgtgtgagaaagaggccctctctcagatgaatggataaagaaaatgcaggacatatggtgggaggagccaagatggccgaataggaacagctccggtctacagctcccagtgtgagcgacacagaagacaggcaagaagaataaatgtctctggtggaacttttgctctggtggaactgcttttctagaactggtggctaaagcaatcctagtgagacaatggcatgagtaatagtaacagaggagttaagcagttgtgattttctgctccaataatagaatgaagtctcaagttttcatgtagacacaagtccctgagacctgccgtgccccagcagatttcctgca

SEQ ID NO: 9782 - DNA, 3206 bp, Homo sapiens
  source 1..3206: mol_type = unassigned DNA; mol_type = unassigned DNA
ttctcaccttcctcaggcaagaagaataaatgtctctggtggaacttttgctctggtggaactgcttttctagaactggtgttgcagcatccctggaagtgtcagagagccctgggagtatccaggtggcccggggtcagccagcagtcctgccctgcactttcactaccagcgctgccctcattaacctcaatgtcatttggatggtcactcctctctccaatgccaaccaacctgaacaggtcatcctgtatcagggtggacagatgtttgatggtgccccccggttccacggtagggtaggatttacaggcaccatgccagctaccaatgtctctatcttcattaataacactcagttatcagacactggcacctaccagtgcctggtcaacaaccttccagacatagggggcaggaacattggggtcaccggtctcacagtgttagttcccccttctgccccacactgccaaatccaaggatcccaggatattggcagcgatgtcatcctgctctgtagctcagaggaaggcattcctcgaccaacttacctttgggagaagttagacaataccctcaaactacctccaacagctactcaggaccaggtccagggaacagtcaccatccggaacatcagtgccctgtcttcaggtttgtaccagtgcgtggcttctaatgctattggaaccagcacctgtcttctggatctccaggttatttcaccccagcccaggaacattggactaatagctggagccattggcactggtgcagttattatcattttttgcattgcactaattttaggggcattcttttactggagaagcaaaaataaagaggaggaagaagaagaaattcctaatgaaataagagaggatgatcttccacccaagtgttcttctgccaaagcatttcacactgagatttcctcctcggacaacaacacactaacctcttccaatgcctacaacagtcgatactggagcaacaatccaaaagttcatagaaacacagagtcagtcagccacttcagtgacttgggccaatctttctctttccactcaggcaatgccaacataccatccatttatgctaatgggacccatctggtcccgggtcaacataagactctggtagtgacagccaacagagggtcatcaccacaggtgatgtccaggagcaatggctcagtcagtaggaagcctcggcctccacacactcattcctacaccatcagccacgcaacactggaacgaattggtgcagtacctgtcatggtaccagcccagagtcgggccgggtccttggtataggacatgaggaaatgttgtgttcagaaatgaataaatggaatgccctcatacaagggggagggtggggtggggagtgctgggaaagaaacacttccttataattatattagtaaaatgcacaaagaagaaggcagtgctgttacttggccactaagatgtgtaaaatggactgaaatgctccatcatgaagacttgcttccccaccaaagatgtcctgggattctgctggatctcaaagatgtgccaagccaaggaaaaagatacaagagcagaatagtacttaaaatccaaactgccgcccagatgggcttgttcttcatgcctaacttaataatttttaagagattaaagtgccagatggagtttaaatattgaaattattttaaaaggtaggtgtctttaagaaaataacaagcaaccctgtgatatgttccgtctctcccaattccctcgttatatagagggcttaatggtataaatggttaatattggtcccaacagggctgactcttctatcatataatcaaaactttttacatgagcaaaattcagtaagaaatgggggaagacaaaggaaacgtctttgagaagccccttcatatttatttatttatctcttcctgaaccatgaatttcatatgtggaatattgctatattgacagattcttgcctgtctgtgttattctaggatctgttacaggtccatggcaattactgtttattttttcctggaaaaatatttttttataaaaggcttttttttttttttaaatacatgagaggcattgggctaagaaagaaaagactgttgtataataccttgttcaatggttgtatttagtgagctcatagaggtccatcatatcatgaccgagctaggttgtgtgggcaggaaggtagggctaaggggttgtagccttgctgggcagcctctcagagcaaggttgttcagatctcccttgctattacagtaggttactattaatgagggcagcacctgatgccttttgtactgaggtatgtaactttctccttatttgacaagtagaagttaacttacttgtcagggagggcagacgtttttttgttctgtttcgtttttcaaaataatgctttttgcaaaagaggtaagactgagactaaaggtgttatcttctggtgtgctcctggaagtgtctaccctacatttgtgtcagctcagggttgcagtgttgcccagatgcattttacatcactgtaaagagattacttttgtggttactacctggcttggctggccttgcggttcaccagattaatttacaaactcccccactttattttgtgctatgtagatctggccatacttgcattagtgactgtcttgccttaaccacacttaagcaacccacaaatttcttctcagatttgtttcctagattacttatgatactcatcccatgtctcaataagagtgtcttttctttctggatgtgttctcttactccctcttaccaccatactttttgctctcttctcctgcaagcgtagtcttcacagggagtggcttcctgacatttttttcagttatgtgaatgaatggaaaccaacagctgctgcaaacactgtttttccaagaaggctacactcagaacctaaccattgccaaccatttcagtattgataaaaagctgaatttactttagcattacttatttttttttccatttgatggttcttactttgtaaaaatttaaataaatgaatgtctatactttttataaagaaaagtgaaaataccatgacactgaaaagatgatgctatcagatgctgtttagaaagcatttatcttgcatttctttattctttctaattatctaaaattcaataaaattttattcat

SEQ ID NO: 9783 - DNA, 7254 bp, Homo sapiens
  source 1..7254: mol_type = unassigned DNA; mol_type = unassigned DNA
ggggactcgggaggggccgcagcgcggctgctggtgccgttgcgggagaagaggaagcggcgcgtcccctgaggcgtgcgcctggatggactgaaggacggtccgacgcgcgcggagggagagggccaggggcgagaaatctgctcgcgctggggtaccgcttcagggctgccgaacgccaacttgcttcgtgtgccctaggcaggcgtggggcaggtggcgcctccgtgacctaccaccatggatggaaacggactttttggtgaagaaacccaaacggttgatgccaggcagggtgatttggccgtcaaaggttttgacgaaacctgccctgttctctctggggaatccgaatgagggagatcacagacaccttcactgagaagccaaggacatttctgtataatcagtggatgaaaggattttctcagacccttttttccgtgcttctggaggattaatccactacagtctgcaatttcagtggaaactgcaaggcacacgatgtggcaggagccgggagcgacttccgaattgttgtggacccttcctgtagcataggggagttttcacacttgcctccactcctccccttccccccaactccctccttctgatctcttctttttaatctgttcccattttccgagttaagttctatttccaaaactgttctctggagctataagtggattgccagaaatgagagattaggagctgggagaagaggaagcgccttgtgttgtgtctcctggaggctgccgacatgaagtgctttttcccggtgctgagctgtctggctgtgctgggtgtggtgtcagcacagcggcaggtcaccgttcaggaaggacccttgtaccgcacggagggctcccacatcactatctggtgcaatgtgagtggctaccagggaccttctgagcagaatttccagtggtccatttacctgccttcgtcgccagagcgagaggtgcagatcgtcagcaccatggactcttccttcccctatgccatctacacccagcgcgtccgcggagggaagatcttcatagaaagagtccaggggaactcaaccctattgcacatcacagatcttcaggcccgggatgccggggagtatgaatgccacacacccagcactgataagcaatactttgggagttacagtgcaaagatgaacctagtggtgatcccagactccctgcagaccactgccatgccccagactctgcacagagtggagcaggacccgctggagctcacttgtgaggtggcctcagagaccattcagcacagccacctgtctgtggcctggctccggcagaaagttggcgagaagcccgtggaggtcatctccctgagccgagatttcatgcttcactccagcagcgaatatgcccagaggcagagcctgggggaggtgcggctggacaagctggggaggaccaccttccgcctcaccatcttccacctgcagccttctgaccagggcgaattctactgcgaggccgccgagtggatccaggatccggatgggtcgtggtatgctatgacccgaaagcgttccgagggagccgtggtcaacgtccagccaactgacaaagaattcactgttcggctggagacagagaagcggctgcacacggtgggcgagccggtggagttcagatgcatcctggaggctcagaatgttcccgaccgttactttgctgtctcctgggccttcaacagctcgctcatcgccaccatgggtcctaacgctgtgcctgtcctcaacagcgaatttgctcaccgggaagccaggggacagcttaaggtggccaaagagagcgacagtgtctttgtgctgaagatctaccacctccgccaggaagatagcgggaaatacaactgccgggtgactgagcgagagaaaaccgtgaccggggaattcattgataaggagagcaagcgtcccaagaacatccccatcatagtcctccccctcaagagcagcatctccgtggaggtggccagcaatgccagcgtcatccttgagggcgaggacctgcgcttctcctgcagtgtccgcacggcaggcaggccgcagggtcgcttctctgtcatctggcagcttgtggacaggcagaaccgccgcagcaatatcatgtggctagaccgggatggcaccgtgcagccaggctcgtcctactgggagcgcagcagctttgggggcgtccagatggagcaggtgcagcccaactcgttcagcctgggcatcttcaacagcaggaaggaggacgagggccagtatgaatgccatgtgactgaatgggtgcgggcagtggatggcgagtggcagattgttggggagcgccgggccagcactcccatctccatcacagctcttgaaatgggcttcgcagtcacagccatctcccggacaccgggggtgacctacagcgactcctttgacttgcagtgtatcatcaaaccccactaccctgcctgggtccccgtgtcggtgacatggcggttccagccggtgggcacggtggagttccatgacttggtgaccttcacccgggacggaggggtccagtggggggacaggtcctccagcttccgaacccgaactgccatcgagaaggctgagtccagcaacaacgtccgcctaagcatcagccgagccagtgacacggaagcaggcaagtaccagtgtgtggcagagctgtggcggaagaactacaacaacacctggacgcgactggcggagaggacctccaacctgctggagatcagggtgctgcagccagtgacaaagctgcaggtgagcaaatcgaagaggaccctcaccctggtggaaaacaagcccattcagttgaactgctcagtcaagtctcagactagccagaactcccactttgcggtgctctggtatgtccacaagccctcggatgccgatggcaagcttatcctgaagaccacccacaactccgcctttgaatacggtacttacgccgaggaggagggcctgagagccaggctccagtttgagaggcatgtgtcggggggcctgttcagcctcaccgtccagagagccgaggtcagcgacagcggcagctactactgccacgtggaggagtggctgctgagccccaactacgcctggtacaagctggcagaggaggtttctgggcgcacagaagtcactgtgaaacagccagacagccgcctgaggctcagccaagcccaggggaacctgtcggttctggagacccggcaggtacagctggagtgtgtggttctcaaccgcaccagcataacctcccagctcatggtggaatggtttgtatggaagcccaaccaccctgagcgggagactgtggcccgcttgagccgtgacgccaccttccactatggagagcaggcagccaagaacaatctgaaggggcggctgcatttggagagtccttcccccggcgtgtaccgtctcttcatccagaacgtggctgtgcaggacagcgggacctacagctgccatgtggaggagtggctgcccagccccagtggcatgtggtataagcgggcagaggacaccgctgggcagacagctctgacagtcatgcgaccagatgcttccctgcaggtggacacagtggtccccaatgccacggtctctgagaaggcagctttccagctggactgtagcatcgtgtcccgctccagccaggactcccgcttcgctgtggcctggtattccctgaggactaaagctggggggaaaaggagcagccctggcctggaagaacaggaagaggaaagggaggaggaggaggaggaggacgacgacgacgacgacgacccaacagagcggacggccctgctgagcgtgggcccagatgctgtctttggcccagagggcagtccttgggagggcaggcttcgcttccagaggctctccccggtgctctaccggctcacagtgctgcaggcaagcccccaagatacaggcaattactcctgccatgtggaggagtggctgcccagccctcagaaggaatggtaccggctgacggaggaggagtcagcccccatcggcatccgtgttctagatacaagtcccaccctccagtccatcatctgctccaacgacgcactcttctacttcgtcttcttctaccctttccccatctttggcattcttatcatcaccatccttctggtgcgtttcaagagccggaactccagcaagaactctgatgggaagaatggggtgcctctgctgtggatcaaagagccacacctcaactactcccctacttgcctggagccccctgttctcagtatccatccaggggccatagactaagcgggtgatgccccagcggatgttggccacggaggagctgaggctctccctttctctgtgattggacagttgacagcacccaaactctggggtgcatgtgtgtggaaagttgtcagacttgaaaagtgttccaagttcccagtcagtcacagagacagactgcctctcggtggcagtcttggttggttagctatttgcgcgcaaatgttgtgatcctgccattatagatttcttgtttctgtttttagtaatgtagtgagtagctccaggtgccacatctactcacagatttatctagtattctcagatagatgttacagggcttcttattctttgtaatgtactctttttaaatccctttagtttaccctttttggattccttaatgtggacgaatttctcttacgtacaactgacagcaaaaggaagggcgaactttctagtgacaaggaatctcttccaagactttgtttttgcacatttgaaaatgccacccatggatcaaaatatacccaaacgttttttactttcttaacaagacttaagaattgtgtgtagtgtgggcaaaatttgtatgttgtcttttccctcagctggagttattggaaccactttgtagtcaagacgaaagcactgaattttgcttcaaagaactgtgtatgtacaagagaaatcctgcataaccccattaggagtagatggtgcccggcctatctgtcagggaggcaaaaaaggcttcatcccatccttgccaaaaaataagaaaactgtcttggagaatgggtcagaagccccaaacggcacacactttccaaattaaagtgggcaggggctgcttttagcagctgctgacctgcagatttgtcaaagccagtgactagagaaggaagggagaaaggctggctgttggcttgctctgagctgcaaggatggtctctaactgattaactgtgagcaggtgggcctgtgtcttcaggtgctttgccaaactcttaaaagaaagtgtccagtgaacttggaagtgggcccctgagctgagcacagggccaaagcagccatggcagacacctgacggagggcacggggctggctgacactaagtttggtgggacagtgaggggtgggaggggggtttccagggcctggtgttggagagtgcagagaaatatctacctccctggaggtgtgaagactaggtttttcttcttccttccaattagattttccttaattatagtgatgtcttccttattcatttttctctccctgcctctcactgccataagaatatcagcctgggggcagtccagacgcagccctttgtcatcctttctgtttgcctagtctcagcagactgtgatcacaaggcattgtctgtgggatttttcctttccctttcttgatctctcttgtggttctaggttgtttggttgttcattgttatggtggctttttattttaacgccccttgagccccatgatggctggtgtcaccctgttcttttacactgttgggccaggtgctgcttgtccttcttagggcatcatcaattgcaaatatttccttttgctccctttatgaagatgttcttatacccttgctttcccatatttttctggccaagcatgccatctcctttactctgggaacttacatcctgaatcccaagagggggtcacagtttggaaaaagtcatcagggattctggaactaagtctgataaaagattccagtgaagccctgttctgagaacgagcagactgcaggggaggccatgggattccccaggccagtgtctgtgctgatccttcaagggtctgcaggtatgcaggtggcctgggctgctcggcagatactttgctgattcccagctgaggggagcatggtggcgattgctcagccattttctgacagacacacagacctgccttttctcccccaagtataccgtaccctcctgtgagacagtgtgtgcaggcaccaccaccttaatcctgctgttgcctgacatgctgattctcatttattatgctgcatcaacacattagaggtacaggagcggctcagtcatgaaaaaagaaggtcttttgccccatttctttatttcagagatgtgggctttcagtgggaatttgctgactcctactttataggctgagtcaatgagggaagatgactggcgtttcctctgtctaaatgggaggttgccagagcgctggctgggactaggatgtgtaactaagatttcagtttgaaatcttagatttcagttcacggcgataaagaagtaggtgctgcacacaaatatgtaaagcaattgtaggaaatttgaaaggaaaaaaagaaaccgaagccagtattttaataattgctttttctgtgtattttgtattgggctgggggatagcatcaaaggttgaactttttgagctttctatgaaaaaccccaggaccttctttctttggccatttctatggaaatgcgatgtcagatggatggtaatggtgccctccagtggctgtgagacctcattgcgcattgtctactggagctttagtcttctgagacggaggaaaactgctgaatactctggattcatctatgtctacaatgttgcatttatgaaaaactacactgtgctaggcgcattctaggacatgaatatgaccacaccctctttcaccgggtgtttctgtagcaagttttcatattcttttcaaacaatggtttctctgcgttaattattgaggaaaaaaaaagatggggtaagaaaactacccatgcatgatgtagagagctgttgatttgtttctgtttttttaaaggaaaactatttgtaagatgttgcactaaaacattttatatacacttcagagacctgtagtaaattatgttgaaaat

SEQ ID NO: 9784 - DNA, 3842 bp, Homo sapiens
  source 1..3842: mol_type = unassigned DNA; mol_type = unassigned DNA
ttccaaaactgttctctggagctataagtggattgccagaaatgagagattaggagctgggagaagaggaagcgccttgtgttgtgtctcctggaggctgccgacatgaagtgctttttcccggtgctgagctgtctggctgtgctgggtgtggtgtcagcacagcggcaggtcaccgttcaggaaggacccttgtaccgcacggagggctcccacatcactatctggtgcaatgtgagtggctaccagggaccttctgagcagaatttccagtggtccatttacctgccttcgtcgccagagcgagaggtgcagatcgtcagcaccatggactcttccttcccctatgccatctacacccagcgcgtccgcggagggaagatcttcatagaaagagtccaggggaactcaaccctattgcacatcacagatcttcaggcccgggatgccggggagtatgaatgccacacacccagcactgataagcaatactttgggagttacagtgcaaagatgaacctagtggtgatcccagactccctgcagaccactgccatgccccagactctgcacagagtggagcaggacccgctggagctcacttgtgaggtggcctcagagaccattcagcacagccacctgtctgtggcctggctccggcagaaagttggcgagaagcccgtggaggtcatctccctgagccgagatttcatgcttcactccagcagcgaatatgcccagaggcagagcctgggggaggtgcggctggacaagctggggaggaccaccttccgcctcaccatcttccacctgcagccttctgaccagggcgaattctactgcgaggccgccgagtggatccaggatccggatgggtcgtggtatgctatgacccgaaagcgttccgagggagccgtggtcaacgtccagccaactgacaaagaattcactgttcggctggagacagagaagcggctgcacacggtgggcgagccggtggagttcagatgcatcctggaggctcagaatgttcccgaccgttactttgctgtctcctgggccttcaacagctcgctcatcgccaccatgggtcctaacgctgtgcctgtcctcaacagcgaatttgctcaccgggaagccaggggacagcttaaggtggccaaagagagcgacagtgtctttgtgctgaagatctaccacctccgccaggaagatagcgggaaatacaactgccgggtgactgagcgagagaaaaccgtgaccggggaattcattgataaggagagcaagcgtcccaagaacatccccatcatagtcctccccctcacagataactgggtagttaaagtcccccagcaccaccagctcctgtcccaaggccacttggagagcagcatctccgtggaggtggccagcaatgccagcgtcatccttgagggcgaggacctgcgcttctcctgcagtgtccgcacggcaggcaggccgcagggtcgcttctctgtcatctggcagcttgtggacaggcagaaccgccgcagcaatatcatgtggctagaccgggatggcaccgtgcagccaggctcgtcctactgggagcgcagcagctttgggggcgtccagatggagcaggtgcagcccaactcgttcagcctgggcatcttcaacagcaggaaggaggacgagggccagtatgaatgccatgtgactgaatgggtgcgggcagtggatggcgagtggcagattgttggggagcgccgggccagcactcccatctccatcacagctcttgaaatgggcttcgcagtcacagccatctcccggacaccgggggtgacctacagcgactcctttgacttgcagtgtatcatcaaaccccactaccctgcctgggtccccgtgtcggtgacatggcggttccagccggtgggcacggtggagttccatgacttggtgaccttcacccgggacggaggggtccagtggggggacaggtcctccagcttccgaacccgaactgccatcgagaaggctgagtccagcaacaacgtccgcctaagcatcagccgagccagtgacacggaagcaggcaagtaccagtgtgtggcagagctgtggcggaagaactacaacaacacctggacgcgactggcggagaggacctccaacctgctggagatcagggtgctgcagccagtgacaaagctgcaggtgagcaaatcgaagaggaccctcaccctggtggaaaacaagcccattcagttgaactgctcagtcaagtctcagactagccagaactcccactttgcggtgctctggtatgtccacaagccctcggatgccgatggcaagcttatcctgaagaccacccacaactccgcctttgaatacggtacttacgccgaggaggagggcctgagagccaggctccagtttgagaggcatgtgtcggggggcctgttcagcctcaccgtccagagagccgaggtcagcgacagcggcagctactactgccacgtggaggagtggctgctgagccccaactacgcctggtacaagctggcagaggaggtttctgggcgcacagaagtcactgtgaaacagccagacagccgcctgaggctcagccaagcccaggggaacctgtcggttctggagacccggcaggtacagctggagtgtgtggttctcaaccgcaccagcataacctcccagctcatggtggaatggtttgtatggaagcccaaccaccctgagcgggagactgtggcccgcttgagccgtgacgccaccttccactatggagagcaggcagccaagaacaatctgaaggggcggctgcatttggagagtccttcccccggcgtgtaccgtctcttcatccagaacgtggctgtgcaggacagcgggacctacagctgccatgtggaggagtggctgcccagccccagtggcatgtggtataagcgggcagaggacaccgctgggcagacagctctgacagtcatgcgaccagatgcttccctgcaggtggacacagtggtccccaatgccacggtctctgagaaggcagctttccagctggactgtagcatcgtgtcccgctccagccaggactcccgcttcgctgtggcctggtattccctgaggactaaagctggggggaaaaggagcagccctggcctggaagaacaggaagaggaaagggaggaggaggaggaggaggacgacgacgacgacgacgacccaacagagcggacggccctgctgagcgtgggcccagatgctgtctttggcccagagggcagtccttgggagggcaggcttcgcttccagaggctctccccggtgctctaccggctcacagtgctgcaggcaagcccccaagatacaggcaattactcctgccatgtggaggagtggctgcccagccctcagaaggaatggtaccggctgacggaggaggagtcagcccccatcggcatccgtgttctagatacaagtcccaccctccagtccatcatctgctccaacgacgcactcttctacttcgtcttcttctaccctttccccatctttggcattcttatcatcaccatccttctggtgcgtttcaagagccggaactccagcaagaactctgatgggaagaatggggtgcctctgctgtggatcaaagagccacacctcaactactcccctacttgcctggagccccctgttctcagtatccatccaggggccatagactaagcgggtgatgccccagcggatgttggccacggaggagctgaggctctccctttctctgtgattggacagttgacagcacccaaactctgggg

SEQ ID NO: 9785 - DNA, 268 bp, Homo sapiens
  source 1..268: mol_type = unassigned DNA; mol_type = unassigned DNA
gagagaagaacctgcattagccgtttaagtgtgcggtgctggcagagtacctccctgaaggtgtcctggggaaagtgtggtgtcagcacagcggcaggtcaccgttcaggaaggacccttgtaccgcacggagggctcccacatcactatctggtgcaatgtgagtggctaccagggaccttctgagcagaatttccagtggtccatttacctgccttcgtcgccagagcgagaggtgcagatcgtcagcaccatggactcttccttc

SEQ ID NO: 9786 - DNA, 7326 bp, Homo sapiens
  source 1..7326: mol_type = unassigned DNA; mol_type = unassigned DNA
gcggggactcgggaggggccgcagcgcggctgctggtgccgttgcgggagaagaggaagcggcgcgtcccctgaggcgtgcgcctggatggactgaaggacggtccgacgcgcgcggagggagagggccaggggcgagaaatctgctcgcgctggggtaccgcttcagggctgccgaacgccaacttgcttcgtgtgccctaggcaggcgtggggcaggtggcgcctccgtgacctaccaccatggatggaaacggactttttggtgaagaaacccaaacggttgatgccaggcagggtgatttggccgtcaaaggttttgacgaaacctgccctgttctctctggggaatccgaatgagggagatcacagacaccttcactgagaagccaaggacatttctgtataatcagtggatgaaaggattttctcagacccttttttccgtgcttctggaggattaatccactacagtctgcaatttcagtggaaactgcaaggcacacgatgtggcaggagccgggagcgacttccgaattgttgtggacccttcctgtagcataggggagttttcacacttgcctccactcctccccttccccccaactccctccttctgatctcttctttttaatctgttcccattttccgagttaagttctatttccaaaactgttctctggagctataagtggattgccagaaatgagagattaggagctgggagaagaggaagcgccttgtgttgtgtctcctggaggctgccgacatgaagtgctttttcccggtgctgagctgtctggctgtgctgggtgtggtgtcagcacagcggcaggtcaccgttcaggaaggacccttgtaccgcacggagggctcccacatcactatctggtgcaatgtgagtggctaccagggaccttctgagcagaatttccagtggtccatttacctgccttcgtcgccagagcgagaggtgcagatcgtcagcaccatggactcttccttcccctatgccatctacacccagcgcgtccgcggagggaagatcttcatagaaagagtccaggggaactcaaccctattgcacatcacagatcttcaggcccgggatgccggggagtatgaatgccacacacccagcactgataagcaatactttgggagttacagtgcaaagatgaacctagtggtgatcccagactccctgcagaccactgccatgccccagactctgcacagagtggagcaggacccgctggagctcacttgtgaggtggcctcagagaccattcagcacagccacctgtctgtggcctggctccggcagaaagttggcgagaagcccgtggaggtcatctccctgagccgagatttcatgcttcactccagcagcgaatatgcccagaggcagagcctgggggaggtgcggctggacaagctggggaggaccaccttccgcctcaccatcttccacctgcagccttctgaccagggcgaattctactgcgaggccgccgagtggatccaggatccggatgggtcgtggtatgctatgacccgaaagcgttccgagggagccgtggtcaacgtccagccaactgacaaagaattcactgttcggctggagacagagaagcggctgcacacggtgggcgagccggtggagttcagatgcatcctggaggctcagaatgttcccgaccgttactttgctgtctcctgggccttcaacagctcgctcatcgccaccatgggtcctaacgctgtgcctgtcctcaacagcgaatttgctcaccgggaagccaggggacagcttaaggtggccaaagagagcgacagtgtctttgtgctgaagatctaccacctccgccaggaagatagcgggaaatacaactgccgggtgactgagcgagagaaaaccgtgaccggggaattcattgataaggagagcaagcgtcccaagaacatccccatcatagtcctccccctcacagataactgggtagttaaagtcccccagcaccaccagctcctgtcccaaggccacttggagagcagcatctccgtggaggtggccagcaatgccagcgtcatccttgagggcgaggacctgcgcttctcctgcagtgtccgcacggcaggcaggccgcagggtcgcttctctgtcatctggcagcttgtggacaggcagaaccgccgcagcaatatcatgtggctagaccgggatggcaccgtgcagccaggctcgtcctactgggagcgcagcagctttgggggcgtccagatggagcaggtgcagcccaactcgttcagcctgggcatcttcaacagcaggaaggaggacgagggccagtatgaatgccatgtgactgaatgggtgcgggcagtggatggcgagtggcagattgttggggagcgccgggccagcactcccatctccatcacagctcttgaaatgggcttcgcagtcacagccatctcccggacaccgggggtgacctacagcgactcctttgacttgcagtgtatcatcaaaccccactaccctgcctgggtccccgtgtcggtgacatggcggttccagccggtgggcacggtggagttccatgacttggtgaccttcacccgggacggaggggtccagtggggggacaggtcctccagcttccgaacccgaactgccatcgagaaggctgagtccagcaacaacgtccgcctaagcatcagccgagccagtgacacggaagcaggcaagtaccagtgtgtggcagagctgtggcggaagaactacaacaacacctggacgcgactggcggagaggacctccaacctgctggagatcagggtgctgcagccagtgacaaagctgcaggtgagcaaatcgaagaggaccctcaccctggtggaaaacaagcccattcagttgaactgctcagtcaagtctcagactagccagaactcccactttgcggtgctctggtatgtccacaagccctcggatgccgatggcaagcttatcctgaagaccacccacaactccgcctttgaatacggtacttacgccgaggaggagggcctgagagccaggctccagtttgagaggcatgtgtcggggggcctgttcagcctcaccgtccagagagccgaggtcagcgacagcggcagctactactgccacgtggaggagtggctgctgagccccaactacgcctggtacaagctggcagaggaggtttctgggcgcacagaagtcactgtgaaacagccagacagccgcctgaggctcagccaagcccaggggaacctgtcggttctggagacccggcaggtacagctggagtgtgtggttctcaaccgcaccagcataacctcccagctcatggtggaatggtttgtatggaagcccaaccaccctgagcgggagactgtggcccgcttgagccgtgacgccaccttccactatggagagcaggcagccaagaacaatctgaaggggcggctgcatttggagagtccttcccccggcgtgtaccgtctcttcatccagaacgtggctgtgcaggacagcgggacctacagctgccatgtggaggagtggctgcccagccccagtggcatgtggtataagcgggcagaggacaccgctgggcagacagctctgacagtcatgcgaccagatgcttccctgcaggtggacacagtggtccccaatgccacggtctctgagaaggcagctttccagctggactgtagcatcgtgtcccgctccagccaggactcccgcttcgctgtggcctggtattccctgaggactaaagctggggggaaaaggagcagccctggcctggaagaacaggaagaggaaagggaggaggaggaggaggaggacgacgacgacgacgacgacccaacagagcggacggccctgctgagcgtgggcccagatgctgtctttggcccagagggcagtccttgggagggcaggcttcgcttccagaggctctccccggtgctctaccggctcacagtgctgcaggcaagcccccaagatacaggcaattactcctgccatgtggaggagtggctgcccagccctcagaaggaatggtaccggctgacggaggaggagtcagcccccatcggcatccgtgttctagatacaagtcccaccctccagtccatcatctgctccaacgacgcactcttctacttcgtcttcttctaccctttccccatctttggcattcttatcatcaccatccttctggtgcgtttcaagagccggaactccagcaagaactctgatgggaagaatggggtgcctctgctgtggatcaaagagccacacctcaactactcccctacttgcctggagccccctgttctcagtatccatccaggggccatagactaagcgggtgatgccccagcggatgttggccacggaggagctgaggctctccctttctctgtgattggacagttgacagcacccaaactctggggtgcatgtgtgtggaaagttgtcagacttgaaaagtgttccaagttcccagtcagtcacagagacagactgcctctcggtggcagtcttggttggttagctatttgcgcgcaaatgttgtgatcctgccattatagatttcttgtttctgtttttagtaatgtagtgagtagctccaggtgccacatctactcacagatttatctagtattctcagatagatgttacagggcttcttattctttgtaatgtactctttttaaatccctttagtttaccctttttggattccttaatgtggacgaatttctcttacgtacaactgacagcaaaaggaagggcgaactttctagtgacaaggaatctcttccaagactttgtttttgcacatttgaaaatgccacccatggatcaaaatatacccaaacgttttttactttcttaacaagacttaagaattgtgtgtagtgtgggcaaaatttgtatgttgtcttttccctcagctggagttattggaaccactttgtagtcaagacgaaagcactgaattttgcttcaaagaactgtgtatgtacaagagaaatcctgcataaccccattaggagtagatggtgcccggcctatctgtcagggaggcaaaaaaggcttcatcccatccttgccaaaaaataagaaaactgtcttggagaatgggtcagaagccccaaacggcacacactttccaaattaaagtgggcaggggctgcttttagcagctgctgacctgcagatttgtcaaagccagtgactagagaaggaagggagaaaggctggctgttggcttgctctgagctgcaaggatggtctctaactgattaactgtgagcaggtgggcctgtgtcttcaggtgctttgccaaactcttaaaagaaagtgtccagtgaacttggaagtgggcccctgagctgagcacagggccaaagcagccatggcagacacctgacggagggcacggggctggctgacactaagtttggtgggacagtgaggggtgggaggggggtttccagggcctggtgttggagagtgcagagaaatatctacctccctggaggtgtgaagactaggtttttcttcttccttccaattagattttccttaattatagtgatgtcttccttattcatttttctctccctgcctctcactgccataagaatatcagcctgggggcagtccagacgcagccctttgtcatcctttctgtttgcctagtctcagcagactgtgatcacaaggcattgtctgtgggatttttcctttccctttcttgatctctcttgtggttctaggttgtttggttgttcattgttatggtggctttttattttaacgccccttgagccccatgatggctggtgtcaccctgttcttttacactgttgggccaggtgctgcttgtccttcttagggcatcatcaattgcaaatatttccttttgctccctttatgaagatgttcttatacccttgctttcccatatttttctggccaagcatgccatctcctttactctgggaacttacatcctgaatcccaagagggggtcacagtttggaaaaagtcatcagggattctggaactaagtctgataaaagattccagtgaagccctgttctgagaacgagcagactgcaggggaggccatgggattccccaggccagtgtctgtgctgatccttcaagggtctgcaggtatgcaggtggcctgggctgctcggcagatactttgctgattcccagctgaggggagcatggtggcgattgctcagccattttctgacagacacacagacctgccttttctcccccaagtataccgtaccctcctgtgagacagtgtgtgcaggcaccaccaccttaatcctgctgttgcctgacatgctgattctcatttattatgctgcatcaacacattagaggtacaggagcggctcagtcatgaaaaaagaaggtcttttgccccatttctttatttcagagatgtgggctttcagtgggaatttgctgactcctactttataggctgagtcaatgagggaagatgactggcgtttcctctgtctaaatgggaggttgccagagcgctggctgggactaggatgtgtaactaagatttcagtttgaaatcttagatttcagttcacggcgataaagaagtaggtgctgcacacaaatatgtaaagcaattgtaggaaatttgaaaggaaaaaaagaaaccgaagccagtattttaataattgctttttctgtgtattttgtattgggctgggggatagcatcaaaggttgaactttttgagctttctatgaaaaaccccaggaccttctttctttggccatttctatggaaatgcgatgtcagatggatggtaatggtgccctccagtggctgtgagacctcattgcgcattgtctactggagctttagtcttctgagacggaggaaaactgctgaatactctggattcatctatgtctacaatgttgcatttatgaaaaactacactgtgctaggcgcattctaggacatgaatatgaccacaccctctttcaccgggtgtttctgtagcaagttttcatattcttttcaaacaatggtttctctgcgttaattattgaggaaaaaaaaagatggggtaagaaaactacccatgcatgatgtagagagctgttgatttgtttctgtttttttaaaggaaaactatttgtaagatgttgcactaaaacattttatatacacttcagagacctgtagtaaattatgttgaaaatacggctgttt

SEQ ID NO: 9787 - DNA, 2840 bp, Homo sapiens
  source 1..2840: mol_type = unassigned DNA; mol_type = unassigned DNA
gacctgagtacttcccagaatgcttaaacttgataaaagataaaaacttgtataacgaagctctgaagttatattcaccaagctcacaacagtaccaggatatcagcattgcttatggggagcacctgatgcaggagcacatgtatgagccagcggggctcatgtttgcccgttgcggtgcccacgagaaagctctctcagcctttctgacatgtggcaactggaagcaagccctctgtgtggcagcccagcttaactttaccaaagaccagctggtgggcctcggcagaactctggcaggaaagctggttgagcagaggaagcacattgatgcggccatggttttggaagagtgtgcccaggattatgaagaagctgtgctcttgctgttagaaggagctgcctgggaagaagctttgaggctggtatacaaatataacagactggatattatagaaaccaacgtaaagccttccattttagaagcccagaaaaattatatggcatttctggactctcagacagccacattcagtcgccacaagaaacgtttattggtagttcgagagctcaaggagcaagcccagcaggcaggtctggatgatgaggtaccccacgggcaagagtcagacctcttctctgaaactagcagtgtcgtgagtggcagtgagatgagtggcaaatactcccatagtaactccaggatatcagcgagatcatccaagaatcgccgaaaagcggagcggaagaagcacagcctcaaagaaggcagtccgctggaggacctggccctcctggaggcactgagtgaagtggtgcagaacactgaaaacctgaaagatgaagtataccatattttaaaggtactctttctctttgagtttgatgaacaaggaagggaattacagaaggcctttgaagatacgctgcagttgatggaaaggtcacttccagaaatttggactcttacttaccagcagaattcagctaccccgacatggggagagggagtcttgctgtgttgcccaagctggtcttgaactcctggcctcaagtgatcctcctgccttggcctcccaaagtgctgagattacaggtgttctaggtcccaattctactgcaaatagtatcatggcatcttatcagcaacagaagacttcggttcctgttcttgatgctgagctttttataccaccaaagatcaacagaagaacccagtggaagctgagcctgctagactgagtgactgcagttaggagggatccgacagagaagaccatttccactcattcctgttgtcctaccaccccttgctctttgagggctggctattgagaactggaaagagtaaaatgataacttaccttagcattgccaagaacttcagcagacaacaagcaattctatttattttatgttgtgtatacatcttgatcattagcaagacattaagctttaaccattatggcaccattttgtgagaatgattgttctttcacttgggctgtttgagagcataattatggtaatcatgagattaatgtttcatgatttctacctccaaagtgtgaagacaagtaaaacaatgtttctaaattgtcttattttgttggcggagaagattacaatggctattagtgctacatttggtcaaatgtaatcacttaaatagcttcttgtcaccttaaactaaagcagaataaaaagtatcctttgaaattataagccctcctttgctgacagctattattttgtaacatcttaccaggtcatgtgctttcagttataactgggctgagcctcctataattacaatgtctatagggactgttttactgcctgtgtattttctgctagagagttagcaatgttagagctagaacagattagaatttctaaacagtatcatgcacagttggtgtgagtgatcagtgtgcattgtatggcatgcatggttgtgaattattctctgttctccaaatactgtttctttaactcagatatttttgttagtgtctaggccacttcatttatttttcgtcatggtactttactgacttctctttattcaattctccacgccctcaccaaaaaaaactgtctcaaaatgagaatattttattttcatggtgagtctagaaaacgcccacttcattctgattaaaaattcttccatgttttaaatatcagaaccagacctttcttactgtgtatcttagcccatttgtgtctctataacaacaaccagctttcaaaggaactaatagagtgaaaactcactcattaccacgaggatggcacaagcgattcacgtaggatctgcccctgtgaccaaaacacctcccattgggccccacttccaacactggtgatcacatttcaacatgaggtttagggaaacaaatgcctaaactacagcactgtacataaactaacaggaaatgctgcttttgatcctcaaagaagtgatatagccaaaattgtaatttaagaagcctttcccagtatagcaagatgttaactatagaatcaatctaggagtattcactgtaaaattcaacttttctgtatgtttgaacattttcacaatctcataggagtttttaaaaagaagagaaagaagatatactttgctttggagaaatctactttttgacttacatgggtttgctgtaattaagtgcccaatattgaaaggctgcaagtactttgtaatcactctttggcatgggtaaataagcatggtaacttatattgaaatatagtgctcttgctttggataactgtaaagggacccatgctgatagactggaaatagaagtaaatgtgtttattgataa

SEQ ID NO: 9788 - DNA, 5905 bp, Homo sapiens
  source 1..5905: mol_type = unassigned DNA; mol_type = unassigned DNA
agtgctgcggctgcctagttgacgcacccattgagtcgctggcttctttgcagcgcttcagcgttttcccctggagggcgcctccatccttggaggcctagtgccgtcggagagagagcgggagccgcggacagagacgcgtgcgcaattcggagccgactctgggtgcggactgtgggagctgactctgggtagccggctgcgcgtggctggggaggcgaggccggacgcacctctgtttgggggtcctcagagattaatgattcatcaagggatagttgtacttgtctcgtgggaatcacttcatcatgcgaaatctgaaattatttcggaccctggagttcagggatattcaaggtccagggaatcctcagtgcttctctctccgaactgaacaggggacggtgctcattggttcagaacatggcctgatagaagtagaccctgtctcaagagaagtgaaaaatgaagtttctttggtggcagaaggctttctcccagaggatggaagtggccgcattgttggtgttcaggacttgctggatcaggagtctgtgtgtgtggccacagcctctggagacgtcatactctgcagtctcagcacacaacagctggagtgtgttgggagtgtagccagtggtatctctgttatgagttggagtcctgaccaagagctggtgcttcttgccacaggtcaacagaccctgattatgatgacaaaagattttgagccaatcctggagcagcagatccatcaggatgattttggtgaaagcaagtttatcactgttggatggggtaggaaggagacacagttccatggatcagaaggcagacaagcagcttttcagatgcaaatgcatgagtctgctttgccctgggatgaccatagaccacaagttacctggcggggggatggacagttttttgctgtgagtgttgtttgcccagaaacaggggctcggaaggtcagagtgtggaaccgagagtttgctttgcagtcaaccagtgagcctgtggcaggactgggaccagccctggcttggaaaccctcaggcagtttgattgcatctacacaagataaacccaaccagcaggatattgtgttttttgagaaaaatggactccttcatggacactttacacttcccttccttaaagatgaggttaaggtaaatgacttgctctggaatgcagattcctctgtgcttgcagtctggctggaagaccttcagagagaagaaagctccattccgaaaacctgtgttcagctctggactgttggaaactatcactggtatctcaagcaaagtttatccttcagcacctgtgggaagagcaagattgtgtctctgatgtgggaccctgtgaccccataccggctgcatgttctctgtcagggctggcattacctcgcctatgattggcactggacgactgaccggagcgtgggagataattcaagtgacttgtccaatgtggctgtcattgatggaaacagggtgttggtgacagtcttccggcagactgtggttccgcctcccatgtgcacctaccaactgctgttcccacaccctgtgaatcaagtcacattcttagcacaccctcaaaagagtaatgaccttgctgttctagatgccagtaaccagatttctgtttataaatgtggtgattgtccaagtgctgaccctacagtgaaactgggagctgtgggtggaagtggatttaaagtttgccttagaactcctcatttggaaaagagatacaaaatccagtttgagaataatgaagatcaagatgtaaacccgctgaaactaggccttctcacttggattgaagaagacgtcttcctggctgtaagccacagtgagttcagcccccggtctgtcattcaccatttgactgcagcttcttctgagatggatgaagagcatggacagctcaatgtcagttcatctgcagcggtggatggggtcataatcagtctatgttgcaattccaagaccaagtcagtagtattacagctggctgatggccagatatttaagtacctttgggagtcaccttctctggctattaaaccatggaagaactctggtggatttcctgttcggtttccttatccatgcacccagaccgaattggccatgattggagaagaggaatgtgtccttggtctgactgacaggtgtcgctttttcatcaatgacattgaggttgcgtcaaatatcacgtcatttgcagtatatgatgagtttttattgttgacaacccattcccatacctgccagtgtttttgcctgagggatgcttcatttaaaacattacaggccggcctgagcagcaatcatgtgtcccatggggaagttctgcggaaagtggagaggggttcacggattgtcactgttgtgccccaggacacaaagcttgtattacagatgccaaggggaaacttagaagttgttcatcatcgagccctggttttagctcagattcggaagtggttggacaaacttatgtttaaagaggcatttgaatgcatgagaaagctgagaatcaatctcaatctgatttatgatcataaccctaaggtgtttcttggaaatgtggaaaccttcattaaacagatagattctgtgaatcatattaacttgttttttacagaattgaaagaagaagatgtcacgaagaccatgtaccctgcaccagttaccagcagtgtctacctgtccagggatcctgacgggaataaaatagaccttgtctgcgatgctatgagagcagtcatggagagcataaatcctcataaatactgcctatccatacttacatctcatgtaaagaagacaaccccagaactggaaattgtactgcaaaaagtacacgagcttcaaggaaatgctccctctgatcctgatgctgtgagtgctgaagaggccttgaaatatttgctgcatctggtagatgttaatgaattatatgatcattctcttggcacctatgactttgatttggtcctcatggtagctgagaagtcacagaaggatcccaaagaatatcttccatttcttaatacacttaagaaaatggaaactaattatcagcggtttactatagacaaatacttgaaacgatatgaaaaagccattggccacctcagcaaatgtggacctgagtacttcccagaatgcttaaacttgataaaagataaaaacttgtataacgaagctctgaagttatattcaccaagctcacaacagtaccaggatatcagcattgcttatggggagcacctgatgcaggagcacatgtatgagccagcggggctcatgtttgcccgttgcggtgcccacgagaaagctctctcagcctttctgacatgtggcaactggaagcaagccctctgtgtggcagcccagcttaactttaccaaagaccagctggtgggcctcggcagaactctggcaggaaagctggttgagcagaggaagcacattgatgcggccatggttttggaagagtgtgcccaggattatgaagaagctgtgctcttgctgttagaaggagctgcctgggaagaagctttgaggctggtatacaaatataacagactggatattatagaaaccaacgtaaagccttccattttagaagcccagaaaaattatatggcatttctggactctcagacagccacattcagtcgccacaagaaacgtttattggtagttcgagagctcaaggagcaagcccagcaggcaggtctggatgatgaggtaccccacgggcaagagtcagacctcttctctgaaactagcagtgtcgtgagtggcagtgagatgagtggcaaatactcccatagtaactccaggatatcagcgagatcatccaagaatcgccgaaaagcggagcggaagaagcacagcctcaaagaaggcagtccgctggaggacctggccctcctggaggcactgagtgaagtggtgcagaacactgaaaacctgaaagatgaagtataccatattttaaaggtactctttctctttgagtttgatgaacaaggaagggaattacagaaggcctttgaagatacgctgcagttgatggaaaggtcacttccagaaatttggactcttacttaccagcagaattcagctaccccggttctaggtcccaattctactgcaaatagtatcatggcatcttatcagcaacagaagacttcggttcctgttcttgatgctgagctttttataccaccaaagatcaacagaagaacccagtggaagctgagcctgctagactgagtgactgcagttaggagggatccgacagagaagaccatttccactcattcctgttgtcctaccaccccttgctctttgagggctggctattgagaactggaaagagtaaaatgataacttaccttagcattgccaagaacttcagcagacaacaagcaattctatttattttatgttgtgtatacatcttgatcattagcaagacattaagctttaaccattatggcaccattttgtgagaatgattgttctttcacttgggctgtttgagagcataattatggtaatcatgagattaatgtttcatgatttctacctccaaagtgtgaagacaagtaaaacaatgtttctaaattgtcttattttgttggcggagaagattacaatggctattagtgctacatttggtcaaatgtaatcacttaaatagcttcttgtcaccttaaactaaagcagaataaaaagtatcctttgaaattataagccctcctttgctgacagctattattttgtaacatcttaccaggtcatgtgctttcagttataactgggctgagcctcctataattacaatgtctatagggactgttttactgcctgtgtattttctgctagagagttagcaatgttagagctagaacagattagaatttctaaacagtatcatgcacagttggtgtgagtgatcagtgtgcattgtatggcatgcatggttgtgaattattctctgttctccaaatactgtttctttaactcagatatttttgttagtgtctaggccacttcatttatttttcgtcatggtactttactgacttctctttattcaattctccacgccctcaccaaaaaaaactgtctcaaaatgagaatattttattttcatggtgagtctagaaaacgcccacttcattctgattaaaaattcttccatgttttaaatatcagaaccagacctttcttactgtgtatcttagcccatttgtgtctctataacaacaaccagctttcaaaggaactaatagagtgaaaactcactcattaccacgaggatggcacaagcgattcacgtaggatctgcccctgtgaccaaaacacctcccattgggccccacttccaacactggtgatcacatttcaacatgaggtttagggaaacaaatgcctaaactacagcactgtacataaactaacaggaaatgctgcttttgatcctcaaagaagtgatatagccaaaattgtaatttaagaagcctttcccagtatagcaagatgttaactatagaatcaatctaggagtattcactgtaaaattcaacttttctgtatgtttgaacattttcacaatctcataggagtttttaaaaagaagagaaagaagatatactttgctttggagaaatctactttttgacttacatgggtttgctgtaattaagtgcccaatattgaaaggctgcaagtactttgtaatcactctttggcatgggtaaataagcatggtaacttatattgaaatatagtgctcttgctttggataactgtaaagggacccatgctgatagactggaaatagaagtaaatgtgtttattgataa

SEQ ID NO: 9789 - DNA, 437 bp, Homo sapiens
  source 1..437: mol_type = unassigned DNA; mol_type = unassigned DNA
ttactgttaagggacgaagtggtttagtgagagataccaggaaagctggttgagcagaggaagcacattgatgcggccatggttttggaagagtgtgcccaggattatgaagaagctgtgctcttgctgttagaaggagctgcctgggaagaagctttgaggctggtatacaaatataacagactggatattatagaaaccaacgtaaagccttccattttagaagcccagaaaaattatatggcatttctggactctcagacagccacattcagtcgccacaagaaacgtttattggtagttcgagagctcaaggagcaagcccagcaggcaggtctggatgatgaggtaccccacgggcaagagtcagacctcttctctgaaactagcagtgtcgtgagtggcagtgagatgagtggcaaatactcccatagtaa

SEQ ID NO: 9790 - DNA, 3823 bp, Homo sapiens
  source 1..3823: mol_type = unassigned DNA; mol_type = unassigned DNA
gggtgcggactgtgggagctgactctgggtagccggctgcgcgtggctggggaggcgaggccggacgcacctctgtttgggggtcctcagaccctcaggcagtttgattgcatctacacaagataaacccaaccagcaggatattgtgttttttgagaaaaatggactccttcatggacactttacacttcccttccttaaagatgaggttaaggtaaatgacttgctctggaatgcagattcctctgtgcttgcagtctggctggaagaccttcagagagaagaaagctccattccgaaaacctgtgttcagctctggactgttggaaactatcactggtatctcaagcaaagtttatccttcagcacctgtgggaagagcaagattgtgtctctgatgtgggaccctgtgaccccataccggctgcatgttctctgtcagggctggcattacctcgcctatgattggcactggacgactgaccggagcgtgggagataattcaagtgacttgtccaatgtggctgtcattgatggaaacagggtgttggtgacagtcttccggcagactgtggttccgcctcccatgtgcacctaccaactgctgttcccacaccctgtgaatcaagtcacattcttagcacaccctcaaaagagtaatgaccttgctgttctagatgccagtaaccagatttctgtttataaatgtggtgattgtccaagtgctgaccctacagtgaaactgggagctgtgggtggaagtggatttaaagtttgccttagaactcctcatttggaaaagagatacaaaatccagtttgagaataatgaagatcaagatgtaaacccgctgaaactaggccttctcacttggattgaagaagacgtcttcctggctgtaagccacagtgagttcagcccccggtctgtcattcaccatttgactgcagcttcttctgagatggatgaagagcatggacagctcaatgtcagttcatctgcagcggtggatggggtcataatcagtctatgttgcaattccaagaccaagtcagtagtattacagctggctgatggccagatatttaagtacctttgggagtcaccttctctggctattaaaccatggaagaactctggtggatttcctgttcggtttccttatccatgcacccagaccgaattggccatgattggagaagaggaatgtgtccttggtctgactgacaggtgtcgctttttcatcaatgacattgaggttgcgtcaaatatcacgtcatttgcagtatatgatgagtttttattgttgacaacccattcccatacctgccagtgtttttgcctgagggatgcttcatttaaaacattacaggccggcctgagcagcaatcatgtgtcccatggggaagttctgcggaaagtggagaggggttcacggattgtcactgttgtgccccaggacacaaagcttgtattacagatgccaaggggaaacttagaagttgttcatcatcgagccctggttttagctcagattcggaagtggttggacaaacttatgtttaaagaggcatttgaatgcatgagaaagctgagaatcaatctcaatctgatttatgatcataaccctaaggtgtttcttggaaatgtggaaaccttcattaaacagatagattctgtgaatcatattaacttgttttttacagaattgaaagaagaagatgtcacgaagaccatgtaccctgcaccagttaccagcagtgtctacctgtccagggatcctgacgggaataaaatagaccttgtctgcgatgctatgagagcagtcatggagagcataaatcctcataaatactgcctatccatacttacatctcatgtaaagaagacaaccccagaactggaaattgtactgcaaaaagtacacgagcttcaaggaaatgctccctctgatcctgatgctgtgagtgctgaagaggccttgaaatatttgctgcatctggtagatgttaatgaattatatgatcattctcttggcacctatgactttgatttggtcctcatggtagctgagaagtcacagaaggatcccaaagaatatcttccatttcttaatacacttaagaaaatggaaactaattatcagcggtttactatagacaaatacttgaaacgatatgaaaaagccattggccacctcagcaaatgtggacctgagtacttcccagaatgcttaaacttgataaaagataaaaacttgtataacgaagctctgaagttatattcaccaagctcacaacagtaccaggatatcagcattgcttatggggagcacctgatgcaggagcacatgtatgagccagcggggctcatgtttgcccgttgcggtgcccacgagaaagctctctcagcctttctgacatgtggcaactggaagcaagccctctgtgtggcagcccagcttaactttaccaaagaccagctggtgggcctcggcagaactctggcaggaaagctggttgagcagaggaagcacattgatgcggccatggttttggaagagtgtgcccaggattatgaagaagctgtgctcttgctgttagaaggagctgcctgggaagaagctttgaggctggtatacaaatataacagactggatattatagaaaccaacgtaaagccttccattttagaagcccagaaaaattatatggcatttctggactctcagacagccacattcagtcgccacaagaaacgtttattggtagttcgagagctcaaggagcaagcccagcaggcaggtctggatgatgaggtaccccacgggcaagagtcagacctcttctctgaaactagcagtgtcgtgagtggcagtgagatgagtggcaaatactcccatagtaactccaggatatcagcgagatcatccaagaatcgccgaaaagcggagcggaagaagcacagcctcaaagaaggcagtccgctggaggacctggccctcctggaggcactgagtgaagtggtgcagaacactgaaaacctgaaagatgaagtataccatattttaaaggtactctttctctttgagtttgatgaacaaggaagggaattacagaaggcctttgaagatacgctgcagttgatggaaaggtcacttccagaaatttggactcttacttaccagcagaattcagctaccccggttctaggtcccaattctactgcaaatagtatcatggcatcttatcagcaacagaagacttcggttcctgttcttgatgctgagctttttataccaccaaagatcaacagaagaacccagtggaagctgagcctgctagactgagtgactgcagttaggagggatccgacagagaagaccatttccactcattcctgttgtcctaccaccccttgctctttgagggctggctattgagaactggaaagagtaaaatgataacttaccttagcattgccaagaacttcagcagacaacaagcaattctatttattttatgttgtgtatacatcttgatcattagcaagacattaagctttaaccattatggcaccattttgtgagaatgattgttctttcacttgggctgtttgagagcataattatggtaatcatgagattaatgtttcatgatttctacctccaaagtgtgaagacaagtaaaacaatgtttctaaattgtcttattttgttggcggagaagattacaatggctattagtgctacatttggtcaaatgtaatcacttaaatagcttcttgtcaccttaaactaaagcagaataaaaagtatcctttg

SEQ ID NO: 9791 - DNA, 1447 bp, Homo sapiens
  source 1..1447: mol_type = unassigned DNA; mol_type = unassigned DNA
gggactccgggtggcaggcgcccgggggaatcccagctgactcgctcactgccttcgaagtccggcgccccccgggagggaactgggtggccgcaccctcccggctgcggtggctgtcgccccccaccctgcagccaggactcgatggagaatccattccaatatatggccatgtggctctttggagcaatgttccatcatgttccatgctgctgacgtcacatggagcacagaaatcaatgttagcagatagccagcccatacaagatcgtattgtattgtaggaggcattgtggatggatggctgctggaaaccccttgccatagccagctcttcttcaatacttaaggatttaccgtggctttgagtaatgagaatttcgaaaccacatttgagaagtatttccatccagtgctacttgtgtttacttctaaacagtcattttctaactgaagctggcattcatgtcttcattttgggctgtttcagtgcagggcttcctaaaacagaagccaactgggtgaatgtaataagtgatttgaaaaaaattgaagatcttattcaatctatgcatattgatgctactttatatacggaaagtgatgttcaccccagttgcaaagtaacagcaatgaagtgctttctcttggagttacaagttatttcacttgagtccggagatgcaagtattcatgatacagtagaaaatctgatcatcctagcaaacaacagtttgtcttctaatgggaatgtaacagaatctggatgcaaagaatgtgaggaactggaggaaaaaaatattaaagaatttttgcagagttttgtacatattgtccaaatgttcatcaacacttcttgattgcaattgattctttttaaagtgtttctgttattaacaaacatcactctgctgcttagacataacaaaacactcggcatttcaaatgtgctgtcaaaacaagtttttctgtcaagaagatgatcagaccttggatcagatgaactcttagaaatgaaggcagaaaaatgtcattgagtaatatagtgactatgaacttctctcagacttactttactcatttttttaatttattattgaaattgtacatatttgtggaataatgtaaaatgttgaataaaaatatgtacaagtgttgttttttaagttgcactgatattttacctcttattgcaaaatagcatttgtttaagggtgatagtcaaattatgtattggtggggctgggtaccaatgctgcaggtcaacagctatgctggtaggctcctgccagtgtggaaccactgactactggctctcattgacttccttactaagcatagcaaacagaggaagaatttgttatcagtaagaaaaagaagaactatatgtgaatcctcttctttatactgtaatttagttattgatgtataaagcaactgttatgaa

SEQ ID NO: 9792 - DNA, 2472 bp, Homo sapiens
  source 1..2472: mol_type = unassigned DNA; mol_type = unassigned DNA
actccgggtggcaggcgcccgggggaatcccagctgactcgctcactgccttcgaagtccggcgccccccgggagggaactgggtggccgcaccctcccggctgcggtggctgtcgccccccaccctgcagccaggactcgatggaggtacagagctcggcttctttgccttgggaggggagtggtggtggttgaaagggcgatggaattttccccgaaagcctacgcccagggcccctcccagctccagcgttaccctccggtctatcctactggccgagctgccccgccttctcatggggaaaacttagccgcaacttcaatttttggtttttcctttaatgacacttctgaggctctcctagccatcctcccgcttccggaggagcgcagatcgcaggtccctttgcccctggcgtgcgactccctactgcgctgcgctcttacggcgttccaggctgctggctagcgcaaggcgggccgggcaccccgcgctccgctgggagggtgagggacgcgcgtctggcggccccagccaagctgcgggtttctgagaagacgctgtcccgcagccctgagggctgagttctgcacccagtcaagctcaggaaggccaagaaaagaatccattccaatatatggccatgtggctctttggagcaatgttccatcatgttccatgctgctgacgtcacatggagcacagaaatcaatgttagcagatagccagcccatacaagatcgtattgtattgtaggaggcattgtggatggatggctgctggaaaccccttgccatagccagctcttcttcaatacttaaggatttaccgtggctttgagtaatgagaatttcgaaaccacatttgagaagtatttccatccagtgctacttgtgtttacttctaaacagtcattttctaactgaagctggcattcatgtcttcattttgggctgtttcagtgcagggcttcctaaaacagaagccaactgggtgaatgtaataagtgatttgaaaaaaattgaagatcttattcaatctatgcatattgatgctactttatatacggaaagtgatgttcaccccagttgcaaagtaacagcaatgaagtgctttctcttggagttacaagttatttcacttgagtccggagatgcaagtattcatgatacagtagaaaatctgatcatcctagcaaacaacagtttgtcttctaatgggaatgtaacagaatctggatgcaaagaatgtgaggaactggaggaaaaaaatattaaagaatttttgcagagttttgtacatattgtccaaatgttcatcaacacttcttgattgcaattgattctttttaaagtgtttctgttattaacaaacatcactctgctgcttagacataacaaaacactcggcatttcaaatgtgctgtcaaaacaagtttttctgtcaagaagatgatcagaccttggatcagatgaactcttagaaatgaaggcagaaaaatgtcattgagtaatatagtgactatgaacttctctcagacttactttactcatttttttaatttattattgaaattgtacatatttgtggaataatgtaaaatgttgaataaaaatatgtacaagtgttgttttttaagttgcactgatattttacctcttattgcaaaatagcatttgtttaagggtgatagtcaaattatgtattggtggggctgggtaccaatgctgcaggtcaacagctatgctggtaggctcctgccagtgtggaaccactgactactggctctcattgacttccttactaagcatagcaaacagaggaagaatttgttatcagtaagaaaaagaagaactatatgtgaatcctcttctttatactgtaatttagttattgatgtataaagcaactgttatgaaataaagaaattgcaataactggcatataatgtccatcagtaaatcttggtggtggtggcaataataaacttctactgataggtagaatggtgtgcaagcttgtccaatcacggattgcaggccacatgcggcccaggacaactttgaatgtggcccaacacaaattcataaactttcatacatctcgtttttagctcatcagctatcattagcggtagtgtatttaaagtgtggcccaagacaattcttcttattccaatgtggcccagggaaatcaaaagattggatgcccctggtatagaaaactaatagtgacagtgttcatatttcatgctttcccaaatacaggtattttattttcacattctttttgccatgtttatataataataaagaaaaaccctgttgatttgttggagccattgttatctgacagaaaataattgtttatattttttgcactacactgtctaaaattagcaagctctcttctaatggaactgtaagaaagatgaaatatttttgttttattataaatttatttcaccttaa

SEQ ID NO: 9793 - DNA, 1388 bp, Homo sapiens
  source 1..1388: mol_type = unassigned DNA; mol_type = unassigned DNA
cctgcagccaggactcgatggagaatccattccaatatatggccatgtggctctttggagcaatgttccatcatgttccatgctgctgacgtcacatggagcacagaaatcaatgttagcagatagccagcccatacaagatcgttttcaactagtggccccactgtgtccggaattgatgggttcttggtctcactgacttcaagaatgaagccgcggaccctcgcggtgagtgttacagctcttaaggtggcgcatctggagtttgttccttctgatgttcggatgtgttcggagtttcttccttctggtgggttcgtggtctcgctggctcaggagtgaagctacagaccttcgcggaggcattgtggatggatggctgctggaaaccccttgccatagccagctcttcttcaatacttaaggatttaccgtggctttgagtaatgagaatttcgaaaccacatttgagaagtatttccatccagtgctacttgtgtttacttctaaacagtcattttctaactgaagctggcattcatgtcttcattttgggatgcagctaatatacccagttggcccaaagcacctaacctatagttatataatctgactctcagttcagttttactctactaatgccttcatggtattgggaaccatagatttgtgcagctgtttcagtgcagggcttcctaaaacagaagccaactgggtgaatgtaataagtgatttgaaaaaaattgaagatcttattcaatctatgcatattgatgctactttatatacggaaagtgatgttcaccccagttgcaaagtaacagcaatgaagtgctttctcttggagttacaagttatttcacttgagtccggagatgcaagtattcatgatacagtagaaaatctgatcatcctagcaaacaacagtttgtcttctaatgggaatgtaacagaatctggatgcaaagaatgtgaggaactggaggaaaaaaatattaaagaatttttgcagagttttgtacatattgtccaaatgttcatcaacacttcttgattgcaattgattctttttaaagtgtttctgttattaacaaacatcactctgctgcttagacataacaaaacactcggcatttcaaatgtgctgtcaaaacaagtttttctgtcaagaagatgatcagaccttggatcagatgaactcttagaaatgaaggcagaaaaatgtcattgagtaatatagtgactatgaacttctctcagacttactttactcatttttttaatttattattgaaattgtacatatttgtggaataatgtaaaatgttgaataaaaatatgtacaagtgttgttttttaagttgcactgatattttacctcttattgc

SEQ ID NO: 9794 - DNA, 1355 bp, Homo sapiens
  source 1..1355: mol_type = unassigned DNA; mol_type = unassigned DNA
cacttctgaggctctcctagccatcctcccgcttccggaggagcgcagatcgcaggtccctttgcccctggcgtgcgactccctactgcgctgcgctcttacggcgttccaggctgctggctagcgcaaggcgggccgggcaccccgcgctccgctgggagggtgagggacgcgcgtctggcggccccagccaagctgcgggtttctgagaagacgctgtcccgcagccctgagggctgagttctgcacccagtcaagctcaggaaggccaagaaaagtttcaactagtggccccactgtgtccggaattgatgggttcttggtctcactgacttcaagaatgaagccgcggaccctcgcggtgagtgttacagctcttaaggtggcgcatctggagtttgttccttctgatgttcggatgtgttcggagtttcttccttctggtgggttcgtggtctcgctggctcaggagtgaagctacagaccttcgcgattgtattgtaggaggcattgtggatggatggctgctggaaaccccttgccatagccagctcttcttcaatacttaaggatttaccgtggctttgagtaatgagaatttcgaaaccacatttgagaagtatttccatccagtgctacttgtgtttacttctaaacagtcattttctaactgaagctggcattcatgtcttcattttgggctgtttcagtgcagggcttcctaaaacagaagccaactgggtgaatgtaataagtgatttgaaaaaaattgaagatcttattcaatctatgcatattgatgctactttatatacggaaagtgatgttcaccccagttgcaaagtaacagcaatgaagtgctttctcttggagttacaagttatttcacttgagtccggagatgcaagtattcatgatacagtagaaaatctgatcatcctagcaaacaacagtttgtcttctaatgggaatgtaacagaatctggatgcaaagaatgtgaggaactggaggaaaaaaatattaaagaatttttgcagagttttgtacatattgtccaaatgttcatcaacacttcttgattgcaattgattctttttaaagtgtttctgttattaacaaacatcactctgctgcttagacataacaaaacactcggcatttcaaatgtgctgtcaaaacaagtttttctgtcaagaagatgatcagaccttggatcagatgaactcttagaaatgaaggcagaaaaatgtcattgagtaatatagtgactatgaacttctctcagacttactttactcatttttttaatttattattgaaattgtacatatttgtggaataatgtaaaatgttg

SEQ ID NO: 9795 - DNA, 6026 bp, Homo sapiens
  source 1..6026: mol_type = unassigned DNA; mol_type = unassigned DNA
catttgatgtgtccatcattcccttttgctggatatacttcccttgactgacttctagaatatgatactcttcattttccccttattcagtagtcattccttttgatttttctttcctggtccttcttttataatccttgacctaattaatactgaagtatcccatgctcaggttttggtccttttctctacctacatcactccctcatgagcactctgatgagttgcatatctatttccagttcagacacattcctgaactcgagatttatgtatccaatggcatatttgatatttccttgtgcatatctaatgagcctttcaaactcagcatgtccagaactgaaactcctgacctgtcccctctcctcaaggcatcagctgtgtccaaggcttgcttttttcagttgatgtcagctccatcttctcaggtgttcagaggaaaagactcagagtcattctcattctctttttcctcctgtaccctgcaatctgtctggaaattatattagtcctatcataaaaaatgattccagactctaaccacatgtatctatctccactgctaccccaagcagattcaggtcctcctctcctccacctttctgacctcatctcagactactcttgcccttgctcattccactggcttcttttctgtcccttagactcatagccacacagttgcctctgccctagctattccctctgcttcaaatagtcttcactgagataccaccggggctcacaccctttctatctttaccctgactacccaaaatttcaacctcacccttcttaccttgtttcctttttcctagataatttttcactctctaataaaatacataattataataacttatttgtgcattttctatatggttcatctttctttctgaaatcaagattgtgttctgccatcattgatgtattccaaggtcataaaaaatgcctagcccataataaatattcagtgaatatttactaaatgaatcaaggaaagtgatgttgtcttatagtctctatattctattcagtctcggcttgtcttttctagtggtttgaatgaatggatgatgcatttaacccagaaaaccaatacttgtaaatcttttattcttgtatgtttaattaattttaaatgtgtgattagacaagttaataagcagaacaaaacatcaagtatgttagatcatctttcctcactgggaagaactataatattggtatagaatgtaagatgtttacagttattttcacaagcaatgatttgcttgggaaatagcaatggtgtgagccccgacagtatctgggtgaagaatatttgaagcagaaggaaaatctagagcagaggcaactgtgtgactacgagtctaagggacagttttcactccagaatgaaaactatagagatgcctgcctgcgttaacttgctcacctcactatgtattttccctgggcagtaccatcctgctaggatttcagtgctgccatgagtcagcagtcaccttgcagtgagatccaatcacaagattccaaacaattcctaccctgtgagctccttgaggacagggctgggatttagtctcttttatttcacaggcccagagttctaggatggcagaatggtttcgggtgccaggccccacctggttgctctccatgggcatactgcccagggctgccttgggacttggctccctacattttggtgcagcagtcttcagccaccccaactatggcttaagtggccccagctgcagcttgacccactgcttcacaagatacaggtggtaagccttggtgaaattcatgtagtgttaagcctgcagtctcacagaatacaagagctgagggggcatggcttcctccactttgatttcaaaagatgatgctgacttatttggggcacaggcagagactttgcacaggggtagaaccaccacagagagcccccaacagggcggtgcctcatggagccaaggaaatggggttgccaccaaaatcctagaattatggttaacagtgtagagctgcagtctggaaaagcttcaggcatgagactccaacccatgacagctgaagaataggctgagcctaggaaagctatgggagctgagctgcctgaggccttaggggtccaacccccacccagtgtgcccaggatgcagaatatggagtgaaaggaaattattctccaactttaagatttaatattgttctccctgttgggttttggacttgtttcagatgagttatccctcttttcttgcctatttccccattttagaatgggaatgtctcttctataccttcgcacattgtattttggaagcagatagcttattttgatttcacaggctcgtggttgcagaacatttgccttcaggatgaagtcacacccatatttgatttagataagtattacctagataactcgattaactagatttagataagtattaactaacagtattaagagttaatactggagtgacttttgagcctactaggatggaatgaatatattttgcattgtatgaaggatgtgaatttggcagagaggggagggtaggtgcagaatgctatggtttgaatgcctccaccaaaactcatgttgacatttaattgtgaatgtgacagttttaagaagtgggatctttaacaggtaattaggtatctctttaggcactttcattagacagggccctcatgaatggattaatgcagttatggagggagtgagtttgttattgcatgagtgggctccttattaaagggtgattttggctcagtttcctctctgtctcatgtgcttgctttcacttctacccttctgccacaggatgacccttagcagatgtcagtgccatgcacttgtacttcccagcctccagaactgtgagccaaatgagcttgtgtcccttgtaaattaagtttgtggtgttctcttatagcagcagaaaatggattcaggcagcaagcagagctataaaatacttctttttttttttttttgagatggagtttcacttttgttgcccaggctgtagtgcaaaggcatgatctcggctcaccacaacctctttctcccgggttcaagcaattgtctggcctcagcctcccgagtagctgggattacaggcatgcactatcacacccggctgattttgtatttttttgtaaagacggggtttcaccatgttggtcaggctgatctcaaactcccgacatcaggtgatcctcctgcctcggcctcccaaactgctgggattacaggcacgagccaccatgcccggccaatacttcttttcatctacactggcttccattatcatgattttgttagatacttttgaggacattttctattgcattcctccatgtttggcaaccacactctatggtggagtcttctggctaagcacttagtcttcttttacttataccagcaggatgtagttgagcagggtagtgaaaatccattgtgacattgtaaagcctcactgctataagaggccaggaatgaaattttcattgtttacaaaagtagcttcgtaaggcctaattaagaattatatcacccatggcattgctcaatcccaagtcaatattttttttttttgaaaaatgtggattcaaggataccacaactaaaagggatgtagggaatttaagaggctttggatgaaatgatgaagattacggtaaagttttataaaaaatttgaagcactgagataatatagacaaagggaataattataaaatgagagtgataaggaaggtttgctttaaataaaccaatcaatgagtgatttagatcatatgtaacaggaatattagatttgatatgttcttgtggacaaaaaggtatttctattggatacacctttgtatcttgcttaatacctaaataagtgttagctttttctttctatgagttatagacaatacattttaaagcagccattttttatatttcagaaacatctgaaaagtataataatttaattctttgtgtttatggaacttaattcagtgaatatttatgtcatgggttgtggcagattttggttttttgtggaagaggtcaccatgtatatactattttgaagggcagaaaatagttgtttctatttttgtatattttggttataaactgcttttaatggcatggagttgaatttagggatgtttaatcttcatattcttcacttgatttgagtgagaaaaaataaaattttcttggttataaaattctcaaatgattaacaatggtttctttaaaagactgaagatacatattcagtggctgtagaaatggctactgctattgtaaactggattaacaatcagtacttctacaaatctaagtatttgtttgtttttactttttactagtatgactctggaatttttcaattcagggaaataatagaatagaaaagctttgctaaggcattgtaatcagacagaactggcctcaaatcctggctgtcatgtacttgctatgggcctagagtagcttacctaaatgctactaaccttcctccataccattattgtaaagattaaaggtgatgcatctgttaagtaactaatagagtgcttattaaaaggtaggtgttcaataagtattaattccctccctttctttttcttactagtgcacttgtgtttttaatggatcatactttaccctagattgtattgtaggaggcattgtggatggatggctgctggaaaccccttgccatagccagctcttcttcaatacttaaggatttaccgtggctttgagtaatgagaatttcgaaaccacatttgagaagtatttccatccagtgctacttgtgtttacttctaaacagtcattttctaactgaagctggcattcatgtcttcattttgggatgcagctaatatacccagttggcccaaagcacctaacctatagttatataatctgactctcagttcagttttactctactaatgccttcatggtattgggaaccatagatttgtgcagctgtttcagtgcagggcttcctaaaacagaagccaactgggtgaatgtaataagtgatttgaaaaaaattgaagatcttattcaatctatgcatattgatgctactttatatacggaaagtgatgttcaccccagttgcaaagtaacagcaatgaagtgctttctcttggagttacaagttatttcacttgagtccggagatgcaagtattcatgatacagtagaaaatctgatcatcctagcaaacaacagtttgtcttctaatgggaatgtaacagaatctggatgcaaagaatgtgaggaactggaggaaaaaaatattaaagaatttttgcagagttttgtacatattgtccaaatgttcatcaacacttcttgattgcaattgattctttttaaagtgtttctgttattaacaaacatcactctgctgcttagacataacaaaacactcggcatttcaaatgtgctgtcaaaacaagtttttctgtcaagaagatgatcagaccttggatcagatgaactcttagaaatgaaggcagaaaaatgtcattgagtaatatagtgactatgaacttctctcagacttactttactcatttttttaatttattattgaaattgtacatatttgtggaataatgtaaaatgttgaataaaaatatgtacaagtgttgttttttaagttgcactgatattttacctcttattgcaaaatagcatttgtttaagggtgatagtcaaattatgtattggtggggctgggtaccaatgctgcaggtcaacagctatgctggtaggctcctgccagtgtggaaccactgactactggctctcattgacttccttactaagcatagcaaacagaggaagaatttgttatcagtaagaaaaagaagaactatatgtgaatcctcttctttatactgtaatttagttattgatgtataaagcaactgttatgaaataaagaaattgcaataactggc

SEQ ID NO: 9796 - DNA, 645 bp, Homo sapiens
  source 1..645: mol_type = unassigned DNA; mol_type = unassigned DNA
agacagaactggcctcaaatcctggctgtcatgtacttgctatgggcctagagtagcttacctaaatgctactaaccttcctccataccattattgtaaagattaaaggtgatgcatctgttaagtaactaatagagtgcttattaaaaggtaggtgttcaataagtattaattccctccctttctttttcttactagtgcacttgtgtttttaatggatcatactttaccctagattgtattgtaggaggcattgtggatggatggctgctggaaaccccttgccatagccagctcttcttcaatacttaaggatttaccgtggctttgagtaatgagaatttcgaaaccacatttgagaagtatttccatccagtgctacttgtgtttacttctaaacagtcattttctaactgaagctggcattcatgtcttcattttggggtaattttatctttaggcataaataacattatgttcatggtcatgatgattgtccttggatatattttccattaaattagtttacgttcagtttgcttatatctctaggtactcagtatctgggggatagaaggcagactacagagatttagagaggtttggtaaacacctaactgagcatttttctacattgtggtaata

SEQ ID NO: 9797 - DNA, 272 bp, Homo sapiens
  source 1..272: mol_type = unassigned DNA; mol_type = unassigned DNA
ggctgttgaatgcacagaagcaaggataacactgattttttcactggtcagaataaaaattattgattgctcttttgcttatagtattcatcaagatgaataggctccttcaaaatgctttgctctatggtttttctttcagctgtttcagtgcagggcttcctaaaacagaagccaactgggtgaatgtaataagtgatttgaaaaaaattgaagatcttattcaatctatgcatattgatgctactttatatacggaaagtgatgttcac

SEQ ID NO: 9798 - DNA, 1545 bp, Homo sapiens
  source 1..1545: mol_type = unassigned DNA; mol_type = unassigned DNA
atggtattgggaaccatagatttgtgcagctgtttcagtgcagggcttcctaaaacagaagccaactgggtgaatgtaataagtgatttgaaaaaaattgaagatcttattcaatctatgcatattgatgctactttatatacggaaagtgatgttcaccccagttgcaaagtaacagcaatgaagtgctttctcttggagttacaagttatttcacttgagtccggagatgcaagtattcatgatacagtagaaaatctgatcatcctagcaaacaacagtttgtcttctaatgggaatgtaacagaatctggatgcaaagaatgtgaggaactggaggaaaaaaatattaaagaatttttgcagagttttgtacatattgtccaaatgttcatcaacacttcttgattgcaattgattctttttaaagtgtttctgttattaacaaacatcactctgctgcttagacataacaaaacactcggcatttcaaatgtgctgtcaaaacaagtttttctgtcaagaagatgatcagaccttggatcagatgaactcttagaaatgaaggcagaaaaatgtcattgagtaatatagtgactatgaacttctctcagacttactttactcatttttttaatttattattgaaattgtacatatttgtggaataatgtaaaatgttgaataaaaatatgtacaagtgttgttttttaagttgcactgatattttacctcttattgcaaaatagcatttgtttaagggtgatagtcaaattatgtattggtggggctgggtaccaatgctgcaggtcaacagctatgctggtaggctcctgccagtgtggaaccactgactactggctctcattgacttccttactaagcatagcaaacagaggaagaatttgttatcagtaagaaaaagaagaactatatgtgaatcctcttctttatactgtaatttagttattgatgtataaagcaactgttatgaaataaagaaattgcaataactggcatataatgtccatcagtaaatcttggtggtggtggcaataataaacttctactgataggtagaatggtgtgcaagcttgtccaatcacggattgcaggccacatgcggcccaggacaactttgaatgtggcccaacacaaattcataaactttcatacatctcgtttttagctcatcagctatcattagcggtagtgtatttaaagtgtggcccaagacaattcttcttattccaatgtggcccagggaaatcaaaagattggatgcccctggtatagaaaactaatagtgacagtgttcatatttcatgctttcccaaatacaggtattttattttcacattctttttgccatgtttatataataataaagaaaaaccctgttgatttgttggagccattgttatctgacagaaaataattgtttatattttttgcactacactgtctaaaattagcaagctctcttctaatggaactgtaagaaagatgaaatatttttgttttattataaatttatttcacctt

SEQ ID NO: 9799 - DNA, 545 bp, Homo sapiens
  source 1..545: mol_type = unassigned DNA; mol_type = unassigned DNA
aatccgctcgggtccccttccacaagaagctttgttcttttgctctttgggtccacactgcctttatgagcagtaacactcaccgcgaaggtctgcagcttcactcctgaagccagcgagatcactgagcccaccgagaggaacgaacaactccagacgcgccaccttaagagctgtaacactcaccgcgaaagtctgcagcttcactcctgagccagcgagaccacgaacccgccagaaagaagaaactcggaacacatctgaacgtcagaaggagcaaactccggacacgtcgcctttaagaactgtaacactgaccgcgagggtccgaggcttcattcttgaagtcagtgagaccaagaacccaccaattccggacacaacgccgttctcctgcctcagcctcccgcgtagctgggactacagccgagaagctgccatcgatcctcccatggacccctgatcctggtttggaggaacttttcacagctctctctccctccctcaaaccctgtgcaatgagtttgcagaagagagtcttcccg

SEQ ID NO: 9800 - DNA, 2977 bp, Homo sapiens
  source 1..2977: mol_type = unassigned DNA; mol_type = unassigned DNA
catttgcttctcaaggagggcaggagttggaagcgaccgttgtgaaacgttaaagattttctggcagagggaaagggattttttttttctccctccctgccgaggaaaaaacagttctaacgaggagttactttgtagttttaactcatattcaaatactcccagccgagaagctgccatcgatcctcccatggacccctgatcctggtttggaggaacttttcacagctctctctccctccctcaaaccctgtgcaatgagtttgcagaagagagtcttcccgagaaggcagaacgggactcatgaagtggcagctaagccctgtccagtggccacccgtcagccaagggccagagaccaggaaaggaagaaaggcagcttcacttcctctttgaggatggagtcgcacagccgcgctggaaagagcagaaaatctgcaaaatttcggtccatctccaggtccctgatgctctgtaatgctaagaccagtgatgatggctctagccctgatgagaaatatcctgatccctttgagatttccttggcccagggcaaggagggaattttccactcatctgtgcagctggcagacacatcggaggctgggcccagcagtgttcctgatctagcactggcctcggaggctgctcaactccaagcagctgggaatgatcgaggcaagacctgtaggaggatattcttcatgaaggaatcttccacagcttcctctcgagaaaagcctggaaaactagaagcacaaagtagtaacttcctgtttcctaaagcctgccaccaaagggcacgcagcaactcaaccagtgttaatccctattgcacaagagaaattgattttccaatgaccaagaaatctgcagcgcccacggacaggcagccttactctctctgcagtaacaggaagtccctctctcaacaattggactgtccagcaggaaaggctgcgggaacttcgagaccaacacggtccctgagcacagctcagctcgtgcagccatctgggggcctccaggcttcagtcatctccaacatcgtgctgatgaagggccaggctaagggtctgggcttcagcatcgttgggggaaaagacagcatttatggccccattgggatttacgtcaaaaccatttttgcagggggagcagcagcagccgatggaaggctacaggaaggtgatgaaattctggagctcaatggtgaatcaatggctggactaacacatcaggatgctttgcagaagttcaagcaagccaaaaaggggctcctcaccctcaccgtgagaacccgcctgacggcgcctccttccctgtgcagccacctgtctcccccactgtgccgctccctgagctccagcacttgtatcaccaaggacagcagctccttcgccttggaaagcccctcggctcccatcagcaccgccaagcccaattacagaatcatggtggaggtttctctgcagaaagaggccggcgtgggcctgggcatcggcctgtgcagcgttccctacttccaatgcatctctggcattttcgtccacacgctgtcaccaggatccgtggcgcacctggacggacgtctccggtgtggggacgagattgtggaaatcagtgattcccctgtgcactgcctgacgctcaatgaagtctacacgatcctgagtcactgtgatcccggtccagtccccatcattgttagccgacatccagacccacagaaggaagaaatggaggctcaggaggttaagtaacttgtctaggtgttcacacctagacagtagaggaaccgggactagaacacaagcctttttgactctaggactcatactcttaactattactccaaagtgataataaactgtctctgaacagcaactcaaagaagctgtggcccaggctgtggaaaacaccaagtttggaaaggagaggcatcagtggagtctggaagatgcagaaatggagttgggtcccccaggaagctgactctgagatggagtttggtctgcaggcagtgtcctggggttcactacctgtggcagggaggggagcaggcagggtagacagagggaggacggagctgaggtgcacacccaacagcttcagccaagccctggagctctgcagccaaagtccccattagagttgtcctatgttggccaacatagctgggcctctgtaaccctatctccagcagtccctggagatgggctgccccattggacaaggcagctgtctgcagctgtggcagcccctggagggacccacagctgaaagtagtctgccagcagcactccccacagctgggacaccaagcccttcctcgatgggtgatctgggtggcatatctccatatacatcagtcataggctcagaaagcttgaatgattttcccaacccaaagtcatacagctcgccagggaccaacaccaagactgccatactccagatccacagtgacttcagataagaagcagatggccgatgtgcagtgtgctgcccgtggcagtcacaggtgaggccagggggtatttctgttttctgaagctcagctgtgaagattctcttgtgcttcccacacaggtgtcaaaaggctggaaagcagttggcacgggcggcccaccttggagaaggaacgagagaagaactcagcacccccgcatcgcagggctcagaaggtcatgatccgctccagcagtgacagcagctacatgtctgggtccccagggggaagtcctgggagtggcagtgctgagaagccgtcctctgacgtggacatcagcacacacagccccagcttgcctctggcacgggagccagtggtgctttctatagcatcctccaggctgccccaggagagcccacccctcccagagagccgggacagccacccgccgctgagactgaagaaatcctttgagattttggtgagaaagcctatgtcctccaagcccaagcctccacccag

SEQ ID NO: 9801 - DNA, 5120 bp, Homo sapiens
  source 1..5120: mol_type = unassigned DNA; mol_type = unassigned DNA
agtttgcagaagagagtcttcccgagaaggcagaacgagggtgtgtggagcactgcgggcgagatggagctgagggaaggcagagctgggactcatgaagtggcagctaagccctgtccagtggccacccgtcagccaagggccagagaccaggaaaggaagaaaggcagcttcacttcctctttgaggatggagtcgcacagccgcgctggaaagagcagaaaatctgcaaaatttcggtccatctccaggtccctgatgctctgtaatgctaagaccagtgatgatggctctagccctgatgagaaatatcctgatccctttgagatttccttggcccagggcaaggagggaattttccactcatctgtgcagctggcagacacatcggaggctgggcccagcagtgttcctgatctagcactggcctcggaggctgctcaactccaagcagctgggaatgatcgaggcaagacctgtaggaggatattcttcatgaaggaatcttccacagcttcctctcgagaaaagcctggaaaactagaagcacaaagtagtaacttcctgtttcctaaagcctgccaccaaagggcacgcagcaactcaaccagtgttaatccctattgcacaagagaaattgattttccaatgaccaagaaatctgcagcgcccacggacaggcagccttactctctctgcagtaacaggaagtccctctctcaacaattggactgtccagcaggaaaggctgcgggaacttcgagaccaacacggtccctgagcacagctcagctcgtgcagccatctgggggcctccaggcttcagtcatctccaacatcgtgctgatgaagggccaggctaagggtctgggcttcagcatcgttgggggaaaagacagcatttatggccccattgggatttacgtcaaaaccatttttgcagggggagcagcagcagccgatggaaggctacaggaaggtgatgaaattctggagctcaatggtgaatcaatggctggactaacacatcaggatgctttgcagaagttcaagcaagccaaaaaggggctcctcaccctcaccgtgagaacccgcctgacggcgcctccttccctgtgcagccacctgtctcccccactgtgccgctccctgagctccagcacttgtatcaccaaggacagcagctccttcgccttggaaagcccctcggctcccatcagcaccgccaagcccaattacagaatcatggtggaggtttctctgcagaaagaggccggcgtgggcctgggcatcggcctgtgcagcgttccctacttccaatgcatctctggcattttcgtccacacgctgtcaccaggatccgtggcgcacctggacggacgtctccggtgtggggacgagattgtggaaatcagtgattcccctgtgcactgcctgacgctcaatgaagtctacacgatcctgagtcactgtgatcccggtccagtccccatcattgttagccgacatccagacccacaggtctctgaacagcaactcaaagaagctgtggcccaggctgtggaaaacaccaagtttggaaaggagaggcatcagtggagtctggaagatgcagaaatggagttgggtcccccaggaagctgactctgagatggagtttggtctgcaggcagtgtcctggggttcactacctgtggcagggaggggagcaggcagggtagacagagggaggacggagctgaggtgcacacccaacagcttcagccaagccctggagctctgcagccaaagtccccattagagttgtcctatgttggccaacatagctgggcctctgtaaccctatctccagcagtccctggagatgggctgccccattggacaaggcagctgtctgcagctgtggcagcccctggagggacccacagctgaaagtagtctgccagcagcactccccacagctgggacaccaagcccttcctcgatgggtgatctgggtggcatatctccatatacatcagtcataggctcagaaagcttgaatgattttcccaacccaaagtcatacagctcgccagggaccaacaccaagactgccatactccagatccacagtgacttcagataagaagcagatggccgatgtgcagtgtgctgcccgtggcagtcacaggtgaggccagggggtatttctgttttctgaagctcagctgtgaagattctcttgtgcttcccacacaggtgtcaaaaggctggaaagcagttggcacgggcggcccaccttggagaaggaacgagagaagaactcagcacccccgcatcgcagggctcagaaggtcatgatccgctccagcagtgacagcagctacatgtctgggtccccagggggaagtcctgggagtggcagtgctgagaagccgtcctctgacgtggacatcagcacacacagccccagcttgcctctggcacgggagccagtggtgctttctatagcatcctccaggctgccccaggagagcccacccctcccagagagccgggacagccacccgccgctgagactgaagaaatcctttgagattttggtgagaaagcctatgtcctccaagcccaagcctccacccagaaaatactttaaaagtgacagtgaccctcagaagagtctggaagagagagagaactcctcatgctcttctgggcacaccccacccacctgtggccaggaagcgagagagctgctgccactgctgctaccacaggaagacacagcagggagaagccctagtgcctctgccggctgcccaggacctggtatcggcccacagaccaagtcctccacagagggcgagccagggtggagaagagccagcccagtgacccaaacatccccgataaaacacccactgcttaagaggcaggctcggatggactatagctttgataccacagccgaagacccttgggttaggatttctgactgcatcaaaaacttatttagccccatcatgagtgagaaccatggccacatgcctctacagcccaatgccagcctgaatgaagaagaagggacacagggccacccagatgggaccccaccaaagctggacaccgccaatggcactcccaaagtttacaagtcagcagacagcagcactgtgaagaaaggtcctcctgtggctcccaagccagcctggtttcgccaaagcttgaaaggtttgaggaatcgtgcttcagacccaagagggctccctgatcctgccttgtccacccagccagcacctgcttccagggagcacctaggatcacacatccgggcctcctcctcctcctcctccatcaggcagagaatcagctcctttgaaacctttggctcctctcaactgcctgacaaaggagcccagagactgagcctccagccctcctctggggaggcagcaaaacctcttgggaagcatgaggaaggacggttttctggactcttggggcgaggggctgcacccactcttgtgccccagcagcctgagcaagtactgtcctcggggtcccctgcagcctccgaggccagagacccaggtgtgtctgagtcccctcccccagggcggcagcccaatcagaaaactctcccccctggcccggacccgctcctaaggctgctgtcaacacaggctgaggaatctcaaggcccagtgctcaagatgcctagccagcgagcacggagcttccccctgaccaggtcccagtcctgtgagacgaagctacttgacgaaaagaccagcaaactctattctatcagcagccaagtgtcatcggctgtcatgaaatccttgctgtgccttccatcttctatctcctgtgcccagactccctgcatccccaaggaaggggcatctccaacatcatcatccaacgaagactcagctgcaaatggttctgctgaaacatctgccttggacacagggttctcgctcaacctttcagagctgagagaatatacagagggtctcacggaagccaaggaagacgatgatggggaccacagttcccttcagtctggtcagtccgttatctccctgctgagctcagaagaattaaaaaaactcatcgaggaggtgaaggttctggatgaagcaacattaaagcaattagacggcatccatgtcaccatcttacacaaggaggaaggtgctggtcttgggttcagcttggcaggaggagcagatctagaaaacaaggtgattacggttcacagagtgtttccaaatgggctggcctcccaggaagggactattcagaagggcaatgaggttctttccatcaacggcaagtctctcaaggggaccacgcaccatgatgccttggccatcctccgccaagctcgagagcccaggcaagctgtgattgtcacaaggaagctgactccagaggccatgcccgacctcaactcctccactgactctgcagcctcagcctctgcagccagtgatgtttctgtagaatctacagcagaggccacagtctgcacggtgacactggagaagatgtcggcagggctgggcttcagcctggaaggagggaagggctccctacacggagacaagcctctcaccattaacaggattttcaaaggagcagcctcagaacaaagtgagacagtccagcctggagatgaaatcttacagctgggtggcactgccatgcagggcctcacacggtttgaagcctggaacatcatcaaggcactgcctgatggacctgtcacgattgtcatcaggagaaaaagcctccagtccaaggaaaccacagctgctggagactcctaggcaggacatgctgaagccaaagccaataacacacagctaacacacagctcccataaccgctgattctcagggtctctgctgccgccccacccagatgggggaaagcacaggtgggcttcccagtggctgctgcccaggcccagaccttctaggacgccacccagcaaaaggttgttcctaaaataagggcagagtcacacgggggcagctgatacaaattgcagactgtgtaaaaagagagcttaatgataatattgtggtgccacaaataaaatggatttattagaatttcatatgaca

SEQ ID NO: 9802 - DNA, 2158 bp, Homo sapiens
  source 1..2158: mol_type = unassigned DNA; mol_type = unassigned DNA
cacatttgtcctgagtcacctgtccagagcaggtggtgaatattgtgtcctactcacggcatctcaactatcggagcctgggatctgactcaaaggccggcctccgtctgagaactgagcgtccatttctcaatccttgccggctctgacccaggcctgggccacaggctgtccgggaataagtggtgctgcaatccctgctgggcagatggagagaggagcaagggagatggcagccccgggggactgtgcatagggaggtaggtgggcaccagggactcatgaagtggcagctaagccctgtccagtggccacccgtcagccaagggccagagaccaggaaaggaagaaaggcagcttcacttcctctttgaggatggagtcgcacagccgcgctggaaagagcagaaaatctgcaaaatttcggtccatctccaggtccctgatgctctgtaatgctaagaccagtgatgatggctctagccctgatgagaaatatcctgatccctttgagatttccttggcccagggcaaggagggaattttccactcatctgtgcagctggcagacacatcggaggctgggcccagcagtgttcctgatctagcactggcctcggaggctgctcaactccaagcagctgggaatgatcgaggcaagacctgtaggaggatattcttcatgaaggaatcttccacagcttcctctcgagaaaagcctggaaaactagaagcacaaagtagtaacttcctgtttcctaaagcctgccaccaaagggcacgcagcaactcaaccagtgttaatccctattgcacaagagaaattgattttccaatgaccaagaaatctgcagcgcccacggacaggcagccttactctctctgcagtaacaggaagtccctctctcaacaattggactgtccagcaggaaaggctgcgggaacttcgagaccaacacggtccctgagcacagctcagctcgtgcagccatctgggggcctccaggcttcagtcatctccaacatcgtgctgatgaagggccaggctaagggtctgggcttcagcatcgttgggggaaaagacagcatttatggccccattgggatttacgtcaaaaccatttttgcagggggagcagcagcagccgatggaaggctacaggaaggtgatgaaattctggagctcaatggtgaatcaatggctggactaacacatcaggatgctttgcagaagttcaagcaagccaaaaaggggctcctcaccctcaccgtgagaacccgcctgacggcgcctccttccctgtgcagccacctgtctcccccactgtgccgctccctgagctccagcacttgtatcaccaaggacagcagctccttcgccttggaaagcccctcggctcccatcagcaccgccaagcccaattacagaatcatggtggaggtttctctgcagaaagaggccggcgtgggcctgggcatcggcctgtgcagcgttccctacttccaatgcatctctggcattttcgtccacacgctgtcaccaggatccgtggcgcacctggacggacgtctccggtgtggggacgagattgtggaaatcagtgattcccctgtgcactgcctgacgctcaatgaagtctacacgatcctgagtcactgtgatcccggtccagtccccatcattgttagccgacatccagacccacaggtctctgaacagcaactcaaagaagctgtggcccaggctgtggaaaacaccaagtttggaaaggagaggcatcagtggagtctggaaggtgtcaaaaggctggaaagcagttggcacgggcggcccaccttggagaaggaacgagagaagaactcagcacccccgcatcgcagggctcagaaggtcatgatccgctccagcagtgacagcagctacatgtctgggtccccagggggaagtcctgggagtggcagtgctgagaagccgtcctctgacgtggacatcagcacacacagccccagcttgcctctggcacgggagccagtggtgctttctatagcatcctccaggctgccccaggagagcccacccctcccagagagccgggacagccacccgccgctgagactgaagaaatcctttgagattttggtgagaaagcctatgtcc

SEQ ID NO: 9803 - DNA, 9616 bp, Homo sapiens
  source 1..9616: mol_type = unassigned DNA; mol_type = unassigned DNA
acatttgtcctgagtcacctgtccagagcaggtggtgaatattgtgtcctactcacggcatctcaactatcggagcctgggatctgactcaaaggccggcctccgtctgagaactgagcgtccatttctcaatccttgccggctctgacccaggcctgggccacaggctgtccgggaataagtggtgctgcaatccctgctgggcagatggagagaggagcaagggagatggcagccccgggggactgtgcatagggagggactcatgaagtggcagctaagccctgtccagtggccacccgtcagccaagggccagagaccaggaaaggaagaaaggcagcttcacttcctctttgaggatggagtcgcacagccgcgctggaaagagcagaaaatctgcaaaatttcggtccatctccaggtccctgatgctctgtaatgctaagaccagtgatgatggctctagccctgatgagaaatatcctgatccctttgagatttccttggcccagggcaaggagggaattttccactcatctgtgcagctggcagacacatcggaggctgggcccagcagtgttcctgatctagcactggcctcggaggctgctcaactccaagcagctgggaatgatcgaggcaagacctgtaggaggatattcttcatgaaggaatcttccacagcttcctctcgagaaaagcctggaaaactagaagcacaaagtagtaacttcctgtttcctaaagcctgccaccaaagggcacgcagcaactcaaccagtgttaatccctattgcacaagagaaattgattttccaatgaccaagaaatctgcagcgcccacggacaggcagccttactctctctgcagtaacaggaagtccctctctcaacaattggactgtccagcaggaaaggctgcgggaacttcgagaccaacacggtccctgagcacagctcagctcgtgcagccatctgggggcctccaggcttcagtcatctccaacatcgtgctgatgaagggccaggctaagggtctgggcttcagcatcgttgggggaaaagacagcatttatggccccattgggatttacgtcaaaaccatttttgcagggggagcagcagcagccgatggaaggctacaggaaggtgatgaaattctggagctcaatggtgaatcaatggctggactaacacatcaggatgctttgcagaagttcaagcaagccaaaaaggggctcctcaccctcaccgtgagaacccgcctgacggcgcctccttccctgtgcagccacctgtctcccccactgtgccgctccctgagctccagcacttgtatcaccaaggacagcagctccttcgccttggaaagcccctcggctcccatcagcaccgccaagcccaattacagaatcatggtggaggtttctctgcagaaagaggccggcgtgggcctgggcatcggcctgtgcagcgttccctacttccaatgcatctctggcattttcgtccacacgctgtcaccaggatccgtggcgcacctggacggacgtctccggtgtggggacgagattgtggaaatcagtgattcccctgtgcactgcctgacgctcaatgaagtctacacgatcctgagtcactgtgatcccggtccagtccccatcattgttagccgacatccagacccacaggtctctgaacagcaactcaaagaagctgtggcccaggctgtggaaaacaccaagtttggaaaggagaggcatcagtggagtctggaaggtgtcaaaaggctggaaagcagttggcacgggcggcccaccttggagaaggaacgagagaagaactcagcacccccgcatcgcagggctcagaaggtcatgatccgctccagcagtgacagcagctacatgtctgggtccccagggggaagtcctgggagtggcagtgctgagaagccgtcctctgacgtggacatcagcacacacagccccagcttgcctctggcacgggagccagtggtgctttctatagcatcctccaggctgccccaggagagcccacccctcccagagagccgggacagccacccgccgctgagactgaagaaatcctttgagattttggtgagaaagcctatgtcctccaagcccaagcctccacccagaaaatactttaaaagtgacagtgaccctcagaagagtctggaagagagagagaactcctcatgctcttctgggcacaccccacccacctgtggccaggaagcgagagagctgctgccactgctgctaccacaggaagacacagcagggagaagccctagtgcctctgccggctgcccaggacctggtatcggcccacagaccaagtcctccacagagggcgagccagggtggagaagagccagcccagtgacccaaacatccccgataaaacacccactgcttaagaggcaggctcggatggactatagctttgataccacagccgaagacccttgggttaggatttctgactgcatcaaaaacttatttagccccatcatgagtgagaaccatggccacatgcctctacagcccaatgccagcctgaatgaagaagaagggacacagggccacccagatgggaccccaccaaagctggacaccgccaatggcactcccaaagtttacaagtcagcagacagcagcactgtgaagaaaggtcctcctgtggctcccaagccagcctggtttcgccaaagcttgaaaggtttgaggaatcgtgcttcagacccaagagggctccctgatcctgccttgtccacccagccagcacctgcttccagggagcacctaggatcacacatccgggcctcctcctcctcctcctccatcaggcagagaatcagctcctttgaaacctttggctcctctcaactgcctgacaaaggagcccagagactgagcctccagccctcctctggggaggcagcaaaacctcttgggaagcatgaggaaggacggttttctggactcttggggcgaggggctgcacccactcttgtgccccagcagcctgagcaagtactgtcctcggggtcccctgcagcctccgaggccagagacccaggtgtgtctgagtcccctcccccagggcggcagcccaatcagaaaactctcccccctggcccggacccgctcctaaggctgctgtcaacacaggctgaggaatctcaaggcccagtgctcaagatgcctagccagcgagcacggagcttccccctgaccaggtcccagtcctgtgagacgaagctacttgacgaaaagaccagcaaactctattctatcagcagccaagtgtcatcggctgtcatgaaatccttgctgtgccttccatcttctatctcctgtgcccagactccctgcatccccaaggaaggggcatctccaacatcatcatccaacgaagactcagctgcaaatggttctgctgaaacatctgccttggacacagggttctcgctcaacctttcagagctgagagaatatacagagggtctcacggaagccaaggaagacgatgatggggaccacagttcccttcagtctggtcagtccgttatctccctgctgagctcagaagaattaaaaaaactcatcgaggaggtgaaggttctggatgaagcaacattaaagcaattagacggcatccatgtcaccatcttacacaaggaggaaggtgctggtcttgggttcagcttggcaggaggagcagatctagaaaacaaggtgattacggttcacagagtgtttccaaatgggctggcctcccaggaagggactattcagaagggcaatgaggttctttccatcaacggcaagtctctcaaggggaccacgcaccatgatgccttggccatcctccgccaagctcgagagcccaggcaagctgtgattgtcacaaggaagctgactccagaggccatgcccgacctcaactcctccactgactctgcagcctcagcctctgcagccagtgatgtttctgtagaatctacagaggccacagtctgcacggtgacactggagaagatgtcggcagggctgggcttcagcctggaaggagggaagggctccctacacggagacaagcctctcaccattaacaggattttcaaaggagcagcctcagaacaaagtgagacagtccagcctggagatgaaatcttacagctgggtggcactgccatgcagggcctcacacggtttgaagcctggaacatcatcaaggcactgcctgatggacctgtcacgattgtcatcaggagaaaaagcctccagtccaaggaaaccacagctgctggagactcctaggcaggacatgctgaagccaaagccaataacacacagctaacacacagctcccataaccgctgattctcagggtctctgctgccgccccacccagatgggggaaagcacaggtgggcttcccagtggctgctgcccaggcccagaccttctaggacgccacccagcaaaaggttgttcctaaaataagggcagagtcacacgggggcagctgatacaaattgcagactgtgtaaaaagagagcttaatgataatattgtggtgccacaaataaaatggatttattagaatttcatatgacattcatgcctggcttcgcaaaatgtttcaagtactgtaactgtgtcatgattcacccccaaacagtgacatttatttttctcatgaatctgcaatgtgggcagagattggaatgggcagctcatctctgtcccacttggcatcagctggcgtcatgcaaagtcatgcaaaggctgggaccacgtgagatcattcactcatacatctggccgttgatgttggctgggaactcacctggggctgctggcctgaatgcttataggtggcctctccttgtggcctgggcctcctcacaacatggtgtctggattcccaggatgagcatcccaggatcgcaagagccatgtagaagctgcatcttgtttatacctttgccttggaagttgcatggcatcacctccaccatactccatcagttagagctgacacaaacctgcctgggtttaaggggagaggaaatattgctggggtcatttatgaaaaatacagtttgtcacatgaaacatttgcaaaattgtttttggttggattggagaagtaatcctagggaagggtggtggagccagtaaacagaggagtacaggtgaagcaccaagctcaaagcgtggacaggtgtgccgacagaaggaaccagcgtgtatatgagggtatcaaataaaattgctactacttacctaccacatgccaagcactgtgctcagggctaaacgggcattgcctttagtgatcacagcagcttctacggtgtatggttctgtgccaatgtattgataagagggcacacactgtgtacagtaaatggcttatccagctggtgagtgatgcggcagattgagttttcttctgtgattcggtggagactatcagcccaagatgctttaagtgcacaacattacagggaatgcctgagtgcctggccaaagggatatttggtttggccatctctggatgcctgattgccaagctcaggaccaggcaatgtgactttgcatcagcaacaaccagcatcccttgaccaggcctgggccagagtattggtctcctctcagcccctgatcctgtgaagtaaggatgtgggggaagacctggcaaggacacagatgaaacacaaacaatagtaattctcaggccatcatcagtggagccatgttaatgtaatctgatggcttctccagggtccacaggaagtgaagaatctgtttcccagcagtggactcaaaacccatctgggctcctaaccttcctgtaaacccctttagtggcttcattagagcaggcgttcagctcactgttctattcatctcaaggaataatgggcttagagcagtttctgtcctgctggttaacttgtttggcctattccattctggattttgtcaagcagtagacaagcaattagacaagaacttggaggcaccatttgtatccactttttagacttaatagaaacattgaagatgaacataatctaccaacgaaagacgtgattcaattcaacactcccttcccatgacccaggctgggcaaggaggccacgtgatgtggagggcacattccttgcctgcacaaactcaccatctgtgcacgcagtggccttccctaaaatcagggaattgttttaagtcttatcaagcagccaagggatgaaagagaaggtgggttttcatcaagactggaaggtggggacagggatgagcatggagctggccgtgggcctggggtaccaagagactccttgagagaccaggcaaagcaagtgattgggacagaggttatctgtcccaggttatctgggcatagatgcaggtgagcccatggccctcccagtacctcctgtctctggcctgttttagaaggttctctcctccccaaggagacacaacaactcctagggccactgaagatataactattgcccaggtttctggtctctaggctggggaagtcctctgggtaggaatcagcaagaagatcctaaaacaaaagctcatccatttgcgttccatgatgctgggatttacacttgaggcttagctttgctctgccaacttcttcagagctgacacaggatgaaggcaatgccatcctcaaacactgcaggcatcacagctaacaattgtgaagtcgtcttaactcaccataaaaaggaatccactcccaggcagccctacttctttgctttgcccagcattttactgattcatacattatctcacttgtgccaacactcaagaagcaggctacactgacactggtattcctgcctccatattttctttaaaagacaaatcaaagcagatatattaagtgactgttcaagagcacacttggcccaagtggcagagcttggactggatgcatgttttccagctcctcatccagggctctgaccagtttaacctgatgcagtcacgtggaggagcagtgcaggcacagtatgtcccataggcccagtgagatgcattcttggttggctggccttccacttggctacacagggatgtacaaggcgatcccatcttgataagaccaccacctcagagtatggagctcagagagggcaggcatgaagtttccttggctggtgcacctagaattggctgaactcatgagaagttgatatagaacagtgcttgccacagagcggggactcggtaagcacttaatgaatgaatgaattctaagtcaatccaagagtctgatgatttcttgaaaagggtgttagctaaaggatcttaggcatgactgtagaatttgtagttgcaatagaacagagaaagaggaagctttctgtctccttaacactgagctgtcatgttttaaagcttgctcacatcttggcacatttaagagacagtcaccccaggactcaaaaatagggaagtaacagtaacgcaggggaaacgttttctgtttggaggagcaaaggctgagaacactgtgaaaacattttgcgcgcacaatagtaacctgggtaaatgcagcgtgaagggattttagtcacacgtggtctttcttacaaggaaggtggtgggggtgcagatgaggttgctagagaatgttagaggatccctctctggattggagatagggaaagaaagttgcacggctgctgaggccccttctaggtggcaaggctgtgctccctggttctgatgatgtgcctgggtggacatggcccctgtgagtttgtacagtcttgcagcaggatctagaggggggatttccagccagggctgctagacggaggcctactcttccatctttcctgatggcaggatggcctggccagggcctggaagacagagacctcctgcctccgcctcagtaagacgacaaggaaaggcaaatgcccaagggaaagaaaaggaaggctcttctccccagagttccccatgcagacatgagtgcgtgctcagttcagaatcacttctgagaactcatccctaatgctgcagatttgggctggaacagattcacactgtctggtttcaccgaggacatgaaactccaccttgcggggataaagagagaaaaacaaattcatcaaatggaagacacattgaaagtgtttttccttaatgcttatcctgtttttaaaccattatttccaagttgacaccttttttaaggaaaaataaatattttgcggcattaaagccatatacaaggtctatatcagaaaaatatatttggggggctgcagcacaggactgagggagcggtacatgcttaaaaggcaacagggcctggttttcagtggcgatgatgattctctatgacagtcagggaaacgtggtctctgagagtgatgggcacataaagccttggtgccagagtgcatcgcatggtgtccaggccgagtctctgtcagatggttagaggcctgggtctaccctgccaggagaggcgtgtttgggtaacaggcagatggagtttggaacacatgaatggctcatcacacgccaaccctgagtggggcaggaggcaggaagggtgggctgccgcctctggttggcattctcagagatgcgcagtccatcagcttgttccaaagagtgaacacaggcctctgcgtgctcccaggctccttggtgtcccaacagctggagctcctcgatgagtcacgggagttctttgccaagaagtaacgatagcattactcatggaattgcttcactgctttctgaaggttggcataaaaccgggtcatgctgcgggggaagaaggagtccaccacgttctgtgggaggtaaccgctgaggtcggtatggaagaatgtgaccaggttggtcttggtgggttccctgtgaaggcaacagcagagctgtgttatgatctgcagcagaggtgctggggacgagcgccaggcaggtgagcagagcccagcccagtggaaatggccatgatacagtgatcgcgtctcatcccttgctgtgccctccacccaggagtcctctctggacctgctgattttcaggatggaaacccatcctgtcggggatgcattccacagcctctcccggcctccagggaggaagaagtccctactcccagcccaaaaacccagtaccctgctgcccgattcactcagcaaatgctttcagagaactcactttgtgccaggccctgagaggaacgaagagatgctgcccttcactatttagggtctgcaacctcctgggggctcctgggaccctttcaaggggtctacaaagttaacactatttttataacaacacgaacatgtgattcgccttctctcacatgcatacagtggggttttccggaggttacatgatatgtgatattgcaacagactacacgcacaagcaggtatgagtttctgttaagcctggcatgaaagagatgggcaaaaatataaaaacaatgccactcttttcacagtattttttgttttaaaaaaatagttttttaaaataaaaatgttatctatgttaa

SEQ ID NO: 9804 - DNA, 3999 bp, Homo sapiens
  source 1..3999: mol_type = unassigned DNA; mol_type = unassigned DNA
atggagtcgcacagccgcgctggaaagagcagaaaatctgcaaaatttcggtccatctccaggtccctgatgctctgtaatgctaagaccagtgatgatggctctagccctgatgagaaatatcctgatccctttgagatttccttggcccagggcaaggagggaattttccactcatctgtgcagctggcagacacatcggaggctgggcccagcagtgttcctgatctagcactggcctcggaggctgctcaactccaagcagctgggaatgatcgaggcaagacctgtaggaggatattcttcatgaaggaatcttccacagcttcctctcgagaaaagcctggaaaactagaagcacaaagtagtaacttcctgtttcctaaagcctgccaccaaagggcacgcagcaactcaaccagtgttaatccctattgcacaagagaaattgattttccaatgaccaagaaatctgcagcgcccacggacaggcagccttactctctctgcagtaacaggaagtccctctctcaacaattggactgtccagcaggaaaggctgcgggaacttcgagaccaacacggtccctgagcacagctcagctcgtgcagccatctgggggcctccaggcttcagtcatctccaacatcgtgctgatgaagggccaggctaagggtctgggcttcagcatcgttgggggaaaagacagcatttatggccccattgggatttacgtcaaaaccatttttgcagggggagcagcagcagccgatggaaggctacaggaaggtgatgaaattctggagctcaatggtgaatcaatggctggactaacacatcaggatgctttgcagaagttcaagcaagccaaaaaggggctcctcaccctcaccgtgagaacccgcctgacggcgcctccttccctgtgcagccacctgtctcccccactgtgccgctccctgagctccagcacttgtatcaccaaggacagcagctccttcgccttggaaagcccctcggctcccatcagcaccgccaagcccaattacagaatcatggtggaggtttctctgcagaaagaggccggcgtgggcctgggcatcggcctgtgcagcgttccctacttccaatgcatctctggcattttcgtccacacgctgtcaccaggatccgtggcgcacctggacggacgtctccggtgtggggacgagattgtggaaatcagtgattcccctgtgcactgcctgacgctcaatgaagtctacacgatcctgagtcactgtgatcccggtccagtccccatcattgttagccgacatccagacccacaggtctctgaacagcaactcaaagaagctgtggcccaggctgtggaaaacaccaagtttggaaaggagaggcatcagtggagtctggaaggtgtcaaaaggctggaaagcagttggcacgggcggcccaccttggagaaggaacgagagaagaactcagcacccccgcatcgcagggctcagaaggtcatgatccgctccagcagtgacagcagctacatgtctgggtccccagggggaagtcctgggagtggcagtgctgagaagccgtcctctgacgtggacatcagcacacacagccccagcttgcctctggcacgggagccagtggtgctttctatagcatcctccaggctgccccaggagagcccacccctcccagagagccgggacagccacccgccgctgagactgaagaaatcctttgagattttggtgagaaagcctatgtcctccaagcccaagcctccacccagaaaatactttaaaagtgacagtgaccctcagaagagtctggaagagagagagaactcctcatgctcttctgggcacaccccacccacctgtggccaggaagcgagagagctgctgccactgctgctaccacaggaagacacagcagggagaagccctagtgcctctgccggctgcccaggacctggtatcggcccacagaccaagtcctccacagagggcgagccagggtggagaagagccagcccagtgacccaaacatccccgataaaacacccactgcttaagaggcaggctcggatggactatagctttgataccacagccgaagacccttgggttaggatttctgactgcatcaaaaacttatttagccccatcatgagtgagaaccatggccacatgcctctacagcccaatgccagcctgaatgaagaagaagggacacagggccacccagatgggaccccaccaaagctggacaccgccaatggcactcccaaagtttacaagtcagcagacagcagcactgtgaagaaaggtcctcctgtggctcccaagccagcctggtttcgccaaagcttgaaaggtttgaggaatcgtgcttcagacccaagagggctccctgatcctgccttgtccacccagccagcacctgcttccagggagcacctaggatcacacatccgggcctcctcctcctcctcctccatcaggcagagaatcagctcctttgaaacctttggctcctctcaactgcctgacaaaggagcccagagactgagcctccagccctcctctggggaggcagcaaaacctcttgggaagcatgaggaaggacggttttctggactcttggggcgaggggctgcacccactcttgtgccccagcagcctgagcaagtactgtcctcggggtcccctgcagcctccgaggccagagacccaggtgtgtctgagtcccctcccccagggcggcagcccaatcagaaaactctcccccctggcccggacccgctcctaaggctgctgtcaacacaggctgaggaatctcaaggcccagtgctcaagatgcctagccagcgagcacggagcttccccctgaccaggtcccagtcctgtgagacgaagctacttgacgaaaagaccagcaaactctattctatcagcagccaagtgtcatcggctgtcatgaaatccttgctgtgccttccatcttctatctcctgtgcccagactccctgcatccccaaggaaggggcatctccaacatcatcatccaacgaagactcagctgcaaatggttctgctgaaacatctgccttggacacagggttctcgctcaacctttcagagctgagagaatatacagagggtctcacggaagccaaggaagacgatgatggggaccacagttcccttcagtctggtcagtccgttatctccctgctgagctcagaagaattaaaaaaactcatcgaggaggtgaaggttctggatgaagcaacattaaagcaattagacggcatccatgtcaccatcttacacaaggaggaaggtgctggtcttgggttcagcttggcaggaggagcagatctagaaaacaaggtgattacggttcacagagtgtttccaaatgggctggcctcccaggaagggactattcagaagggcaatgaggttctttccatcaacggcaagtctctcaaggggaccacgcaccatgatgccttggccatcctccgccaagctcgagagcccaggcaagctgtgattgtcacaaggaagctgactccagaggccatgcccgacctcaactcctccactgactctgcagcctcagcctctgcagccagtgatgtttctgtagaatctacagcagaggccacagtctgcacggtgacactggagaagatgtcggcagggctgggcttcagcctggaaggagggaagggctccctacacggagacaagcctctcaccattaacaggattttcaaaggagcagcctcagaacaaagtgagacagtccagcctggagatgaaatcttacagctgggtggcactgccatgcagggcctcacacggtttgaagcctggaacatcatcaaggcactgcctgatggacctgtcacgattgtcatcaggagaaaaagcctccagtccaaggaaaccacagctgctggagactcctag

SEQ ID NO: 9805 - DNA, 3775 bp, Homo sapiens
  source 1..3775: mol_type = unassigned DNA; mol_type = unassigned DNA
gcagaagttcaagcaagccaaaaaggggctcctcaccctcaccgtgagaacccgcctgacggcgcctccttccctgtgcagccacctgtctcccccactgtgccgctccctgagctccagcacttgtatcaccaaggacagcagctccttcgccttggaaagcccctcggctcccatcagcaccgccaagcccaattacagaatcatggtggaggtttctctgcagaaagaggccggcgtgggcctgggcatcggcctgtgcagcgttccctacttccaatgcatctctggcattttcgtccacacgctgtcaccaggatccgtggcgcacctggacggacgtctccggtgtggggacgagattgtggaaatcagtgattcccctgtgcactgcctgacgctcaatgaagtctacacgatcctgagtcactgtgatcccggtccagtccccatcattgttagccgacatccagacccacaggtctctgaacagcaactcaaagaagctgtggcccaggctgtggaaaacaccaagtttggaaaggagaggcatcagtggagtctggaagatgcagaaatggagttgggtcccccaggaagctgactctgagatggagtttggtctgcaggcagtgtcctggggttcactacctgtggcagggaggggagcaggcagggtagacagagggaggacggagctgaggtgcacacccaacagcttcagccaagccctggagctctgcagccaaagtccccattagagttgtcctatgttggccaacatagctgggcctctgtaaccctatctccagcagtccctggagatgggctgccccattggacaaggcagctgtctgcagctgtggcagcccctggagggacccacagctgaaagtagtctgccagcagcactccccacagctgggacaccaagcccttcctcgatgggtgatctgggtggcatatctccatatacatcagtcataggctcagaaagcttgaatgattttcccaacccaaagtcatacagctcgccagggaccaacaccaagactgccatactccagatccacagtgacttcagataagaagcagatggccgatgtgcagtgtgctgcccgtggcagtcacaggtgaggccagggggtatttctgttttctgaagctcagctgtgaagattctcttgtgcttcccacacaggtgtcaaaaggctggaaagcagttggcacgggcggcccaccttggagaaggaacgagagaagaactcagcacccccgcatcgcagggctcagaaggtcatgatccgctccagcagtgacagcagctacatgtctgggtccccagggggaagtcctgggagtggcagtgctgagaagccgtcctctgacgtggacatcagcacacacagccccagcttgcctctggcacgggagccagtggtgctttctatagcatcctccaggctgccccaggagagcccacccctcccagagagccgggacagccacccgccgctgagactgaagaaatcctttgagattttggtgagaaagcctatgtcctccaagcccaagcctccacccagaaaatactttaaaagtgacagtgaccctcagaagagtctggaagagagagagaactcctcatgctcttctgggcacaccccacccacctgtggccaggggctaattctgaagtctcccatgaagaggatgcaatattggatgtgttgatgaaaagacaaaacacatttgtgctgttctaagttgtaaagctgcattgactgcagttggtatcacatgtggctgcctgtaaaagagctaacaattcatgaatgtcaacagatgtcaacttacagagctcccaaccaggaagcgagagagctgctgccactgctgctaccacaggaagacacagcagggagaagccctagtgcctctgccggctgcccaggacctggtatcggcccacagaccaagtcctccacagagggcgagccagggtggagaagagccagcccagtgacccaaacatccccgataaaacacccactgcttaagaggcaggctcggatggactatagctttgataccacagccgaagacccttgggttaggatttctgactgcatcaaaaacttatttagccccatcatgagtgagaaccatggccacatgcctctacagcccaatgccagcctgaatgaagaagaagggacacagggccacccagatgggaccccaccaaagctggacaccgccaatggcactcccaaagtttacaagtcagcagacagcagcactgtgaagaaaggtcctcctgtggctcccaagccagcctggtttcgccaaagcttgaaaggtttgaggaatcgtgcttcagacccaagagggctccctgatcctgccttgtccacccagccagcacctgcttccagggagcacctaggatcacacatccgggcctcctcctcctcctcctccatcaggcagagaatcagctcctttgaaacctttggctcctctcaactgcctgacaaaggagcccagagactgagcctccagccctcctctggggaggcagcaaaacctcttgggaagcatgaggaaggacggttttctggactcttggggcgaggggctgcacccactcttgtgccccagcagcctgagcaagtactgtcctcggggtcccctgcagcctccgaggccagagacccaggtgtgtctgagtcccctcccccagggcggcagcccaatcagaaaactctcccccctggcccggacccgctcctaaggctgctgtcaacacaggctgaggaatctcaaggcccagtgctcaagatgcctagccagcgagcacggagcttccccctgaccaggtcccagtcctgtgagacgaagctacttgacgaaaagaccagcaaactctattctatcagcagccaagtgtcatcggctgtcatgaaatccttgctgtgccttccatcttctatctcctgtgcccagactccctgcatccccaaggaaggggcatctccaacatcatcatccaacgaagactcagctgcaaatggttctgctgaaacatctgccttggacacagggttctcgctcaacctttcagagctgagagaatatacagagggtctcacggaagccaaggaagacgatgatggggaccacagttcccttcagtctggtcagtccgttatctccctgctgagctcagaagaattaaaaaaactcatcgaggaggtgaaggttctggatgaagcaacattaaagcaattagacggcatccatgtcaccatcttacacaaggaggaaggtgctggtcttgggttcagcttggcaggaggagcagatctagaaaacaaggtgattacggttcacagagtgtttccaaatgggctggcctcccaggaagggactattcagaagggcaatgaggttctttccatcaacggcaagtctctcaaggggaccacgcaccatgatgccttggccatcctccgccaagctcgagagcccaggcaagctgtgattgtcacaaggaagctgactccagaggccatgcccgacctcaactcctccactgactctgcagcctcagcctctgcagccagtgatgtttctgtagaatctacagaggccacagtctgcacggtgacactggagaagatgtcggcagggctgggcttcagcctggaaggagggaagggctccctacacggagacaagcctctcaccattaacaggattttcaaaggtg

SEQ ID NO: 9806 - DNA, 2397 bp, Homo sapiens
  source 1..2397: mol_type = unassigned DNA; mol_type = unassigned DNA
ctgtttacaccacaggaagcgagagagctgctgccactgctgctaccacaggaagacacagcagggagaagccctagtgcctctgccggctgcccaggacctggtatcggcccacagaccaagtcctccacagagggcgagccagggtggagaagagccagcccagtgacccaaacatccccgataaaacacccactgcttaagaggcaggctcggatggactatagctttgataccacagccgaagacccttgggttaggatttctgactgcatcaaaaacttatttagccccatcatgagtgagaaccatggccacatgcctctacagcccaatgccagcctgaatgaagaagaagggacacagggccacccagatgggaccccaccaaagctggacaccgccaatggcactcccaaagtttacaagtcagcagacagcagcactgtgaagaaaggtcctcctgtggctcccaagccagcctggtttcgccaaagcttgaaaggtttgaggaatcgtgcttcagacccaagagggctccctgatcctgccttgtccacccagccagcacctgcttccagggagcacctaggatcacacatccgggcctcctcctcctcctcctccatcaggcagagaatcagctcctttgaaacctttggctcctctcaactgcctgacaaaggagcccagagactgagcctccagccctcctctggggaggcagcaaaacctcttgggaagcatgaggaaggacggttttctggactcttggggcgaggggctgcacccactcttgtgccccagcagcctgagcaagtactgtcctcggggtcccctgcagcctccgaggccagagacccaggtgtgtctgagtcccctcccccagggcggcagcccaatcagaaaactctcccccctggcccggacccgctcctaaggctgctgtcaacacaggctgaggaatctcaaggcccagtgctcaagatgcctagccagcgagcacggagcttccccctgaccaggtcccagtcctgtgagacgaagctacttgacgaaaagaccagcaaactctattctatcagcagccaagtgtcatcggctgtcatgaaatccttgctgtgccttccatcttctatctcctgtgcccagactccctgcatccccaaggaaggggcatctccaacatcatcatccaacgaagactcagctgcaaatggttctgctgaaacatctgccttggacacagggttctcgctcaacctttcagagctgagagaatatacagagggtctcacggaagccaaggaagacgatgatggggaccacagttcccttcagtctggtcagtccgttatctccctgctgagctcagaagaattaaaaaaactcatcgaggaggtgaaggttctggatgaagcaacattaaagcaattagacggcatccatgtcaccatcttacacaaggaggaaggtgctggtcttgggttcagcttggcaggaggagcagatctagaaaacaaggtgattacggttcacagagtgtttccaaatgggctggcctcccaggaagggactattcagaagggcaatgaggttctttccatcaacggcaagtctctcaaggggaccacgcaccatgatgccttggccatcctccgccaagctcgagagcccaggcaagctgtgattgtcacaaggaagctgactccagaggccatgcccgacctcaactcctccactgactctgcagcctcagcctctgcagccagtgatgtttctgtagaatctacagcagaggccacagtctgcacggtgacactggagaagatgtcggcagggctgggcttcagcctggaaggagggaagggctccctacacggagacaagcctctcaccattaacaggattttcaaaggagcagcctcagaacaaagtgagacagtccagcctggagatgaaatcttacagctgggtggcactgccatgcagggcctcacacggtttgaagcctggaacatcatcaaggcactgcctgatggacctgtcacgattgtcatcaggagaaaaagcctccagtccaaggaaaccacagctgctggagactcctaggcaggacatgctgaagccaaagccaataacacacagctaacacacagctcccataaccgctgattctcagggtctctgctgccgccccacccagatgggggaaagcacaggtgggcttcccagtggctgctgcccaggcccagaccttctaggacgccacccagcaaaaggttgttcctaaaataagggcagagtcacacgggggcagctgatacaaattgcagactgtgtaaaaagagagcttaatgataatattgtggtgccacaaataaaatggatttatta

SEQ ID NO: 9807 - DNA, 626 bp, Homo sapiens
  source 1..626: mol_type = unassigned DNA; mol_type = unassigned DNA
acagcagggagaagccctagtgcctctgccggctgcccaggacctggtatcggcccacagaccaagtcctccacagagggcgagccagggtggagaagagccagcccagcccaatgccagcctgaatgaagaagaagggacacagggccacccagatgggaccccaccaaagctggacaccgccaatggcactcccaaagtttacaagtcagcagacagcagcactgtgaagaaaggtcctcctgtggctcccaagccagcctggtttcgccaaagcttgaaaggtttgaggaatcgtgcttcagacccaagagggctccctgatcctgccttgtccacccagccagcacctgcttccagggagcacctaggatcacacatccgggcctcctcctcctcctcctccatcaggcagagaatcagctcctttgaaacctttggctcctctcaactgcctgacaaaggagcccagagactgagcctccagccctcctctggggaggcagcaaaacctcttgggaagcatgaggaaggacggttttctggactcttggggcgaggggctgcacccactcttgtgccccagcagcctgagcaagtactgtcctcggggtcccctgcagcct

SEQ ID NO: 9808 - DNA, 1922 bp, Homo sapiens
  source 1..1922: mol_type = unassigned DNA; mol_type = unassigned DNA
agtgcctctgccggctgcccaggacctggtatcggcccacagaccaagtcctccacagagggcgagccagggtggagaagagccagcccagcttggaaactagaatttaggaagaaaagtcactgtatgatgtaatgcacagctttggccttgtttctgcactgtagtgacccaaacatccccgataaaacacccactgcttaagaggcaggctcggatggactatagctttgataccacagccgaagacccttgggttaggatttctgactgcatcaaaaacttatttagccccatcatgagtgagaaccatggccacatgcctctacagcccaatgccagcctgaatgaagaagaagggacacagggccacccagatgggaccccaccaaagctggacaccgccaatggcactcccaaagtttacaagtcagcagacagcagcactgtgaagaaaggtcctcctgtggctcccaagccagcctggtttcgccaaagcttgaaaggtttgaggaatcgtgcttcagacccaagagggctccctgatcctgccttgtccacccagccagcacctgcttccagggagcacctaggatcacacatccgggcctcctcctcctcctcctccatcaggcagagaatcagctcctttgaaacctttggctcctctcaactgcctgacaaaggagcccagagactgagcctccagccctcctctggggaggcagcaaaacctcttgggaagcatgaggaaggacggttttctggactcttggggcgaggggctgcacccactcttgtgccccagcagcctgagcaagtactgtcctcggggtcccctgcagcctccgaggccagagacccaggtgtgtctgagtcccctcccccagggcggcagcccaatcagaaaactctcccccctggcccggacccgctcctaaggctgctgtcaacacaggctgaggaatctcaaggcccagtgctcaagatgcctagccagcgagcacggagcttccccctgaccaggtcccagtcctgtgagacgaagctacttgacgaaaagaccagcaaactctattctatcagcagccaagtgtcatcggctgtcatgaaatccttgctgtgccttccatcttctatctcctgtgcccagactccctgcatccccaaggaaggggcatctccaacatcatcatccaacgaagactcagctgcaaatggttctgctgaaacatctgccttggacacagggttctcgctcaacctttcagagctgagagaatatacagagggtctcacggaagccaaggaagacgatgatggggaccacagttcccttcagtctggtcagtccgttatctccctgctgagctcagaagaattaaaaaaactcatcgaggaggtgaaggttctggatgaagcaacattaaagcaattagacggcatccatgtcaccatcttacacaaggaggaaggtgctggtcttgggttcagcttggcaggaggagcagatctagaaaacaaggtgattacggttcacagagtgtttccaaatgggctggcctcccaggaagggactattcagaagggcaatgaggttctttccatcaacggcaagtctctcaaggggaccacgcaccatgatgccttggccatcctccgccaagctcgagagcccaggcaagctgtgattgtcacaaggaagctgactccagaggccatgcccgacctcaactcctccactgactctgcagcctcagcctctgcagccagtgatgtttctgtagaatctacagcagaggccacagtctgcacggtgacactggagaagatgtcggcagggctgggcttcagcctggaaggagggaagggctccctacacggagacaagcctctcaccattaacaggattttcaaaggtg

SEQ ID NO: 9809 - DNA, 2020 bp, Homo sapiens
  source 1..2020: mol_type = unassigned DNA; mol_type = unassigned DNA
agaggcaggctcggatggactatagctttgataccacagccgaagacccttgggttaggatttctgactgcatcaaaaacttatttagccccatcatgagtgagaaccatggccacatgcctctacagcccaatgccagcctgaatgaagaagaagggacacagggccacccagatgggaccccaccaaagctggacaccgccaatggcactcccaaagtttacaagtcagcagacagcagcactgtgaagaaaggtcctcctgtggctcccaagccagcctggtttcgccaaagcttgaaaggtttgaggaatcgtgcttcagacccaagagggctccctgatcctgccttgtccacccagccagcacctgcttccagggagcacctaggatcacacatccgggcctcctcctcctcctcctccatcaggcagagaatcagctcctttgaaacctttggctcctctcaactgcctgacaaaggagcccagagactgagcctccagccctcctctggggaggcagcaaaacctcttgggaagcatgaggaaggacggttttctggactcttggggcgaggggctgcacccactcttgtgccccagcagcctgagcaagtactgtcctcggggtcccctgcagcctccgaggccagagacccaggtgtgtctgagtcccctcccccagggcggcagcccaatcagaaaactctcccccctggcccggacccgctcctaaggctgctgtcaacacaggctgaggaatctcaaggcccagtgctcaagatgcctagccagcgagcacggagcttccccctgaccaggtcccagtcctgtgagacgaagctacttgacgaaaagaccagcaaactctattctatcagcagccaagtgtcatcggctgtcatgaaatccttgctgtgccttccatcttctatctcctgtgcccagactccctgcatccccaaggaaggggcatctccaacatcatcatccaacgaagactcagctgcaaatggttctgctgaaacatctgccttggacacagggttctcgctcaacctttcagagctgagagaatatacagagggtctcacggaagccaaggaagacgatgatggggaccacagttcccttcagtctggtcagtccgttatctccctgctgagctcagaagaattaaaaaaactcatcgaggaggtgaaggttctggatgaagcaacattaaagcaattagacggcatccatgtcaccatcttacacaaggaggaaggtgctggtcttgggttcagcttggcaggaggagcagatctagaaaacaaggtgattacggttcacagagtgtttccaaatgggctggcctcccaggaagggactattcagaagggcaatgaggttctttccatcaacggcaagtctctcaaggggaccacgcaccatgatgccttggccatcctccgccaagctcgagagcccaggcaagctgtgattgtcacaaggaagctgactccagaggccatgcccgacctcaactcctccactgactctgcagcctcagcctctgcagccagtgatgtttctgtagaatctacagaggccacagtctgcacggtgacactggagaagatgtcggcagggctgggcttcagcctggaaggagggaagggctccctacacggagacaagcctctcaccattaacaggattttcaaaggtgtggggtgtgtctggttctttgcgtgctctccagttgtgggcatgtggccaggcccccaaaaggcttctgggcactttctgggctatgttgtttcccacaactccatgtcctcttcataggcatgctggtccttttagggctcaattctgctttttctactttttctcctttgctcagacatcccctcaatcccccctctgttttgatgggtcttcaaaaatacctaagtcctgggcttggttcgggttggcagggccaggactctagagtggggcagtgaggcactggcctgtggggcagaatt

SEQ ID NO: 9810 - DNA, 561 bp, Homo sapiens
  source 1..561: mol_type = unassigned DNA; mol_type = unassigned DNA
aaatgagctcaggctcatgggtcctgcaccctctaggtgctgccccaggcctccgtaggcttttggcactagaatgatccaggctaggatgagaggataaggaggttctcgttttccatacaaggaggcctcatagctgcaatttccacatcaagagtgtagcaattagacggcatccatgtcaccatcttacacaaggaggaaggtgctggtcttgggttcagcttggcaggaggagcagatctagaaaacaaggtgattacggttcacagagtgtttccaaatgggctggcctcccaggaagggactattcagaagggcaatgaggttctttccatcaacggcaagtctctcaaggggaccacgcaccatgatgccttggccatcctccgccaagctcgagagcccaggcaagctgtgattgtcacaaggaagctgactccagaggccatgcccgacctcaactcctccactgactctgcagcctcagcctctgcagccagtgatgtttctgtagaatctacagcagaggccacagtctgcacggtgacactggagaag

SEQ ID NO: 9811 - DNA, 525 bp, Homo sapiens
  source 1..525: mol_type = unassigned DNA; mol_type = unassigned DNA
gctggcctctgtgccagcagctccaatctaggacacaattatctttaatctttgttggcctaaaaatcctctagcattgactaaccggttcaatcctcctccagcaagtatgtggactggacttgtgtgatttctggtcctgacttcctttggtttgctcaggttcacagagtgtttccaaatgggctggcctcccaggaagggactattcagaagggcaatgaggttctttccatcaacggcaagtctctcaaggggaccacgcaccatgatgccttggccatcctccgccaagctcgagagcccaggcaagctgtgattgtcacaaggaagctgactccagaggccatgcccgacctcaactcctccactgactctgcagcctcagcctctgcagccagtgatgtttctgtagaatctacagaggccacagtctgcacggtgacactggagaagatgtcggcagggctgggcttcagcctggaaggagggaagggctccctacacggagacaagcctctcacc

SEQ ID NO: 9812 - DNA, 1147 bp, Homo sapiens
  source 1..1147: mol_type = unassigned DNA; mol_type = unassigned DNA
attctctccccagcttgctgagccctttgctcccctggcgactgcctggacagtcagcaaggaattgtctcccagtgcattttgccctcctggctgccaactctggctgctaaagcggctgccacctgctgcagtctacacagcttcgggaagaggaaaggaacctcagaccttccagatcgcttcctctcgcaacaaactatttgtcgcaggaataaagatggctgctgaaccagtagaagacaattgcatcaactttgtggcaatgaaatttattgacaatacgctttactttatagctgaagatgatgaaaacctggaatcagattactttggcaagcttgaatctaaattatcagtcataagaaatttgaatgaccaagttctcttcattgaccaaggaaatcggcctctatttgaagatatgactgattctgactgtagagataatgcaccccggaccatatttattataagtatgtataaagatagccagcctagaggtatggctgtaactatctctgtgaagtgtgagaaaatttcaactctctcctgtgagaacaaaattatttcctttaaggaaatgaatcctcctgataacatcaaggatacaaaaagtgacatcatattctttcagagaagtgtcccaggacatgataataagatgcaatttgaatcttcatcatacgaaggatactttctagcttgtgaaaaagagagagacctttttaaactcattttgaaaaaagaggatgaattgggggatagatctataatgttcactgttcaaaacgaagactagctattaaaatttcatgccgggcgcagtggctcacgcctgtaatcccagccctttgggaggctgaggcgggcagatcaccagaggtcaggtgttcaagaccagcctgaccaacatggtgaaacctcatctctactaaaaatacaaaaaattagctgagtgtagtgacgcatgccctcaatcccagctactcaagaggctgaggcaggagaatcacttgcactccggaggtagaggttgtggtgagccgagattgcaccattgcgctctagcctgggcaacaacagcaaaactccatctcaaaaaataaaataaataaataaacaaataaaaaattcataatgtgaa

SEQ ID NO: 9813 - DNA, 1090 bp, Homo sapiens
  source 1..1090: mol_type = unassigned DNA; mol_type = unassigned DNA
gcctggacagtcagcaaggaattgtctcccagtgcattttgccctcctggctgccaactctggctgctaaagcggctgccacctgctgcagtctacacagcttcgggaagaggaaaggaacctcagaccttccagatcgcttcctctcgcaacaaactatttgtcgcaggaataaagatggctgctgaaccagtagaagacaattgcatcaactttgtggcaatgaaatttattgacaatacgctttactttatagaaaacctggaatcagattactttggcaagcttgaatctaaattatcagtcataagaaatttgaatgaccaagttctcttcattgaccaaggaaatcggcctctatttgaagatatgactgattctgactgtagagataatgcaccccggaccatatttattataagtatgtataaagatagccagcctagaggtatggctgtaactatctctgtgaagtgtgagaaaatttcaactctctcctgtgagaacaaaattatttcctttaaggaaatgaatcctcctgataacatcaaggatacaaaaagtgacatcatattctttcagagaagtgtcccaggacatgataataagatgcaatttgaatcttcatcatacgaaggatactttctagcttgtgaaaaagagagagacctttttaaactcattttgaaaaaagaggatgaattgggggatagatctataatgttcactgttcaaaacgaagactagctattaaaatttcatgccgggcgcagtggctcacgcctgtaatcccagccctttgggaggctgaggcgggcagatcaccagaggtcaggtgttcaagaccagcctgaccaacatggtgaaacctcatctctactaaaaatacaaaaaattagctgagtgtagtgacgcatgccctcaatcccagctactcaagaggctgaggcaggagaatcacttgcactccggaggtagaggttgtggtgagccgagattgcaccattgcgctctagcctgggcaacaacagcaaaactccatctcaaaaaataaaataaataaataaacaaataaaaaattcataatgtg

SEQ ID NO: 9814 - DNA, 1697 bp, Homo sapiens
  source 1..1697: mol_type = unassigned DNA; mol_type = unassigned DNA
ggataaaacccaggaggtagaattgctgggttgatagaagagaaaggatgattggcaaattaaagcttcagtagagggtacatgccgagcacaaatgggatcagccctagataccagaaatggcactttctcatttccccttgggacaaaagggagagaggcaataactggtgctgccagagttaaatttgtacgtggagtagcaggaaatcatttgctgaaaatgaaaacagagatgatggtgtagaggtcctgaagagagcaaagaaaatttgaaattgcggctatcagctatggaagagagtgctgaactggaaaacaaaagaagtattgacaattggtatgcttgtaatggcaccgatttgaacgcttgtgccattgttcaccagcagcactcagcagccaagtttggagttttgtagcagaaagacaaataagttagggatttaatatcctggcaaaatggtagacaaaatgaactctgagatccagctgcacagggaaggaagggaagacgggaagaggttagataggaaatacaagagtcaggagactggaagatgttgtgaaatttaagaacacatagagttggagtaaaagtgtaagaaaactagaagggtaagagaccggtcagaaagtaggctatttgaagttaacacttcagaggcagagtagttctgaatggtaacaagaaattgagtgtgcctttgagagtaggttaaaaaacaataggcaactttattgtagctacttctggaacagaagattgtcattaatagttttagaaaactaaaatatatagcatacttatttgtcaattaacaaagaaactatgtatttttaaatgagatttaatgtttattgtagaaaacctggaatcagattactttggcaagcttgaatctaaattatcagtcataagaaatttgaatgaccaagttctcttcattgaccaaggaaatcggcctctatttgaagatatgactgattctgactgtagagataatgcaccccggaccatatttattataagtatgtataaagatagccagcctagaggtatggctgtaactatctctgtgaagtgtgagaaaatttcaactctctcctgtgagaacaaaattatttcctttaaggaaatgaatcctcctgataacatcaaggatacaaaaagtgacatcatattctttcagagaagtgtcccaggacatgataataagatgcaatttgaatcttcatcatacgaaggatactttctagcttgtgaaaaagagagagacctttttaaactcattttgaaaaaagaggatgaattgggggatagatctataatgttcactgttcaaaacgaagactagctattaaaatttcatgccgggcgcagtggctcacgcctgtaatcccagccctttgggaggctgaggcgggcagatcaccagaggtcaggtgttcaagaccagcctgaccaacatggtgaaacctcatctctactaaaaatacaaaaaattagctgagtgtagtgacgcatgccctcaatcccagctactcaagaggctgaggcaggagaatcacttgcactccggaggtagaggttgtggtgagccgagattgcaccattgcgctctagcctgggcaacaacagcaaaactccatctcaaaaaataaaataaataaataaacaaataaaaaattcataa

SEQ ID NO: 9815 - DNA, 795 bp, Homo sapiens
  source 1..795: mol_type = unassigned DNA; mol_type = unassigned DNA
gctcccctggcgactgcctggacagtcagcaaggaattgtctcccagtgcattttgccctcctggctgccaactctggctgctaaagcggctgccacctgctgcagtctacacagcttcgggaagaggaaaggaacctcagaccttccagatcgcttcctctcgcaacaaactatttgtcgcagatggctctttgctttcattaggaataaagatggctgctgaaccagtagaagacaattgcatcaactttgtggcaatgaaatttattgacaatacgctttactttatagctgaagatgatgaaaacctggaatcagattactttggcaagcttgaatctaaattatcagtcataagaaatttgaatgaccaagttctcttcattgaccaaggaaatcggcctctatttgaagatatgactgattctgactgtagagataatgcaccccggaccatatttattataagtatgtataaagatagccagcctagaggtatggctgtaactatctctgtgaagtgtgagaaaatttcaactctctcctgtgagaacaaaattatttcctttaaggaaatgaatcctcctgataacatcaaggatacaaaaagtgacatcatattctttcagagaagtgtcccaggacatgataataagatgcaatttgaatcttcatcatacgaaggatactttctagcttgtgaaaaagagagagacctttttaaactcattttgaaaaaagaggatgaattgggggatagatctataatgttcactgttcaaaacgaagactag

SEQ ID NO: 9816 - DNA, 758 bp, Homo sapiens
  source 1..758: mol_type = unassigned DNA; mol_type = unassigned DNA
gccctttgctcccctggcgactgcctggacagtcagcaaggaattgtctcccagtgcattttgccctcctggctgccaactctggctgctaaagcggctgccacctgctgcagtctacacagcttcgggaagaggaaaggaacctcagaccttccagatcgcttcctctcgcaacaaactatttgtcgcaggaataaagatggctgctgaaccagtagaagacaattgcatcaactttgtggcaatgaaatttattgacaatacgctttactttataggataaaacccaggaggtagaattgctgggttgatagaagagaaaggatgattggcaaattaaagcttcagtagaggaaaacctggaatcagattactttggcaagcttgaatctaaattatcagtcataagaaatttgaatgaccaagttctcttcattgaccaaggaaatcggcctctatttgaagatatgactgattctgactgtagagataatgcaccccggaccatatttattataagtatgtataaagatagccagcctagaggtatggctgtaactatctctgtgaagtgtgagaaaatttcaactctctcctgtgagaacaaaattatttcctttaaggaaatgaatcctcctgataacatcaaggatacaaaaagtgacatcatattctttcagagaagtgtcccaggacatgataataagatgcaatttgaatcttcatcatacgaaggatactttctagcttgtgaaaaa

SEQ ID NO: 9817 - DNA, 880 bp, Homo sapiens
  source 1..880: mol_type = unassigned DNA; mol_type = unassigned DNA
ctttgctcccctggcgactgcctggacagtcagcaaggaattgtctcccagtgcattttgccctcctggctgccaactctggctgctaaagcggctgccacctgctgcagtctacacagcttcgggaagaggaaaggaacctcagaccttccagatcgcttcctctcgcaacaaactatttgtcgcaggaataaagatggctgctgaaccagtagaagacaattgcatcaactttgtggcaatgaaatttattgacaatacgctttactttatagctgaagatgatggtaaagtagaaatgaatttatttttctttgcaaactaagtatctgcttgagacacatctatctcaccattgtcagctgaggaaaaaaaaaaatggttctcatgctaccaatctgccttcaaagaaatgtggactcagtagcacagctttggaatgaagatgatcataagagatacaaagaagaacctctagcaaaagatgcttctctatgccttaaaaaattctccagctcttagaatctacaaaatagactttgcctgtttcataggtcctaagattagcatgaagtcatggattctgttgtagggggagcgttgcataggaaaaagggattgaagcattagaattgtccaaaatcagtaacacctcctctcagaaatgctttgggaagaagcctggaaggttcccgggttggtggtggggtggggcagaaaattctggaagtagaggagataggaatgggtggggcaagaagaccacattcagaggccaaaagctgaaagaaaccatggcatttatgatgaattcagggtaattcagaatggaagtagagtaggagtaggagactggtgagagaagctagagtgataaaca

SEQ ID NO: 9818 - DNA, 427 bp, Homo sapiens
  source 1..427: mol_type = unassigned DNA; mol_type = unassigned DNA
gcagaaatggcattaaatgaaagaggacatgaaggggatttcctcattcgtgatagtgaatcttcggccactccctgctgatgcaacatctgggtttgggcagaaaggagggtgcttcggagcccgccctttctgagcttcctgggccggctctagaacaattcaggcttcgctgcgactcagacctcagctccaacatatgcattctgaagaaagatggctgagatggacagaatgctttattttggaaagaaacaatgttctaggtcaaactgagtctaccaaatgcagactttcacaatggttctagaagaaatctggacaagtcttttcatgtggtttttctacgcattgattccatgtttgctcacagccatccttacccgacctgggatggagatcaccaaagatggcttccacctggtta

SEQ ID NO: 9819 - DNA, 2047 bp, Homo sapiens
  source 1..2047: mol_type = unassigned DNA; mol_type = unassigned DNA
aaagttacattttctctggaactctcctaggccactccctgctgatgcaacatctgggtttgggcagaaaggagggtgcttcggagcccgccctttctgagcttcctgggccggctctagaacaattcaggcttcgctgcgactcagacctcagctccaacatatgcattctgaagaaagatggctgagatggacagaatgctttattttggaaagaaacaatgttctaggtcaaactgagtctaccaaatgcagactttcacaatggttctagaagaaatctggacaagtcttttcatgtggtttttctacgcattgattccatgtttgctcacagatgaagtggccattctgcctgcccctcagaacctctctgtactctcaaccaacatgaagcatctcttgatgtggagcccagtgatcgcgcctggagaaacagtgtactattctgtcgaataccagggggagtacgagagcctgtacacgagccacatctggatccccagcagctggtgctcactcactgaaggtcctgagtgtgatgtcactgatgacatcacggccactgtgccatacaaccttcgtgtcagggccacattgggctcacagacctcagcctggagcatcctgaagcatccctttaatagaaactcaaccatccttacccgacctgggatggagatcaccaaagatggcttccacctggttattgagctggaggacctggggccccagtttgagttccttgtggcctactggaggagggagcctggtgccgaggaacatgtcaaaatggtgaggagtgggggtattccagtgcacctagaaaccatggagccaggggctgcatactgtgtgaaggcccagacattcgtgaaggccattgggaggtacagcgccttcagccagacagaatgtgtggaggtgcaaggagaggccattcccctggtactggccctgtttgcctttgttggcttcatgctgatccttgtggtcgtgccactgttcgtctggaaaatgggccggctgctccagtactcctgttgccccgtggtggtcctcccagacaccttgaaaataaccaattcaccccagaagttaatcagctgcagaagggaggaggtggatgcctgtgccacggctgtgatgtctcctgaggaactcctcagggcctggatctcataggtttgcggaagggcccaggtgaagccgagaacctggtctgcatgacatggaaaccatgaggggacaagttgtgtttctgttttccgccacggacaagggatgagagaagtaggaagagcctgttgtctacaagtctagaagcaaccatcagaggcagggtggtttgtctaacagaacactgactgaggcttaggggatgtgacctctagactgggggctgccacttgctggctgagcaaccctgggaaaagtgacttcatcccttcggtcctaagttttctcatctgtaatgggggaattacctacacacctgctaaacacacacacacagagtctctctctatatatacacacgtacacataaatacacccagcacttgcaaggctagagggaaactggtgacactctacagtctgactgattcagtgtttctggagagcaggacataaatgtatgatgagaatgatcaaggactctacacactgggtggcttggagagcccactttcccagaataatccttgagagaaaaggaatcatgggagcaatggtgttgagttcacttcaagcccaatgccggtgcagaggggaatggcttagcgagctctacagtaggtgacctggaggaaggtcacagccacactgaaaatgggatgtgcatgaacacggaggatccatgaactactgtaaagtgttgacagtgtgtgcacactgcagacagcaggtgaaatgtatgtgtgcaatgcgacgagaatgcagaagtcagtaacatgtgcatgtttgttgtgctccttttttctgttggtaaagtacagaattcagcaaataaaaagggccaccctggccaaaagcggtctttaaa

SEQ ID NO: 9820 - DNA, 1887 bp, Homo sapiens
  source 1..1887: mol_type = unassigned DNA; mol_type = unassigned DNA
cagacctcagctccaacatatgcattctgaagaaagatggctgagatggacagaatgctttattttggaaagaaacaatgttctaggtcaaactgagtctaccaaatgcagactttcacaatggttctagaagaaatctggacaagtcttttcatgtggtttttctacgcattgattccatgtttgctcacaggctggagtgcagtggtgcaatctcagcttactgcaacctccgccagtgaggcccttcattagacactaatttgaagctatggcattcccccactatgagcccacctgtcagccaggctatctgccttgatcctagatgaagtggccattctgcctgcccctcagaacctctctgtactctcaaccaacatgaagcatctcttgatgtggagcccagtgatcgcgcctggagaaacagtgtactattctgtcgaataccagggggagtacgagagcctgtacacgagccacatctggatccccagcagctggtgctcactcactgaaggtcctgagtgtgatgtcactgatgacatcacggccactgtgccatacaaccttcgtgtcagggccacattgggctcacagacctcagcctggagcatcctgaagcatccctttaatagaaactcaaccatccttacccgacctgggatggagatcaccaaagatggcttccacctggttattgagctggaggacctggggccccagtttgagttccttgtggcctactggaggagggagcctggtgccgaggagaggccattcccctggtactggccctgtttgcctttgttggcttcatgctgatccttgtggtcgtgccactgttcgtctggaaaatgggccggctgctccagtactcctgttgccccgtggtggtcctcccagacaccttgaaaataaccaattcaccccagaagttaatcagctgcagaagggaggaggtggatgcctgtgccacggctgtgatgtctcctgaggaactcctcagggcctggatctcataggtttgcggaagggcccaggtgaagccgagaacctggtctgcatgacatggaaaccatgaggggacaagttgtgtttctgttttccgccacggacaagggatgagagaagtaggaagagcctgttgtctacaagtctagaagcaaccatcagaggcagggtggtttgtctaacagaacactgactgaggcttaggggatgtgacctctagactgggggctgccacttgctggctgagcaaccctgggaaaagtgacttcatcccttcggtcctaagttttctcatctgtaatgggggaattacctacacacctgctaaacacacacacacagagtctctctctatatatacacacgtacacataaatacacccagcacttgcaaggctagagggaaactggtgacactctacagtctgactgattcagtgtttctggagagcaggacataaatgtatgatgagaatgatcaaggactctacacactgggtggcttggagagcccactttcccagaataatccttgagagaaaaggaatcatgggagcaatggtgttgagttcacttcaagcccaatgccggtgcagaggggaatggcttagcgagctctacagtaggtgacctggaggaaggtcacagccacactgaaaatgggatgtgcatgaacacggaggatccatgaactactgtaaagtgttgacagtgtgtgcacactgcagacagcaggtgaaatgtatgtgtgcaatgcgacgagaatgcagaagtcagtaacatgtgcatgtttgttgtgctccttttttctgttggtaaagtacagaattcagcaaataaaaagggccaccctggccaaaagcggtctttaaa

SEQ ID NO: 9821 - DNA, 956 bp, Homo sapiens
  source 1..956: mol_type = unassigned DNA; mol_type = unassigned DNA
gctttgtttacctaagcaatcctgggcaatggcgggcgccccttccccagcctcgttgccgccttgcagtttgatctcagactgctgtgctagcaatcagcgcgattccgtgggcgtaggaccctctgagccaggctggagtgcagtggtgcaatctcagcttactgcaacctccgccagtgaggcccttcattagacactaatttgaagctatggcattcccccactatgagcccacctgtcagccaggctatctgccttgatcctagatgaagtggccattctgcctgcccctcagaacctctctgtactctcaaccaacatgaagcatctcttgatgtggagcccagtgatcgcgcctggagaaacagtgtactattctgtcgaataccagggggagtacgagagcctgtacacgagccacatctggatccccagcagctggtgctcactcactgaaggtcctgagtgtgatgtcactgatgacatcacggccactgtgccatacaaccttcgtgtcagggccacattgggctcacagacctcagcctggagcatcctgaagcatccctttaatagaaactcaaccatccttacccgacctgggatggagatcaccaaagatggcttccacctggttattgagctggaggacctggggccccagtttgagttccttgtggcctactggaggagggagcctggtgccgaggaacatgtcaaaatggtgaggagtgggggtattccagtgcacctagaaaccatggagccaggggctgcatactgtgtgaaggcccagacattcgtgaaggccattgggaggtacagcgccttcagccagacagaatgtgtggaggtgcaaggagaggccattcccctggtactggccctgtttgcctttgttggcttcatgctgatccttgtggtcgtgccactgttcgtctggaaaatgggcc

SEQ ID NO: 9822 - DNA, 1787 bp, Homo sapiens
  source 1..1787: mol_type = unassigned DNA; mol_type = unassigned DNA
gccattctgcctgcccctcagaacctctctgtactctcaaccaacatgaagcatctcttgatgtggagcccagtgatcgcgcctggagaaacagtgtactattctgtcgaataccagggggagtacgagagcctgtacacgagccacatctggatccccagcagctggtgctcactcactgaaggtcctgagtgtgatgtcactgatgacatcacggccactgtgccatacaaccttcgtgtcagggccacattgggctcacagacctcagcctggagcatcctgaagcatccctttaatagaaactcaagaactgcctttcttctgagtgtccacttgtgtccggaattggtgggttcttgatctcactgacttcaagaatgaagccgcagaccctcgcgccatccttacccgacctgggatggagatcaccaaagatggcttccacctggttattgagctggaggacctggggccccagtttgagttccttgtggcctactggaggagggagcctggtgccgaggaacatgtcaaaatggtgaggagtgggggtattccagtgcacctagaaaccatggagccaggggctgcatactgtgtgaaggcccagacattcgtgaaggccattgggaggtacagcgccttcagccagacagaatgtgtggaggtgcaaggagaggccattcccctggtactggccctgtttgcctttgttggcttcatgctgatccttgtggtcgtgccactgttcgtctggaaaatgggccggctgctccagtactcctgttgccccgtggtggtcctcccagacaccttgaaaataaccaattcaccccagaagttaatcagctgcagaagggaggaggtggatgcctgtgccacggctgtgatgtctcctgaggaactcctcagggcctggatctcataggtttgcggaagggcccaggtgaagccgagaacctggtctgcatgacatggaaaccatgaggggacaagttgtgtttctgttttccgccacggacaagggatgagagaagtaggaagagcctgttgtctacaagtctagaagcaaccatcagaggcagggtggtttgtctaacagaacactgactgaggcttaggggatgtgacctctagactgggggctgccacttgctggctgagcaaccctgggaaaagtgacttcatcccttcggtcctaagttttctcatctgtaatgggggaattacctacacacctgctaaacacacacacacagagtctctctctatatatacacacgtacacataaatacacccagcacttgcaaggctagagggaaactggtgacactctacagtctgactgattcagtgtttctggagagcaggacataaatgtatgatgagaatgatcaaggactctacacactgggtggcttggagagcccactttcccagaataatccttgagagaaaaggaatcatgggagcaatggtgttgagttcacttcaagcccaatgccggtgcagaggggaatggcttagcgagctctacagtaggtgacctggaggaaggtcacagccacactgaaaatgggatgtgcatgaacacggaggatccatgaactactgtaaagtgttgacagtgtgtgcacactgcagacagcaggtgaaatgtatgtgtgcaatgcgacgagaatgcagaagtcagtaacatgtgcatgtttgttgtgctccttttttctgttggtaaagtacagaattcagcaaataaaaagggccaccctggccaaaagcggtc

SEQ ID NO: 9823 - DNA, 1168 bp, Homo sapiens
  source 1..1168: mol_type = unassigned DNA; mol_type = unassigned DNA
gtcacaagcagaatcttcagaacaggttctccttccccagtcaccagttgctcgagttagaattgtctgcaatggccgccctgcagaaatctgtgagctctttccttatggggaccctggccaccagctgcctccttctcttggccctcttggtacagggaggagcagctgcgcccatcagctcccactgcaggcttgacaagtccaacttccagcagccctatatcaccaaccgcaccttcatgctggctaaggaggctagcttggctgataacaacacagacgttcgtctcattggggagaaactgttccacggagtcagtatgagtgagcgctgctatctgatgaagcaggtgctgaacttcacccttgaagaagtgctgttccctcaatctgataggttccagccttatatgcaggaggtggtgcccttcctggccaggctcagcaacaggctaagcacatgtcatattgaaggtgatgacctgcatatccagaggaatgtgcaaaagctgaaggacacagtgaaaaagcttggagagagtggagagatcaaagcaattggagaactggatttgctgtttatgtctctgagaaatgcctgcatttgaccagagcaaagctgaaaaatgaataactaaccccctttccctgctagaaataacaattagatgccccaaagcgattttttttaaccaaaaggaagatgggaagccaaactccatcatgatgggtggattccaaatgaacccctgcgttagttacaaaggaaaccaatgccacttttgtttataagaccagaaggtagactttctaagcatagatatttattgataacatttcattgtaactggtgttctatacacagaaaacaatttattttttaaataattgtctttttccataaaaaagattactttccattcctttaggggaaaaaacccctaaatagcttcatgtttccataatcagtactttatatttataaatgtatttattattattataagactgcattttatttatatcattttattaatatggatttatttatagaaacatcattcgatattgctacttgagtgtaaggctaatattgatatttatgacaataattatagagctataacatgtttatttgacctcaataaacacttggatatcctaa

SEQ ID NO: 9824 - DNA, 1150 bp, Homo sapiens
  source 1..1150: mol_type = unassigned DNA; mol_type = unassigned DNA
cttcgaccaggttctccttccccagtcaccagttgctcgagttagaattgtctgcaatggccgccctgcagaaatctgtgagctctttccttatggggaccctggccaccagctgcctccttctcttggccctcttggtacagggaggagcagctgcgcccatcagctcccactgcaggcttgacaagtccaacttccagcagccctatatcaccaaccgcaccttcatgctggctaaggaggctagcttggctgataacaacacagacgttcgtctcattggggagaaactgttccacggagtcagtatgagtgagcgctgctatctgatgaagcaggtgctgaacttcacccttgaagaagtgctgttccctcaatctgataggttccagccttatatgcaggaggtggtgcccttcctggccaggctcagcaacaggctaagcacatgtcatattgaaggtgatgacctgcatatccagaggaatgtgcaaaagctgaaggacacagtgaaaaagcttggagagagtggagagatcaaagcaattggagaactggatttgctgtttatgtctctgagaaatgcctgcatttgaccagagcaaagctgaaaaatgaataactaaccccctttccctgctagaaataacaattagatgccccaaagcgattttttttaaccaaaaggaagatgggaagccaaactccatcatgatgggtggattccaaatgaacccctgcgttagttacaaaggaaaccaatgccacttttgtttataagaccagaaggtagactttctaagcatagatatttattgataacatttcattgtaactggtgttctatacacagaaaacaatttattttttaaataattgtctttttccataaaaaagattactttccattcctttaggggaaaaaacccctaaatagcttcatgtttccataatcagtactttatatttataaatgtatttattattattataagactgcattttatttatatcattttattaatatggatttatttatagaaacatcattcgatattgctacttgagtgtaaggctaatattgatatttatgacaataattatagagctataacatgtttatttgacctcaataaacacttggatatcc

SEQ ID NO: 9825 - DNA, 1168 bp, Homo sapiens; identical to SEQ ID NO: 9823
  source 1..1168: mol_type = unassigned DNA; mol_type = unassigned DNA

SEQ ID NO: 9826 - DNA, 1150 bp, Homo sapiens; identical to SEQ ID NO: 9824
  source 1..1150: mol_type = unassigned DNA; mol_type = unassigned DNA

SEQ ID NO: 9827 - DNA, 2641 bp, Homo sapiens
  source 1..2641: mol_type = unassigned DNA; mol_type = unassigned DNA
agaatactgaaaaatgaagcctaaaatgaagtattcaaccaacaaaatttccacagcaaagtggaagaacacagcaagcaaagccttgtgtttcaagctgggaaaatcccaacagaaggccaaagaagtttgccccatgtactttatgaagctccgctctggccttatgataaaaaaggaggcctgttactttaggagagaaaccaccaaaaggccttcactgaaaacaggtagaaagcacaaaagacatctggtactcgctgcctgtcaacagcagtctactgtggagtgctttgcctttggtatatcaggggtccagaaatatactagagcacttcatgattcaagtatcacaggaatttcacctattacagagtatcttgcttctctaagcacatacaatgatcaatccattacttttgctttggaggatgaaagttatgagatatatgttgaagacttgaaaaaagatgaaaagaaagataaggtgttactgagttactatgagtctcaacacccctcaaatgaatcaggtgacggtgttgatggtaagatgttaatggtaaccctgagtcctacaaaagacttctggttgcatgccaacaacaaggaacactctgtggagctccataagtgtgaaaaaccactgccagaccaggccttctttgtccttcataatatgcactccaactgtgtttcatttgaatgcaagactgatcctggagtgtttataggtgtaaaggataatcatcttgctctgattaaagtagactcttctgagaatttgtgtactgaaaatatcttgtttaagctctctgaaacttagttgatggaaacctgtgagtcttgggttgagtacccaaatgctaccactggagaaggaatgagagataaagaaagagacaggtgacatctaagggaaatgaagagtgcttagcatgtgtggaatgttttccatattatgtataaaaatattttttctaatcctccagttattcttttatttccctctgtataactgcatcttcaatacaagtatcagtatattaaatagggtattggtaaagaaacggtcaacattctaaagagatacagtctgacctttacttttctctagtttcagtccagaaagaacttcatatttagagctaaggccactgaggaaagagccatagcttaagtctctatgtagacagggatccattttaaagagctacttagagaaataattttccacagttccaaacgataggctcaaacactagagctgctagtaaaaagaagaccagatgcttcacagaattatcattttttcaactggaataaaacaccaggtttgtttgtagatgtcttaggcaacactcagagcagatctcccttactgtcaggggatatggaacttcaaaggcccacatggcaagccaggtaacataaatgtgtgaaaaagtaaagataactaaaaaatttagaaaaataaatccagtatttgtaaagtgaataacttcatttctaattgtttaatttttaaaattctgatttttatatattgagtttaagcaaggcattcttacacgaggaagtgaagtaaattttagttcagacataaaatttcacttattaggaatatgtaacatgctaaaacttttttttttttaaagagtactgagtcacaacatgttttagagcatccaagtaccatataatccaactatcatggtaaggccagaaatcttctaacctaccagagcctagatgagacaccgaattaacattaaaatttcagtaactgactgtccctcatgtccatggcctaccatcccttctgaccctggcttccagggacctatgtcttttaatactcactgtcacattgggcaaagttgcttctaatccttatttcccatgtgcacaagtctttttgtattccagcttcctgataacactgcttactgtggaatattcatttgacatctgtctcttttcatttcttttaactaccatgcccttgatatatcttttgcacctgctgaacttcatttctgtatcacctgacctctggatgccaaaacgtttattctgctttgtctgttgtagaattttagataaagctattaatggcaatatttttttgctaaacgtttttgttttttactgtcactagggcaataaaatttatactcaaccatataataacattttttaactactaaaggagtagtttttattttaaagtcttagcaatttctattacaacttttcttagacttaacacttatgataaatgactaacatagtaacagaatctttatgaaatatgaccttttctgaaaatacatacttttacatttctactttattgagacctattagatgtaagtgctagtagaatataagataaaagaggctgagaattaccatacaagggtattacaactgtaaaacaatttatctttgtttcattgttctgtcaataattgttaccaaagagataaaaataaaagcagaatgtatatcatcccatctgaaaaacactaattattgacatgtgcatctgtacaataaacttaaaatgattattaaataatcaaatatatctactacattgtttatattattgaataaagtatattttccaaatgta

SEQ ID NO: 9828 - DNA, 636 bp, Homo sapiens
  source 1..636: mol_type = unassigned DNA; mol_type = unassigned DNA
aaatgaagcctaaaatgaagtattcaaccaacaaaatttccacagcaaagtggaagaacacagcaagcaaagccttgtgtttcaagctgggaagcatgtggtcttaacttgcgactactgatgaagaagagaataacagatgaagatatttgaataatcatcttagtcaatttgtgttaccatagaaatatacctgaagctgggtaatttaaccctttttccatttagaaaaaaaagtgcagcttgctgccagcgcttatttaattttacataaacatctctttgaggctgaagcaaatctgattttcaatgcaaaaatagaatacaaaaactgttcttggagttatttctaaacagaactaccatcagcattgtctatttcagaaaaaatgagattcaccaaatgaaacttcagcaagcaactaactgttcaagaagtgttcaagaatgttaacatcacatgtaggaatgctacattttccaggatttgacattttcagcgatcaagaattactatattttatcaatgaaaataccactactaaaaacataaatagaatgatgtcttttgtttccaaagttgatatactagagagatgtaaaaataataataaaagcaagatctttcgtggcaaa

SEQ ID NO: 9829 - DNA, 2327 bp, Homo sapiens
  source 1..2327: mol_type = unassigned DNA; mol_type = unassigned DNA
agtctacagactcctccgaacacagagctgcagctcttcagggaagaaatcaaaacaagatcacaagaatactgaaaaatgaagcctaaaatgaagtattcaaccaacaaaatttccacagcaaagtggaagaacacagcaagcaaagccttgtgtttcaagctgggaaataaggtgttactgagttactatgagtctcaacacccctcaaatgaatcaggtgacggtgttgatggtaagatgttaatggtaaccctgagtcctacaaaagacttctggttgcatgccaacaacaaggaacactctgtggagctccataagtgtgaaaaaccactgccagaccaggccttctttgtccttcataatatgcactccaactgtgtttcatttgaatgcaagactgatcctggagtgtttataggtgtaaaggataatcatcttgctctgattaaagtagactcttctgagaatttgtgtactgaaaatatcttgtttaagctctctgaaacttagttgatggaaacctgtgagtcttgggttgagtacccaaatgctaccactggagaaggaatgagagataaagaaagagacaggtgacatctaagggaaatgaagagtgcttagcatgtgtggaatgttttccatattatgtataaaaatattttttctaatcctccagttattcttttatttccctctgtataactgcatcttcaatacaagtatcagtatattaaatagggtattggtaaagaaacggtcaacattctaaagagatacagtctgacctttacttttctctagtttcagtccagaaagaacttcatatttagagctaaggccactgaggaaagagccatagcttaagtctctatgtagacagggatccattttaaagagctacttagagaaataattttccacagttccaaacgataggctcaaacactagagctgctagtaaaaagaagaccagatgcttcacagaattatcattttttcaactggaataaaacaccaggtttgtttgtagatgtcttaggcaacactcagagcagatctcccttactgtcaggggatatggaacttcaaaggcccacatggcaagccaggtaacataaatgtgtgaaaaagtaaagataactaaaaaatttagaaaaataaatccagtatttgtaaagtgaataacttcatttctaattgtttaatttttaaaattctgatttttatatattgagtttaagcaaggcattcttacacgaggaagtgaagtaaattttagttcagacataaaatttcacttattaggaatatgtaacatgctaaaacttttttttttttaaagagtactgagtcacaacatgttttagagcatccaagtaccatataatccaactatcatggtaaggccagaaatcttctaacctaccagagcctagatgagacaccgaattaacattaaaatttcagtaactgactgtccctcatgtccatggcctaccatcccttctgaccctggcttccagggacctatgtcttttaatactcactgtcacattgggcaaagttgcttctaatccttatttcccatgtgcacaagtctttttgtattccagcttcctgataacactgcttactgtggaatattcatttgacatctgtctcttttcatttcttttaactaccatgcccttgatatatcttttgcacctgctgaacttcatttctgtatcacctgacctctggatgccaaaacgtttattctgctttgtctgttgtagaattttagataaagctattaatggcaatatttttttgctaaacgtttttgttttttactgtcactagggcaataaaatttatactcaaccatataataacattttttaactactaaaggagtagtttttattttaaagtcttagcaatttctattacaacttttcttagacttaacacttatgataaatgactaacatagtaacagaatctttatgaaatatgaccttttctgaaaatacatacttttacatttctactttattgagacctattagatgtaagtgctagtagaatataagataaaagaggctgagaattaccatacaagggtattacaactgtaaaacaatttatctttgtttcattgttctgtcaataattgttaccaaagagataaaaataaaagcagaatgtatatcatcccatctgaaaaacactaattattgacatgtgcatctgtacaataaacttaaaatgattattaaataatcaaatatatctactacattgtttatattattgaataaagtatattttccaaatgt

SEQ ID NO: 9830 - DNA, 757 bp, Homo sapiens
  source 1..757: mol_type = unassigned DNA; mol_type = unassigned DNA
acagaatactgaaaaatgaagcctaaaatgaagtattcaaccaacaaaatttccacagcaaagtggaagaacacagcaagcaaagccttgtgtttcaagctgggaaaatcccaacagaaggccaaagaagtttgccccatgtactttatgaagctccgctctggccttatgataaaaaaggaggcctgttactttaggagagaaaccaccaaaaggccttcactgaaaacaggaatttcacctattacagagtatcttgcttctctaagcacatacaatgatcaatccattacttttgctttggaggatgaaagttatgagatatatgttgaagacttgaaaaaagatgaaaagaaagataaggtgttactgagttactatgagtctcaacacccctcaaatgaatcaggtgacggtgttgatggtaagatgttaatggtaaccctgagtcctacaaaagacttctggttgcatgccaacaacaaggaacactctgtggagctccataagtgtgaaaaaccactgccagaccaggccttctttgtccttcataatatgcactccaactgtgtttcatttgaatgcaagactgatcctggagtgtttataggtgtaaaggataatcatcttgctctgattaaagtagactcttctgagaatttgtgtactgaaaatatcttgtttaagctctctgaaacttagttgatggaaacctgtgagtcttgggttgagtacccaaatgctaccactggagaag

SEQ ID NO: 9831 - DNA, 2501 bp, Homo sapiens
  source 1..2501: mol_type = unassigned DNA; mol_type = unassigned DNA
atgaagcctaaaatgaagtattcaaccaacaaaatttccacagcaaagtggaagaacacagcaagcaaagccttgtgtttcaagctgggaaaatcccaacagaaggccaaagaagtttgccccatgtactttatgaagctccgctctggccttatgataaaaaaggaggcctgttactttaggagagaaaccaccaaaaggccttcactgaaaacaggtagaaagcacaaaagacatctggtactcgctgcctgtcaacagcagtctactgtggagtgctttgcctttggtatatcaggggtccagaaatatactagagcacttcatgattcaagtatcacagataaggtgttactgagttactatgagtctcaacacccctcaaatgaatcaggtgacggtgttgatggtaagatgttaatggtaaccctgagtcctacaaaagacttctggttgcatgccaacaacaaggaacactctgtggagctccataagtgtgaaaaaccactgccagaccaggccttctttgtccttcataatatgcactccaactgtgtttcatttgaatgcaagactgatcctggagtgtttataggtgtaaaggataatcatcttgctctgattaaagtagactcttctgagaatttgtgtactgaaaatatcttgtttaagctctctgaaacttagttgatggaaacctgtgagtcttgggttgagtacccaaatgctaccactggagaaggaatgagagataaagaaagagacaggtgacatctaagggaaatgaagagtgcttagcatgtgtggaatgttttccatattatgtataaaaatattttttctaatcctccagttattcttttatttccctctgtataactgcatcttcaatacaagtatcagtatattaaatagggtattggtaaagaaacggtcaacattctaaagagatacagtctgacctttacttttctctagtttcagtccagaaagaacttcatatttagagctaaggccactgaggaaagagccatagcttaagtctctatgtagacagggatccattttaaagagctacttagagaaataattttccacagttccaaacgataggctcaaacactagagctgctagtaaaaagaagaccagatgcttcacagaattatcattttttcaactggaataaaacaccaggtttgtttgtagatgtcttaggcaacactcagagcagatctcccttactgtcaggggatatggaacttcaaaggcccacatggcaagccaggtaacataaatgtgtgaaaaagtaaagataactaaaaaatttagaaaaataaatccagtatttgtaaagtgaataacttcatttctaattgtttaatttttaaaattctgatttttatatattgagtttaagcaaggcattcttacacgaggaagtgaagtaaattttagttcagacataaaatttcacttattaggaatatgtaacatgctaaaacttttttttttttaaagagtactgagtcacaacatgttttagagcatccaagtaccatataatccaactatcatggtaaggccagaaatcttctaacctaccagagcctagatgagacaccgaattaacattaaaatttcagtaactgactgtccctcatgtccatggcctaccatcccttctgaccctggcttccagggacctatgtcttttaatactcactgtcacattgggcaaagttgcttctaatccttatttcccatgtgcacaagtctttttgtattccagcttcctgataacactgcttactgtggaatattcatttgacatctgtctcttttcatttcttttaactaccatgcccttgatatatcttttgcacctgctgaacttcatttctgtatcacctgacctctggatgccaaaacgtttattctgctttgtctgttgtagaattttagataaagctattaatggcaatatttttttgctaaacgtttttgttttttactgtcactagggcaataaaatttatactcaaccatataataacattttttaactactaaaggagtagtttttattttaaagtcttagcaatttctattacaacttttcttagacttaacacttatgataaatgactaacatagtaacagaatctttatgaaatatgaccttttctgaaaatacatacttttacatttctactttattgagacctattagatgtaagtgctagtagaatataagataaaagaggctgagaattaccatacaagggtattacaactgtaaaacaatttatctttgtttcattgttctgtcaataattgttaccaaagagataaaaataaaagcagaatgtatatcatcccatctgaaaaacactaattattgacatgtgcatctgtacaataaacttaaaatgattattaaataatcaaatatatctactacattgtttatattattgaataaagtatattttccaaatgt

SEQ ID NO: 9832 - DNA, 562 bp, Homo sapiens
  source 1..562: mol_type = unassigned DNA; mol_type = unassigned DNA
tgagtgtctgaagttcatcatgccacatttcccagtgtaaagaagttcagaactaaatggaatgatttaaattcttgacttaaggagaccagcagctttgataatgctgccaaattatcctcacagtatcagaaagaaaaaattgacctaaagacttgcgctgtaagaattaaaacagcagaagcagaagctaccctcacctccccatcacttgtctgccctgaagcaggacataagaccctcatttgagaggtgcccttccttatctctgaagacaaaggaacattcttatctctgaagacataggaacatcgagaagaatggagtatgcttatctatgaagacatgagaacacagagaagaatctgaacaaacggggcttgctaagttccctgcagtttatcggcattagattatacaattttgtcctccctttgtatttctctatgactgtccatgattcatcaaacctaaacataataatatacaagtctacttgtttctttgggtcttcatttccaaagcctcccatgttcataaatatattaaataaatgtatatg

SEQ ID NO: 9833 - DNA, 704 bp, Homo sapiens
  source 1..704: mol_type = unassigned DNA; mol_type = unassigned DNA
gaaagaggagaaagcagtaatgcatatagaaaagaatgagaaggaatttaaaagggaaataacatcatctcattatattttgaatgtggaccatttcacccacaaacttcactcagtcttttccggttttgtgcttcacttgccgttaattgtttctgccatcccagttctgccattctaggacatgggggatgtggaacatacagcatttggcctgactagactgccactatggctgctttcaagagattagagatactgctttctcaggaaggagtacttcctattcccacccttgcctaaatgatagattttgcctaaatcccaaagctagatctctggattttatcgtttgtgtagatagcaaaaatggccacgaactctttccttctcatcaagaggtgccatcttttttccaaccccttgaatctggagttggctatgtgatttgatttagccagtagcccaacaaatgtgacacaagcagagacttgaaaagttcttgtgcatggggcttgtcctcttttgctgctcttgggaaccttgcaactaccatcaggtgaacaagcctggactatcctgctgcatgacaaaagaaaagggcccagttacccttgtcaccctatctgacagcccgtcaacttccagctgatgcagacatgggaaaggagaactacttggattccttgagtgtctgaagttca

SEQ ID NO: 9834 - DNA, 13140 bp, Homo sapiens
  source 1..13140: mol_type = unassigned DNA; mol_type = unassigned DNA
gttccagccatttcccactttcctcactccgtaattcggctgggaagttggggaagatggatagggtcttgctgaggtggatttctctcttctggctaacagccatggtcgaaggccttcaggtcacagtgcccgacaagaagaaggtggccatgctcttccagcccactgtgcttcgctgccacttctcaacatcctcccatcagcctgcagttgtgcagtggaagttcaagtcctactgccaggatcgcatgggagaatccttgggcatgtcctctacccgggcccaatctctcagcaagagaaacctggaatgggacccctacttggattgtttggacagcaggaggactgttcgagtagtagcttcaaaacagggctcgactgtcaccctgggagatttctacaggggcagagagatcacgattgttcatgatgcagatcttcaaattggaaagcttatgtggggagacagcggactctattactgtattatcaccaccccagatgacctggaggggaaaaatgaggactcagtggaactgctggtgttgggcaggacagggctgcttgctgatctcttgcccagttttgctgtggagattatgccagagtgggtgtttgttggcctggtgctcctgggcgtcttcctcttcttcgtcctggtggggatctgctggtgccagtgctgccctcacagctgctgctgctatgtccgctgcccatgctgcccagattcctgctgctgccctcaagccttgtatgaagcagggaaagcagcaaaggccgggtaccctccctctgtctccggtgtccccggcccttactccatcccctctgtccctttgggaggagccccctcatctggcatgctgatggacaagccgcatccacctcccttggcaccaagtgactccactggaggaagccacagtgttcgcaaaggttaccggatccaggctgacaaagagagagactccatgaaggtcctgtactatgttgagaaggagctggctcagtttgatccagccagaaggatgagaggcagatataacaacaccatctcagaactcagctccctacatgaggaggacagcaatttccgccagtctttccatcagatgagaagcaagcagttccctgtgtctggggacttggagagcaatcctgactattggtcaggtgtcatgggaggcagcagtggggcaagccgcgggccctcagccatggagtataacaaagaggatcgagagagcttcaggcacagccagccgcgctccaagtcggagatgctgtcgcggaagaacttcgccacgggggtgccggccgtttccatggacgagctggcggccttcgctgactcctacggccagcggccccgccgggcagacggcaacagtcacgaggcgcggggcgggagccgcttcgagcgctcggagtcgcgggcgcacagcggcttctaccaggacgactccttggaggagtactacggtcagcgcagccgcagccgcgagcccctgaccgatgctgaccgcggctgggccttcagccccgcgcgccgcagacccgccgaggacgcgcacctgccgcggctggtgagccgcacgccaggcaccgcacccaaatacgaccactcgtacctgggcagcgcgcgggagcgccaggcgcggcccgagggcgccagccgcggtggcagcctggagacgccatccaagcggagcgcgcagctcggcccgcgcagcgcctcctactacgcttggtcgccgcccggcacctacaaggccggctcgtcgcaggacgaccaggaggacgcgtccgacgacgcgctgccgccctacagcgagctggagctgacccgcggcccgtcctaccgcggccgcgacctgccctaccacagcaactcggagaagaagaggaaaaaggagcccgccaagaaaaccaatgactttccaaccaggatgtcccttgtggtctgatgttgtcaacatttctctggataatgagaaatcagacatggactacggggacaagacacaaatctaagaaccagcaggcccaggaccttctctggccatcaccttggaagatttgctgatctctgctttggcaagggatggcaggcagcctttaagggaggctgatttcaaacctctgtgcccatctaactagtttgagaagcttaccaagaaagcaagaatgtgtgagaacattcctacatacagagtttctcaactatagcgtttatcctgcccagcctcctcccttaacagaaccaggactccatttgcaattctgaaagagagttagctctggactgctaaactccagaaattgcctatgcctacaatatgcttttctatacctcctgtgctatacttagagacagaagaatttattactactattagaaggccttcttctgacaagggaagatagcttcaagtcaaaatataccttttatccccatcactttacagtcactagtcaatgactgttgttacactaaaatcaaaaggcctttggtgagctcagtgacagtgacctctgggacaatcacagaaatgacttcactgctgttctgaatgacaattcttaagtggctaggacaaagcaaaagcgagtatacctttttgaaaagctgtctaagtggtatttccttttccattctgagaacgtaaactgctttttccttttctgctgcacatgtcaatatcggagtcttagacattaagggctcttctcttcctcccctctcctggacttcccacaggttggtgccacacacacagccctgcctccctctgcactctgattagattgtcattgaatgccttgtgataaatgcttaaaatatacacatgaaagagaagagggaggaaagaggagaaagcagtaatgcatatagaaaagaatgagaaggaatttaaaagggaaataacatcatctcattatattttgaatgtggaccatttcacccacaaacttcactcagtcttttccggttttgtgcttcacttgccgttaattgtttctgccatcccagttctgccattctaggacatgggggatgtggaacatacagcatttggcctgactagactgccactatggctgctttcaagagattagagatactgctttctcaggaaggagtacttcctattcccacccttgcctaaatgatagattttgcctaaatcccaaagctagatctctggattttatcgtttgtgtagatagcaaaaatggccacgaactctttccttctcatcaagaggtgccatcttttttccaaccccttgaatctggagttggctatgtgatttgatttagccagtagcccaacaaatgtgacacaagcagagacttgaaaagttcttgtgcatggggcttgtcctcttttgctgctcttgggaaccttgcaactaccatcaggtgaacaagcctggactatcctgctgcatgacaaaagaaaagggcccagttacccttgtcaccctatctgacagcccgtcaacttccagctgatgcagacatgggtgagtccaggtgataccaatagaagaactgcctagctgaacccagcccaaatttctgattcctactcgaggcgtgagaagttggtgcattctttatgttcatttctctttaagaacaaacctgactcgttcttgtctgaatgttcatccctgaacctcttaatccatccaaacttgtgtttctcatagcctccactattgttgacaaatttttatcaaagcttttcaccctgcactcttgtggagtggaggataatgcttgactttgctatcccttaatccagcagtggtttcttccctgtctatggatccgtggacaacctctgaagatctcttctttaccatccttttggtcttctccagagccaccctactggggctagaccctattctcaaagtaccattcctctagtatccatttgtacttcatgacatttccaaaaaaagtcctatgtttgcaatgaaataagaaagtggctgggtgagggtcggagggatgagctggtatgtgtcattgcttggagaattgacctaccaaaggacttccgtgttgctttggccagtcccagagaaatcaggagaacagttgaacccagtgctggcacttccaagggctggaagacacaagccataaccctggtgctgagttttagacttgctggtgtccctggcctctgaaagcctaggtctagcctgtctgtttggaccccagttcagatggaaaagatgataaaaaacatttcttagtcaccagctttggatttcaacttgctcaggcaattttggagaatattgggtagctgtggtagctattatcgctttatactgagcactgtgtcaggcttttcaccaccaaagagcctcatagcaccagctgcagagaccaaaaataatgtttttttaaagctacggacgtatgattttggtgaaggttgagggtagcaatgggaaagaaagaattattaaaattggaaacctgcaattccaaagacaacaaaactacagatagactgaaaagtacaaagaagatagcaggctactgaattaaccttgggagttgggaccaggttgtcctttgtagaactggataaatcattcagacttccaggctttcagtagagagaaaaagcagttgtttctgggtatatggacaggagttaaggctgagttgacaagtcaaaacttcttgtcctcagcacccctgactttcctctatgtgtccttttgtttcttctcctttgaatagtgtgtcctgcacaggaaatggttatatttgttagcttctttcctaggtcttattggagtacaaagtaaatcttgtgtaagacataatctctgtccactaggaccccgtaatttaataggggaaataagacatgctcaagaaaggagattttatacatagagtatgaaatagtgctatggataaattataataaaaccagagatttagtttttttaaaaaatgagaatactttgatattaaagtgttgtatgtgtttgtccatcatcttatttaaacatagacttggtgatctgaaaagccaatactcaaaagtctgaactgaaaagaggtgaattaggatcgggaaagggtgagcagcaggggtcccagggggatgatgcataagctgctgtgcttgcctgtgagtcactactgagtcaggaacacgctggaggagggagtgtggatgcaggtggcagggaggtgtcccctggtagatgagctgcttctctaggccatgcatggattcattaggaagttggagacaatggccatggacctggtgcatggcagctattccatccaagcacgttcacaggggagctcagcgtggctgctcctggggctcagttctgcggctgtgagtgctgctgcccatattcaccaacacagggcaggcctcacggagatgctaggcctcacatcccccttctcatgatcctcactgtgcacttgacataggattaggcatactggagatgagaaaaggctgccacccaaacccaaggcacctgaccacatctgtaaatatttctgaatagtccacaaaatttcacataggtagtctgattagatcttgcctttgagagaagctgaagtcacagatactgttgtaatttaccaccgcccctcacccaattttttttaataggtgaagaaaccatcactgccattaatgaagtcacaaacctattaggtctttagactcccaacctctggatcttttctgctgattagtgtttcccaaaattgcctaaccacaagaattaacttgatagctgctgttaaaaaggtattgttggaccctgttttggagattgattgggtgggtctagagccagaattcatatttttaatatgcattccaggagactcctgtgatcagatgcatttggaaatcattgcactaagtcatacctctgggtactccaaacagctagtcctgaggcttccttgggccttagaattttttcttcaaatgtcctggtgaggtccctctcaatcctttggggctggctgtggtgagtcactcagaagtctggctgtgacctggatgggctcaccagagtacgctagtggtagtgggaaaacaggcagagagaaaggagtgtcaggagcactcccagggaggctgttgtagatatttccattcccagaacagtgatctattgtgacagtctcagaacagacaacaagaattacaggtaattttctcattctcttgatatatttttagcaaaacttaaatcatgaatagaaggaaaagatgccattggggaaatagaaaaactcaatcattttataaagcatacaaatcataaggatgactggccaatagcactcccactttggtcttacctaaagttgggtggacaagaataataaaagtcctcattttatatccttccaaaatcagatttaaatgctgccagcatcttaatggaagtctgaaattgattgataggatgtagaaatccaaattcactaaaatagggggccagctacataaagtcctagaaggaaaaagtgcctcgcttttttctgccattatcctaccccctagtcatctggggaattgatctatgaagcttgaagaaggggcatttaacatcagagtggtgcaagggcagtgttgagatgctttaagcagcagcctgagctttagcactatttgaaggggagaaggttaatactaataatatttgtgttatttttatgatatattactgtttacagaacactttcatttgatcccaacatcaactgctgtgatagaggcagggcagatgttgtggtctcattacatagaatgtaaaactgaggttgaaaaatactaagtgacttgtctgtagtcaaatggtttttaaaattataaagccaggccttctgactgtcttgtctggtgtcctttccaattccttaaatactcatgggactggaatctgggtattccagattccagtttctcttcacagccagacatctggtgagaagagccgtagacttgatgcttgttcatatgtcatggatgtggcgaagccatgaagacagatactgttgctgcttcatccaactaagcaccattcattcctcaaatgctaatctaagagggagttgtagcttcactcaaggagagtttcgttttctttttctttcttttttttttttttgagacagggtcttgctctgtggcccatggtgcagtgcagtgcagtggtgctatcagctcactgcagtctcaaactcctagctcaagcaatcctcctccctcagcctcccaagtaggtaggactacagatatatgccaccacgtccagcaaattttgtttgtttgtagagatggggtcttgctatatttcccaggcttgtctcaaactcctggcctcaagtgatcctcccaccttggctgcctaaagtgctggtattacagacatgagccactgaacccagctgagagcctcactttcatcacctgtgctgtgaggggtaatatatgcttcaggttttctggagaatccttcttgcagagaagtttctgaatgaaacgacagattcatctggattcagaactccaggcagaagctgcttaacagcaaaaatctggcatcttcactacattttaagattttaggtagaactaagagggatcagatatagaggaataaggaatgtgagaaggaaaaagatatagtagtttagctaaatttttcttagagtttcttggtggggctggccatgaagtaactagtctgactcatttcttctgggaaggctaaaagagacacagatagcttctcttttaccttggctttaaggaaaagccattttattaacaaaagtattagacacgactgcataagaaatttgctgtgtgagaataaagaacaagggagtaggagggtgggacagagaagggtgagaagttggcttcgtgagggccacctgtcagttgtctttgtgccttgtgacatcaaaactgaaatgtttgtattactgttgtccatgactttttttttctgtgtcagacatacaaattgaatttggttgtaatgttttaaacgtaataaagaattcttacctacatttgttaccaagaactcataattaacacaactatggttaatcatgatctgacattaaatggcctcagcaagagaaagaatcatatgatacatgtccttctctgattgttgtaagtacagtaatagaggaatacatattgtggggttacagagggggctggtactgacagagcaaaaggtatgcttttacagattgtaataagctagataaattctgttgtcactcttactgctctccacagactgtaacattcagaaggagatgaagggtaggaaaggtggttggataaggtgatggtacctagctcatttccaagaggggcacaagcatatgcctgctagaaattacacttggggaagggaggaaggaagctattcgtgggaggacatttcaagttctgttaagatttgagaaattccacagcaccataattaagaggaggcaattaaaaacctttgttagcaaaagaagtgataaatacctctgagaactattaatcctgttttggatggctaagccctctcaagggaattccagattttagtggccttgtcaagcagaaaatctgtttttgcttgaagcatctgggctcaattttttttaagtagttaacttaaaaatgttaacatgtagatttaacttaaagatagactctaaaacagtttgattacctctggattttgtattattttgtgttttaattccatttaggtttttcagctttataaaatatttttgtttttatttataaagtatttgtttagaatcacccacgtgttttttctacacatctttttttcctatatttcagatcttccttttgaaatattttctttctgaaggaagtttacttcagtaatgatttgttggtaggatactcatcagtctttgttgatgtaaaagtctttatttcattcttgttcttgaaagataatttcactgattatgattctagattgatagttattttctttcaggacattgaagttattattacactcccttctgacttttatttttgcttttaagaagtcaattaccagtttaattatccttcctaatctgtctggtctctctgactgttctaaagatttttttgtctctagtgttctttggtttaattaacatgtgaccaggtgtggatttctttttatttatccaaattaggatttgtggtgtttcctaaatccgtggattggatttcccattaaatatggaaaactctcagctatattaacacatcaaatatttcctcttctttttaaactctctcttgagaattccaattgttagattttttttcattctatgccccatattgtttaatctatattttgtatttcctctctctgtgttttctattccctattcaggtaaatttcttcaggtttatcttccagctcactaattttcttttcagctagctctaatctcctttatttgagttttaattttaattaatatgtatttcatttctaggagtttagttctttttcaaatttacatagtccctgttgtcttgtgacttactctttttttttttttacaatgccctcttatttatctgaatatcttaaagatactaacttaaaattttatatccagtaattccaatatctacagtctttgtgggtctacttttagagtttgttacttctgctaactttcactcacagttttttgtttctttatgggttttatagttttttattttaagctcatgtgtggtgcaatgccatattacattgtgccagtcaagaaaaacctttcttgctccttatctgccttacatttctccataatgactctatatatacacagcaaccctggggaagccaggaagagtgaatgattgagtaaggaagaagtaagtgtgctaaatgggaaaaaatgaaaaaggcacacatacacgcattgtgcatttctttctaatgcaacctgtagactgcaaacaaaatcttaagatggggagggcaagaggctttaactttacatattctttagagtttgataatataagagaatggctgtcttaattatagacatagactgttttagggtttaagagtgaacagaaggctgttaattgttaagagtggccaaataaattatggatgtagatttcattcaagaggcaaggaaggccgggccctgtggctcacacctgaaatcccaacagttagggagacaaaggtgggaggatagcttgagccaggagttcaagacctacctgggcagtatagtgagatcccatcctccacaaaaaggtaaaaatttaaaaagacaagaaaaaaaagaagcagcaaggaaggactagactcataggatggattaaaattaggcaaaacaaataattcatttttccctatgattatctaattctaatccaatttttatatgctttcatttcaagaaataagaagtaggctaatttcaggttctcttagaaaatcttggcagagacatcctaatcatactcatcacaccacttaggtgaaaattatattttctgctgaattggttataagcatttcctgaatacttatcaggtggcctaagatgactcaccaaaaatggcatgaggtgtagaagtagctaggaagttgcttagaggtgagtgagttggtctgacacgccatctagtggcacacatccaagagagtgactctattgctaaccttccagtattggatggaggtgtgcctcacattacttaagggaaaagctacatatgaatttatatagcttattttaatgctatatatgaatttatatagatgaatttggcttttgaaaaacaaattaagtgcattaggaattttttctttaaaagtgatatgtttttcttacactttgcaagtttagaacttgccatattatgtttttgaggcaggcttctgtggatataatgtggggaaaaccatgaggtttttgcttgggatcaagtgggatttaggtgcatgccttttgtgatttaaagctattttaaagtgtgcttttaacaccatggaattacaattgttttctgaagtcaggtcaggactctgattctgcagaattatggtgaagccagtttctctttaacaagcaaaaaccgtgtcatcaaactgtacaaccaaaggacctaaatagtccattccctagtcttcagctgtacaaagatgaatcaatctctctgtctcttgttctctctctcactgtctctaaaaaccaagcagaggagaaaattccagacatgttaaaacactttacttttttttaaaacaatccttgctctctggagatattttctcacattttgttacaaattttgtgtagaagcatagccacagtggattttttctggctctttttctttctctgagacgttaatgtccagtagagcaaagctagaaggatatatatatatatatatatatataaatatatatatttatatatatttatatatatatatatatatatatgtatgtatacacacacacatatatatgtcaatttctattaaccttgtttttggaaaaacgctttgttcaactgaatgtagttaaattataatggacattaatatacaaccccaccctcccagcctctttttgttgctggtatgacttaggcacctagcttttctcattccctcaggccaaggcgatagcctcttatgtttcattcctttggcagctgtattagtaaaaaaatttttggttgcaaatgacaggaagatagctcagactagcttaagaacaagaaaaggagaaatggagctcatctattagagagatcctggagtagctcacaggctggaagagctgtaggaactgagaacaaacctgggtctcaatgtagtaagatttaagattccctgtccatcatccacacctacttgtgtttttacatcaatacattttctcagtgaggatagacttactccaaaaggcaggaatatagccactagcagtctgagagtcacaactttccagctcatttgaccaagcaggcaaaaggctttactcatgagaacaatcctggagaaagactgcagtcaactcatattgagtcatgtgcccatatctgagctaatcatgtggccagagatgtggcaagtctgtttatgaccaggaaggtgagactgcgatggactggatagtgggataggaagatttctccaaagagagaagagagttgttattaatagaagaagtgagaatagtgatgctgggcagacaaaacacatacacaacaccaacagctatctgctactgcatccgaaaagattctttatctgcagccacagagccctgaacaaccagcctttccggcttccttttgttgccaattccctcacacgtattattccaacccaaggcttcagggaggctgtttttaccacagttcagtgacaaatcctaccagagccttccatataccagtgaatgtccttggttatacttgtctcgttctgaatttagaaatccatctctgtgtcactgccttcattaggacctttcgtctcctccctggattcttctggtaccctcatttcttgtctcctacttcctgttgtctcctaattattcaccttctactttttttgttagaggttccagacagtttcaagaaaaatacttaatgctgggcaaggtgcttctcccttcctctctaagttccatagaacaggggacattttgcttctctgttgctatggactgagtgttttgtgtcttccccaaatttttatgtcaaaatcctaatcctaatgtgatggtatttgggcatgaggcctttgggaggtgattaggtcagtagggtggagctcttatgatggaattagtgtccttataagaagagacaggagagagattacttcctctctttctctgccatgtgaggatacagcaaggtatctgtctgcaaaccaggaaaaggaccttcgccaggaactgaatgtattggtgcactgagcttggacttcccagattctagaactgtgagaaataaatttctgatatttaa

SEQ ID NO: 9835 - DNA, 2446 bp, Homo sapiens
  source 1..2446: mol_type = unassigned DNA; mol_type = unassigned DNA
cggaccccggaagcccgcggcagcgcgcgctcagccggcggcgcgatccagcccccggccccgcctgcgcggccggcccggcgggcgctgcgcccagggacgcccggtgcccgccgctccgccgccgcccgctgccgcggggtgacagcgatccttctgttccagccatttcccactttcctcactccgtaattcggctgggaagttggggaagatggatagggtcttgctgaggtggatttctctcttctggctaacagccatggtcgaaggccttcaggtcacagtgcccgacaagaagaaggtggccatgctcttccagcccactgtgcttcgctgccacttctcaacatcctcccatcagcctgcagttgtgcagtggaagttcaagtcctactgccaggatcgcatgggagaatccttgggcatgtcctctacccgggcccaatctctcagcaagagaaacctggaatgggacccctacttggattgtttggacagcaggaggactgttcgagtagtagcttcaaaacagggctcgactgtcaccctgggagatttctacaggggcagagagatcacgattgttcatgatgcagatcttcaaattggaaagcttatgtggggagacagcggactctattactgtattatcaccaccccagatgacctggaggggaaaaatgaggactcagtggaactgctggtgttgggcaggacagggctgcttgctgatctcttgcccagttttgctgtggagattatgccagagtgggtgtttgttggcctggtgctcctgggcgtcttcctcttcttcgtcctggtggggatctgctggtgccagtgctgccctcacagctgctgctgctatgtccgctgcccatgctgcccagattcctgctgctgccctcaagcctttcgcaaaggttaccggatccaggctgacaaagagagagactccatgaaggtcctgtactatgttgagaaggagctggctcagtttgatccagccagaaggatgagaggcagatataacaacaccatctcagaactcagctccctacatgaggaggacagcaatttccgccagtctttccatcagatgagaagcaagcagttccctgtgtctggggacttggagagcaatcctgactattggtcaggtgtcatgggaggcagcagtggggcaagccgcgggccctcagccatggagtataacaaagaggatcgagagagcttcaggcacagccagccgcgctccaagtcggagatgctgtcgcggaagaacttcgccacgggggtgccggccgtttccatggacgagctggcggccttcgctgactcctacggccagcggccccgccgggcagacggcaacagtcacgaggcgcggggcgggagccgcttcgagcgctcggagtcgcgggcgcacagcggcttctaccaggacgactccttggaggagtactacggtcagcgcagccgcagccgcgagcccctgaccgatgctgaccgcggctgggccttcagccccgcgcgccgcagacccgccgaggacgcgcacctgccgcggctggtgagccgcacgccaggcaccgcacccaaatacgaccactcgtacctgggcagcgcgcgggagcgccaggcgcggcccgagggcgccagccgcggtggcagcctggagacgccatccaagcggagcgcgcagctcggcccgcgcagcgcctcctactacgcttggtcgccgcccggcacctacaaggccggctcgtcgcaggacgaccaggaggacgcgtccgacgacgcgctgccgccctacagcgagctggagctgacccgcggcccgtcctaccgcggccgcgacctgccctaccacagcaactcggagaagaagaggaaaaaggagcccgccaagaaaaccaatgactttccaaccaggatgtcccttgtggtctgatgttgtcaacatttctctggataatgagaaatcagacatggactacggggacaagacacaaatctaagaaccagcaggcccaggaccttctctggccatcaccttggaagatttgctgatctctgctttggcaagggatggcaggcagcctttaagggaggctgatttcaaacctctgtgcccatctaactagtttgagaagcttaccaagaaagcaagaatgtgtgagaacattcctacatacagagtttctcaactatagcgtttatcctgcccagcctcctcccttaacagaaccaggactccatttgcaattctgaaagagagttagctctggactgctaaactccagaaattgcctatgcctacaatatgcttttctatacctcctgtgctatacttagagacagaagaatttattactactattagaaggccttcttctgacaagggaagatagcttcaagtcaaaatataccttttatcccc

SEQ ID NO: 9836 - DNA, 2242 bp, Homo sapiens
  source 1..2242: mol_type = unassigned DNA; mol_type = unassigned DNA
cggaccccggaagcccgcggcagcgcgcgctcagccggcggcgcgatccagcccccggccccgcctgcgcggccggcccggcgggcgctgcgcccagggacgcccggtgcccgccgctccgccgccgcccgctgccgcggggtgacagcgatccttctgttccagccatttcccactttcctcactccgtaattcggctgggaagttggggaagatggatagggtcttgctgaggtggatttctctcttctggctaacagccatggtcgaaggccttcaggtcacagtgcccgacaagaagaaggtggccatgctcttccagcccactgtgcttcgctgccacttctcaacatcctcccatcagcctgcagttgtgcagtggaagttcaagtcctactgccaggatcgcatgggagaatccttgggcatgtcctctacccgggcccaatctctcagcaagagaaacctggaatgggacccctacttggattgtttggacagcaggaggactgttcgagtagtagcttcaaaacagggctcgactgtcaccctgggagatttctacaggggcagagagatcacgattgttcatgatgcagatcttcaaattggaaagcttatgtggggagacagcggactctattactgtattatcaccaccccagatgacctggaggggaaaaatgaggactcagtggaactgctggtgttggttcgcaaaggttaccggatccaggctgacaaagagagagactccatgaaggtcctgtactatgttgagaaggagctggctcagtttgatccagccagaaggatgagaggcagatataacaacaccatctcagaactcagctccctacatgaggaggacagcaatttccgccagtctttccatcagatgagaagcaagcagttccctgtgtctggggacttggagagcaatcctgactattggtcaggtgtcatgggaggcagcagtggggcaagccgcgggccctcagccatggagtataacaaagaggatcgagagagcttcaggcacagccagccgcgctccaagtcggagatgctgtcgcggaagaacttcgccacgggggtgccggccgtttccatggacgagctggcggccttcgctgactcctacggccagcggccccgccgggcagacggcaacagtcacgaggcgcggggcgggagccgcttcgagcgctcggagtcgcgggcgcacagcggcttctaccaggacgactccttggaggagtactacggtcagcgcagccgcagccgcgagcccctgaccgatgctgaccgcggctgggccttcagccccgcgcgccgcagacccgccgaggacgcgcacctgccgcggctggtgagccgcacgccaggcaccgcacccaaatacgaccactcgtacctgggcagcgcgcgggagcgccaggcgcggcccgagggcgccagccgcggtggcagcctggagacgccatccaagcggagcgcgcagctcggcccgcgcagcgcctcctactacgcttggtcgccgcccggcacctacaaggccggctcgtcgcaggacgaccaggaggacgcgtccgacgacgcgctgccgccctacagcgagctggagctgacccgcggcccgtcctaccgcggccgcgacctgccctaccacagcaactcggagaagaagaggaaaaaggagcccgccaagaaaaccaatgactttccaaccaggatgtcccttgtggtctgatgttgtcaacatttctctggataatgagaaatcagacatggactacggggacaagacacaaatctaagaaccagcaggcccaggaccttctctggccatcaccttggaagatttgctgatctctgctttggcaagggatggcaggcagcctttaagggaggctgatttcaaacctctgtgcccatctaactagtttgagaagcttaccaagaaagcaagaatgtgtgagaacattcctacatacagagtttctcaactatagcgtttatcctgcccagcctcctcccttaacagaaccaggactccatttgcaattctgaaagagagttagctctggactgctaaactccagaaattgcctatgcctacaatatgcttttctatacctcctgtgctatacttagagacagaagaatttattactactattagaaggccttcttctgacaagggaagatagcttcaagtcaaaatataccttttatcccc

SEQ ID NO: 9837 - DNA, 1238 bp, Homo sapiens
  source 1..1238: mol_type = unassigned DNA; mol_type = unassigned DNA
cggaccccggaagcccgcggcagcgcgcgctcagccggcggcgcgatccagcccccggccccgcctgcgcggccggcccggcgggcgctgcgcccagggacgcccggtgcccgccgctccgccgccgcccgctgccgcggggtgacagcgatccttctgttccagccatttcccactttcctcactccgtaattcggctgggaagttggggaagatggatagggtcttgctgaggtggatttctctcttctggctaacagccatggtcgaaggccttcaggtcacagtgcccgacaagaagaaggtggccatgctcttccagcccactgtgcttcgctgccacttctcaacatcctcccatcagcctgcagttgtgcagtggaagttcaagtcctactgccaggatcgcatgggagaatccttgggcatgtcctctacccgggcccaatctctcagcaagagaaacctggaatgggacccctacttggattgtttggacagcaggaggactgttcgagtagtagcttcaaaacagggctcgactgtcaccctgggagatttctacaggggcagagagatcacgattgttcatgatgcagatcttcaaattggaaagcttatgtggggagacagcggactctattactgtattatcaccaccccagatgacctggaggggaaaaatgaggactcagtggaactgctggtgttggaatgactttccaaccaggatgtcccttgtggtctgatgttgtcaacatttctctggataatgagaaatcagacatggactacggggacaagacacaaatctaagaaccagcaggcccaggaccttctctggccatcaccttggaagatttgctgatctctgctttggcaagggatggcaggcagcctttaagggaggctgatttcaaacctctgtgcccatctaactagtttgagaagcttaccaagaaagcaagaatgtgtgagaacattcctacatacagagtttctcaactatagcgtttatcctgcccagcctcctcccttaacagaaccaggactccatttgcaattctgaaagagagttagctctggactgctaaactccagaaattgcctatgcctacaatatgcttttctatacctcctgtgctatacttagagacagaagaatttattactactattagaaggccttcttctgacaagggaagatagcttcaagtcaaaatataccttttatcccc

SEQ ID NO: 9838 - DNA, 1950 bp, Homo sapiens
  source 1..1950: mol_type = unassigned DNA; mol_type = unassigned DNA
cggaccccggaagcccgcggcagcgcgcgctcagccggcggcgcgatccagcccccggccccgcctgcgcggccggcccggcgggcgctgcgcccagggacgcccggtgcccgccgctccgccgccgcccgctgccgcggggtgacagcgatccttctgttccagccatttcccactttcctcactccgtaattcggctgggaagttggggaagatggatagggtcttgctgaggtggatttctctcttctggctaacagccatggtcgaaggccttcaggtcacagtgcccgacaagaagaaggtggccatgctcttccagcccactgtgcttcgctgccacttctcaacatcctcccatcagcctgcagttgtgcagtggaagttcaagtcctactgccaggatcgcatgggagaatccttgggcatgtcctctacccgggcccaatctctcagcaagagaaacctggaatgggacccctacttggattgtttggacagcaggaggactgttcgagtagtagcttcaaaacagggctcgactgtcaccctgggagatttctacaggggcagagagatcacgattgttcatgatgcagatcttcaaattggaaagcttatgtggggagacagcggactctattactgtattatcaccaccccagatgacctggaggggaaaaatgaggactcagtggaactgctggtgttgggcaggacagggctgcttgctgatctcttgcccagttttgctgtggagattatgccagagtgggtgtttgttggcctggtgctcctgggcgtcttcctcttcttcgtcctggtggggatctgctggtgccagtgctgccctcacagctgctgctgctatgtccgctgcccatgctgcccagattcctgctgctgccctcaagccttgtatgaagcagggaaagcagcaaaggccgggtaccctccctctgtctccggtgtccccggcccttactccatcccctctgtccctttgggaggagccccctcatctggcatgctgatggacaagccgcatccacctcccttggcaccaagtgactccactggaggaagccacagtgttcgcaaaggttaccggatccaggctgacaaagagagagactccatgaaggtcctgtactatgttgagaaggagctggctcagtttgatccagccagaaggatgagaggcagatataacaacaccatctcagaactcagctccctacatgaggaggacagcaatttccgccagtctttccatcagatgagaagcaagcagttccctgtgtctggggacttggagagcaatcctgactattggtcaggtgtcatgggaggcagcagtggggcaagccgcgggccctcagccatggagtataacaaagaggatcgagagagcttcaggcacagaatgactttccaaccaggatgtcccttgtggtctgatgttgtcaacatttctctggataatgagaaatcagacatggactacggggacaagacacaaatctaagaaccagcaggcccaggaccttctctggccatcaccttggaagatttgctgatctctgctttggcaagggatggcaggcagcctttaagggaggctgatttcaaacctctgtgcccatctaactagtttgagaagcttaccaagaaagcaagaatgtgtgagaacattcctacatacagagtttctcaactatagcgtttatcctgcccagcctcctcccttaacagaaccaggactccatttgcaattctgaaagagagttagctctggactgctaaactccagaaattgcctatgcctacaatatgcttttctatacctcctgtgctatacttagagacagaagaatttattactactattagaaggccttcttctgacaagggaagatagcttcaagtcaaaatataccttttatcccc

SEQ ID NO: 9839 - DNA, 2566 bp, Homo sapiens
  source 1..2566: mol_type = unassigned DNA; mol_type = unassigned DNA
cggaccccggaagcccgcggcagcgcgcgctcagccggcggcgcgatccagcccccggccccgcctgcgcggccggcccggcgggcgctgcgcccagggacgcccggtgcccgccgctccgccgccgcccgctgccgcggggtgacagcgatccttctgttccagccatttcccactttcctcactccgtaattcggctgggaagttggggaagatggatagggtcttgctgaggtggatttctctcttctggctaacagccatggtcgaaggccttcaggtcacagtgcccgacaagaagaaggtggccatgctcttccagcccactgtgcttcgctgccacttctcaacatcctcccatcagcctgcagttgtgcagtggaagttcaagtcctactgccaggatcgcatgggagaatccttgggcatgtcctctacccgggcccaatctctcagcaagagaaacctggaatgggacccctacttggattgtttggacagcaggaggactgttcgagtagtagcttcaaaacagggctcgactgtcaccctgggagatttctacaggggcagagagatcacgattgttcatgatgcagatcttcaaattggaaagcttatgtggggagacagcggactctattactgtattatcaccaccccagatgacctggaggggaaaaatgaggactcagtggaactgctggtgttggagtgggtgtttgttggcctggtgctcctgggcgtcttcctcttcttcgtcctggtggggatctgctggtgccagtgctgccctcacagctgctgctgctatgtccgctgcccatgctgcccagattcctgctgctgccctcaagccttgtatgaagcagggaaagcagcaaaggccgggtaccctccctctgtctccggtgtccccggcccttactccatcccctctgtccctttgggaggagccccctcatctggcatgctgatggacaagccgcatccacctcccttggcaccaagtgactccactggaggaagccacagtgttcgcaaaggttaccggatccaggctgacaaagagagagactccatgaaggtcctgtactatgttgagaaggagctggctcagtttgatccagccagaaggatgagaggcagatataacaacaccatctcagaactcagctccctacatgaggaggacagcaatttccgccagtctttccatcagatgagaagcaagcagttccctgtgtctggggacttggagagcaatcctgactattggtcaggtgtcatgggaggcagcagtggggcaagccgcgggccctcagccatggagtataacaaagaggatcgagagagcttcaggcacagccagccgcgctccaagtcggagatgctgtcgcggaagaacttcgccacgggggtgccggccgtttccatggacgagctggcggccttcgctgactcctacggccagcggccccgccgggcagacggcaacagtcacgaggcgcggggcgggagccgcttcgagcgctcggagtcgcgggcgcacagcggcttctaccaggacgactccttggaggagtactacggtcagcgcagccgcagccgcgagcccctgaccgatgctgaccgcggctgggccttcagccccgcgcgccgcagacccgccgaggacgcgcacctgccgcggctggtgagccgcacgccaggcaccgcacccaaatacgaccactcgtacctgggcagcgcgcgggagcgccaggcgcggcccgagggcgccagccgcggtggcagcctggagacgccatccaagcggagcgcgcagctcggcccgcgcagcgcctcctactacgcttggtcgccgcccggcacctacaaggccggctcgtcgcaggacgaccaggaggacgcgtccgacgacgcgctgccgccctacagcgagctggagctgacccgcggcccgtcctaccgcggccgcgacctgccctaccacagcaactcggagaagaagaggaaaaaggagcccgccaagaaaaccaatgactttccaaccaggatgtcccttgtggtctgatgttgtcaacatttctctggataatgagaaatcagacatggactacggggacaagacacaaatctaagaaccagcaggcccaggaccttctctggccatcaccttggaagatttgctgatctctgctttggcaagggatggcaggcagcctttaagggaggctgatttcaaacctctgtgcccatctaactagtttgagaagcttaccaagaaagcaagaatgtgtgagaacattcctacatacagagtttctcaactatagcgtttatcctgcccagcctcctcccttaacagaaccaggactccatttgcaattctgaaagagagttagctctggactgctaaactccagaaattgcctatgcctacaatatgcttttctatacctcctgtgctatacttagagacagaagaatttattactactattagaaggccttcttctgacaagggaagatagcttcaagtcaaaatataccttttatcccc

SEQ ID NO: 9840 - DNA, 2299 bp, Homo sapiens
  source 1..2299: mol_type = unassigned DNA; mol_type = unassigned DNA
cggaccccggaagcccgcggcagcgcgcgctcagccggcggcgcgatccagcccccggccccgcctgcgcggccggcccggcgggcgctgcgcccagggacgcccggtgcccgccgctccgccgccgcccgctgccgcggggtgacagcgatccttctgttccagccatttcccactttcctcactccgtaattcggctgggaagttggggaagatggatagggtcttgctgaggtggatttctctcttctggctaacagccatggtcgaaggccttcaggtcacagtgcccgacaagaagaaggtggccatgctcttccagcccactgtgcttcgctgccacttctcaacatcctcccatcagcctgcagttgtgcagtggaagttcaagtcctactgccaggatcgcatgggagaatccttgggcatgtcctctacccgggcccaatctctcagcaagagaaacctggaatgggacccctacttggattgtttggacagcaggaggactgttcgagtagtagcttcaaaacagggctcgactgtcaccctgggagatttctacaggggcagagagatcacgattgttcatgatgcagatcttcaaattggaaagcttatgtggggagacagcggactctattactgtattatcaccaccccagatgacctggaggggaaaaatgaggactcagtggaactgctggtgttgggcaggacagggctgcttgctgatctcttgcccagttttgctgtggagattatgccagttcgcaaaggttaccggatccaggctgacaaagagagagactccatgaaggtcctgtactatgttgagaaggagctggctcagtttgatccagccagaaggatgagaggcagatataacaacaccatctcagaactcagctccctacatgaggaggacagcaatttccgccagtctttccatcagatgagaagcaagcagttccctgtgtctggggacttggagagcaatcctgactattggtcaggtgtcatgggaggcagcagtggggcaagccgcgggccctcagccatggagtataacaaagaggatcgagagagcttcaggcacagccagccgcgctccaagtcggagatgctgtcgcggaagaacttcgccacgggggtgccggccgtttccatggacgagctggcggccttcgctgactcctacggccagcggccccgccgggcagacggcaacagtcacgaggcgcggggcgggagccgcttcgagcgctcggagtcgcgggcgcacagcggcttctaccaggacgactccttggaggagtactacggtcagcgcagccgcagccgcgagcccctgaccgatgctgaccgcggctgggccttcagccccgcgcgccgcagacccgccgaggacgcgcacctgccgcggctggtgagccgcacgccaggcaccgcacccaaatacgaccactcgtacctgggcagcgcgcgggagcgccaggcgcggcccgagggcgccagccgcggtggcagcctggagacgccatccaagcggagcgcgcagctcggcccgcgcagcgcctcctactacgcttggtcgccgcccggcacctacaaggccggctcgtcgcaggacgaccaggaggacgcgtccgacgacgcgctgccgccctacagcgagctggagctgacccgcggcccgtcctaccgcggccgcgacctgccctaccacagcaactcggagaagaagaggaaaaaggagcccgccaagaaaaccaatgactttccaaccaggatgtcccttgtggtctgatgttgtcaacatttctctggataatgagaaatcagacatggactacggggacaagacacaaatctaagaaccagcaggcccaggaccttctctggccatcaccttggaagatttgctgatctctgctttggcaagggatggcaggcagcctttaagggaggctgatttcaaacctctgtgcccatctaactagtttgagaagcttaccaagaaagcaagaatgtgtgagaacattcctacatacagagtttctcaactatagcgtttatcctgcccagcctcctcccttaacagaaccaggactccatttgcaattctgaaagagagttagctctggactgctaaactccagaaattgcctatgcctacaatatgcttttctatacctcctgtgctatacttagagacagaagaatttattactactattagaaggccttcttctgacaagggaagatagcttcaagtcaaaatataccttttatcccc

SEQ ID NO: 9841 - DNA, 651 bp, Homo sapiens
  source 1..651: mol_type = unassigned DNA; mol_type = unassigned DNA
ggagttggagcccgctctgcgcgctgcgggacggggcacggcggagcagggttgggtccgcctcgagcggggagggtgatgctgcaccacaggggcggggctggaggtaaagcgcggagcggagagggaccaggctcggcactgatttgtgttcagggctagcccagaggggcggggccagatcatcagaaaagcccttactgaggaaaaacgtgtctcaacaaaaacatcagctgcagatcttgtgacagaaacagatcaccttgtggaagatttaattatttctgagttgcgagagaggtttccttcacacaggttcattgcagaagaggccgcggcttctggggccaagtgtgtgctcacccacagcccgacgtggatcatcgaccccatcgacggcacctgcaattttgtgcacagattcccgactgtggcggttagcattggatttgctgttcgacaagagcttgaattcggagtgatttaccactgcacagaggagcggctgtacacgggccggcggggtcggggcgccttctgcaatggccagcggctccgggtctccggggagacagatctctcaaaggccttggttctgacagaaattggccccaaacgtgaccctgcgaccctgaagctgttcctgagtaa

SEQ ID NO: 9842 - DNA, 923 bp, Homo sapiens
  source 1..923: mol_type = unassigned DNA; mol_type = unassigned DNA
cgctctgcgcgctgcgggacggggcacggcggagcagggttgggtccgcctcgagcggggagggtgatgctgcaccacaggggcggggctggagatcatcagaaaagcccttactgaggaaaaacgtgtctcaacaaaaacatcagctgcagatcttgtgacagaaacagatcaccttgtggaagatttaattatttctgagttgcgagagaggtttccttcacacaggttcattgcagaagaggccgcggcttctggggccaagtgtgtgctcacccacagcccgacgtggatcatcgaccccatcgacggcacctgcaattttgtgcacagattcccgactgtggcggttagcattggatttgctgttcgacaagagcttgaattcggagtgatttaccactgcacagaggagcggctgtacacgggccggcggggtcggggcgccttctgcaatggccagcggctccgggtctccggggagacagatctctcaaaggccttggttctgacagaaattggccccaaacgtgaccctgcgaccctgaagctgttcctgagtaacatggagcggctgctgcatgccaaggcgcatggggtccgagtgattggaagctccacattggcactctgccacctggcctcaggggccgcggatgcctattaccagtttggcctgcactgctgggatctggcggctgccacagtcatcatcagagaagcaggcggcatcgtgatagacacttcgggtggacccctcgacctcatggcttgcagagtggttgcggccagcacccgggagatggcgatgctcatagctcaggccttacagacgattaactatgggcgggatgatgagaagtgactgcggctgaggcaaagctgctcccaaggcctccctgggctgctgtgggctcctgggg

SEQ ID NO: 9843 - DNA, 1534 bp, Homo sapiens
  source 1..1534: mol_type = unassigned DNA; mol_type = unassigned DNA
gctgggctgggctcggcacggggcggggcggagggtggggagcggaaagcaggacgcacggctcccgcggcccgctggctgcccttcccgccagcgcaggtgtgggacgggcggcggactaggcacagagctgcgggagcaggcacagggagtgtggagcctggcggcgggacggcgggatccggtgggagccggagtcccgccgaggggggctggaggtggaggggcccggcgaggccgcgatgaagccgagcggcgaggaccaggcggcgctggcggccggcccctgggaggagtgcttccaggcggccgtgcagctggcgctgcgggcaggacagatcatcagaaaagcccttactgaggaaaaacgtgtctcaacaaaaacatcagctgcagatcttgtgacagaaacagatcaccttgtggaagatttaattatttctgagttgcgagagaggtttccttcacacaggttcattgcagaagaggccgcggcttctggggccaagtgtgtgctcacccacagcccgacgtggatcatcgaccccatcgacggcacctgcaattttgtgcacagattcccgactgtggcggttagcattggatttgctgttcgacaagagcttgaattcggagtgatttaccactgcacagaggagcggctgtacacgggccggcggggtcggggcgccttctgcaatggccagcggctccgggtctccggggagacagatctctcaaaggccttggttctgacagaaattggccccaaacgtgaccctgcgaccctgaagctgttcctgagtaacatggagcggctgctgcatgccaaggcgcatggggtccgagtgattggaagctccacattggcactctgccacctggcctcaggggccgcggatgcctattaccagtttggcctgcactgctgggatctggcggctgccacagtcatcatcagagaagcaggcggcatcgtgatagacacttcgggtggacccctcgacctcatggcttgcagagtggttgcggccagcacccgggagatggcgatgctcatagctcaggccttacagacgattaactatgggcgggatgatgagaagtgactgcggctgaggcaaagctgctcccaaggcctccctgggctgctgtgggctcctggggaggtggccctcgtggcccacgctccatgccagtggctcacgctctgctcctggctaccccagagggagttgtcacgctacagtgagtggctggccttttaaatcgacgtctctctcaccaggatttggtgtttagctgtttctctctttaatctcacgtagcctttttcaggttagtacgtgttcttctgtcagggccaaaactcaaatctcctgtgaaatacgtattgataatccaatcttgatttttccccccagaatataaatctcaggtaataaggctttagaactgctgataaagcggatcgttctcaggccctccccccggagtacttcagaatgcaataaatcaaaataatggccctgtg

SEQ ID NO: 9844 - DNA, 1616 bp, Homo sapiens
  source 1..1616: mol_type = unassigned DNA; mol_type = unassigned DNA
gggagcggaaagcaggacgcacggctcccgcggcccgctggctgcccttcccgccagcgcaggtgtgggacgggcggcggactaggcacagagctgcgggagcaggcacagggagtgtggagcctggcggcgggacggcgggatccggtgggagccggagtcccgccgaggggggctggaggtggaggggcccggcgaggccgcgatgaagccgagcggcgaggaccaggcggcgctggcggccggcccctgggaggagtgcttccaggcggccgtgcagctggcgctgcgggcaggacagatcatcagaaaagcccttactgaggaaaaacgtgtctcaacaaaaacatcagctgcagatcttgtgacagaaacagatcaccttgtggaagatttaattatttctgagttgcgagagaggtttccttcacacaggttcattgcagaagaggccgcggcttctggggccaagtgtgtgctcacccacagcccgacgtggatcatcgaccccatcgacggcacctgcaattttgtgcacagattcccgactgtggcggttagcattggatttgctgttcgacaagaggtgcgggtgtggcccaggtccccagggcccctccctgggctccctctggccatccttcctttctggcttcagcctctgtgcgcctggtttgctgtttgccctgtgccttaatcatgactggcaaatccaagcctcttgaattcggagtgatttaccactgcacagaggagcggctgtacacgggccggcggggtcggggcgccttctgcaatggccagcggctccgggtctccggggagacagatctctcaaaggccttggttctgacagaaattggccccaaacgtgaccctgcgaccctgaagctgttcctgagtaacatggagcggctgctgcatgccaaggcgcatggggtccgagtgattggaagctccacattggcactctgccacctggcctcaggggccgcggatgcctattaccagtttggcctgcactgctgggatctggcggctgccacagtcatcatcagagaagcaggcggcatcgtgatagacacttcgggtggacccctcgacctcatggcttgcagagtggttgcggccagcacccgggagatggcgatgctcatagctcaggccttacagacgattaactatgggcgggatgatgagaagtgactgcggctgaggcaaagctgctcccaaggcctccctgggctgctgtgggctcctggggaggtggccctcgtggcccacgctccatgccagtggctcacgctctgctcctggctaccccagagggagttgtcacgctacagtgagtggctggccttttaaatcgacgtctctctcaccaggatttggtgtttagctgtttctctctttaatctcacgtagcctttttcaggttagtacgtgttcttctgtcagggccaaaactcaaatctcctgtgaaatacgtattgataatccaatcttgatttttccccccagaatataaatctcaggtaataaggctttagaactgctgataaagcggatcgttctcaggccctccccccggagtacttcagaatgcaataaatcaa

SEQ ID NO: 9845 - DNA, 1575 bp, Homo sapiens
  source 1..1575: mol_type = unassigned DNA; mol_type = unassigned DNA
cgccagcgcaggtgtgggacgggcggcggactaggcacagagctgcgggagcaggcacagggagtgtggagcctggcggcgggacggcgggatccggtgggagccggagtcccgccgaggggggctggaggtggaggggcccggcgaggccgcgatgaagccgagcggcgaggaccaggcggcgctggcggccggcccctgggaggagtgcttccaggcggccgtgcagctggcgctgcgggcaggacagatcatcagaaaagcccttactgaggaaaaacgtgtctcaacaaaaacatcagctgcagatcttgtgacagaaacagatcaccttgtggaagatttaattatttctgagttgcgagagaggtttccttcacacaggtctcctttttctctagtacacatgtgaacccggcacaggaactggatagaaaacctctcggcaaggccacatagtcatgcacagaacagatgtttgcttagcgcctgcccaaggcctcacccttagtgaacttgggacagtccaagagtgtcaaaagcactgccctgaatgctttagatctagtcttttctttgatcctgagaatgcctttggaaggtgtaaacagcggccagctccacagggaccagcctgcagaaggttcattgcagaagaggccgcggcttctggggccaagtgtgtgctcacccacagcccgacgtggatcatcgaccccatcgacggcacctgcaattttgtgcacagattcccgactgtggcggttagcattggatttgctgttcgacaagagcttgaattcggagtgatttaccactgcacagaggagcggctgtacacgggccggcggggtcggggcgccttctgcaatggccagcggctccgggtctccggggagacaggatctcactctgtcacccaggctggagtgcggtggtgcagtcttggctcactgcagcctccacatcctaggttcaagcaattctcctgcctcatcctcctgagtagctgggactacaggcatgcgccaccacatctggctaatttttttgtattttttagtagagacggggtttcaccatgttggccaggctggtctcaaactgctgacctcaagtgagccttttgcctcggcctccgaaagtgctggggttacagttgtgagccactgcacctgaccatatttttaaaatatagagtcgataatgagttatactgggtttttttttttctgtttttttttttctgagatggagtttcactcttgttgcccaggctggagtgcaatggggcgatctcggctcactgcaacctccgcctccctggttcaagtgattttcctcctaagcctcccaagtagctgggattacaggcgcatgccaccatgcccagctaatttttgtatttttagtggagacagggttttgtcatgttggccaggctggtcttgaactcctgacctcaggtgatccacccgcccgggcctcccaaagtattgggattacaggcatgagccaccacacccggcctcaaccccatctcttaaaaaaataaaaagataacctttgctctca

SEQ ID NO: 9846 - DNA, 895 bp, Homo sapiens
  source 1..895: mol_type = unassigned DNA; mol_type = unassigned DNA
ggtgggagccggagtcccgccgaggggggctggaggtggaggggcccggcgaggccgcgatgaagccgagcggcgaggaccaggcggcgctggcggccggcccctgggaggagtgcttccaggcggccgtgcagctggcgctgcgggcaggacagatcatcagaaaagcccttactgaggaaaaacgtgtctcaacaaaaacatcagctgcagatcttgtgacagaaacagatcaccttgtggaagatttaattatttctgagttgcgagagaggtttccttcacacaggttcattgcagaagaggccgcggcttctggggccaagtgtgtgctcacccacagcccgacgtggatcatcgaccccatcgacggcacctgcaattttgtgcacagcttgaattcggagtgatttaccactgcacagaggagcggctgtacacgggccggcggggtcggggcgccttctgcaatggccagcggctccgggtctccggggagacagatctctcaaaggccttggttctgacagaaattggccccaaacgtgaccctgcgaccctgaagctgttcctgagtaacatggagcggctgctgcatgccaaggcgcatggggtccgagtgattggaagctccacattggcactctgccacctggcctcaggggccgcggatgcctattaccagtttggcctgcactgctgggatctggcggctgccacagtcatcatcagagaagcaggcggcatcgtgatagacacttcgggtggacccctcgacctcatggcttgcagagtggttgcggccagcacccgggagatggcgatgctcatagctcaggccttacagacgattaactatgggcgggatgatgagaagtgactgcggctgaggcaa

SEQ ID NO: 9847 - DNA, 787 bp, Homo sapiens
  source 1..787: mol_type = unassigned DNA; mol_type = unassigned DNA
atgaagccgagcggcgaggaccagaaaagcccttactgaggaaaaacgtgtctcaacaaaaacatcagctgcagatcttgtgacagaaacagatcaccttgtggaagatttaattatttctgagttgcgagagaggtttccttcacacaggttcattgcagaagaggccgcggcttctggggccaagtgtgtgctcacccacagcccgacgtggatcatcgaccccatcgacggcacctgcaattttgtgcacagattcccgactgtggcggttagcattggatttgctgttcgacaagagcttgaattcggagtgatttaccactgcacagaggagcggctgtacacgggccggcggggtcggggcgccttctgcaatggccagcggctccgggtctccggggagacagatctctcaaaggccttggttctgacagaaattggccccaaacgtgaccctgcgaccctgaagctgttcctgagtaacatggagcggctgctgcatgccaaggcgcatggggtccgagtgattggaagctccacattggcactctgccacctggcctcaggggccgcggatgcctattaccagtttggcctgcactgctgggatctggcggctgccacagtcatcatcagagaagcaggcggcatcgtgatagacacttcgggtggacccctcgacctcatggcttgcagagtggttgcggccagcacccgggagatggcgatgctcatagctcaggccttacagacgattaactatgggcgggatgatgagaagtga

SEQ ID NO: 9848 - DNA, 391 bp, Homo sapiens
  source 1..391: mol_type = unassigned DNA; mol_type = unassigned DNA
ttgtggaagatttaattatttctgagttgcgagagaggtttccttcacacaggttcattgcagaagaggccgcggcttctggggccaagtgtgtgctcacccacagcccgacgtggatcatcgaccccatcgacggcacctgcaattttgtgcacaggtgagctgagcagggatcgcctccattgcagggcttaacatgtcctcttctgtgaggttttgtcttttcaaaagcagcattttttaaggcaggaatatataaacaaacctatagtacactcatagtctcatcagaaagatgatcagatcttgatatttttaaaataaggttttccgtttgtgagaggctcttggagtatgttaggaaatctgcacttgtttaaaaaccagtttg

SEQ ID NO: 9849 - DNA, 885 bp, Homo sapiens
  source 1..885: mol_type = unassigned DNA; mol_type = unassigned DNA
ccgcggcttctggggccaagtgtgtgctcacccacagcccgacgtggatcatcgaccccatcgacggcacctgcaattttgtgcacagattcccgactgtggcggttagcattggatttgctgttcgacaagagcttgaattcggagtgatttaccactgcacagaggagcggctgtacacgggccggcggggtcggggcgccttctgcaatggccagcggctccgggtctccggggagacagatctctcaaaggccttggttctgacagaaattggccccaaacgtgaccctgcgaccctgaagctgttcctgagtaacatggagcggctgctgcatgccaaggcgcatgggtaggaggttcagttcggggaacaccctgcagcccgaggaggaagaacggaacacggacttgctaaaactcccctgggatttgaggaggaagcctgacgtggaaagagtgggaggggcacatgaacatcagactcagggaagccctgtgaggggcccgcctgcagtagatactcctatagccaggcctctggagatgcgtgggcacctgtgttgcttctgatcagaatccatggaactgacctcatgctgctcaaccagcgaatggtgcaaatacttacagtccttcccgagggggcctggcgtcagacaggtttatcaaagcccagtgaatcctctttgtctcttgccttcccagtagggctgtgctgtgagccctagccatgtgagaccactgacacttaatgtcacgttcagtagaggaggattcaattctctggttgctgcatctcaggtgctcagtagctaggtcagctgggagctgtcatggcacaaggcatttgcgtctggcggaggcctgttggttggtggctcc

SEQ ID NO: 9850 - DNA, 563 bp, Homo sapiens
  source 1..563: mol_type = unassigned DNA; mol_type = unassigned DNA
ccacagcccgacgtggatcatcgaccccatcgacggcacctgcaattttgtgcacagattcccgactgtggcggttagcattggatttgctgttcgacaagagcttgaattcggagtgatttaccactgcacagaggagcggctgtacacgggccggcggggtcggggcgccttctgcaatggccagcggctccgggtctccggggagacagagatggggcttcgccatgctgcccaggctggtcttgaagtcctgacctcaaagcgatcggcgcacctcagccttgcaaagtgctgggattacaggcatgaaccaccacgcccagctcatgaatctctcaaaggccttggttctgacagaaattggccccaaacgtgaccctgcgaccctgaagctgttcctgagtaacatggagcggctgctgcatgccaaggcgcatggggtccgagtgattggaagctccacattggcactctgccacctggcctcaggggccgcggatgcctattaccagtttggcctgcactgctgggatctggcggctgccacagtcatcatcaga

SEQ ID NO: 9851 - DNA, 919 bp, Homo sapiens
  source 1..919: mol_type = unassigned DNA; mol_type = unassigned DNA
tcagtagctaggtcagctgggagctgtcatggcacaaggcatttgcgtctggcggaggcctgttggttggtggctccaggccctatattcagcctccagagctttggcagaagtgctgtgcttcatttttcactagggaaaatgcccagccggggtacctggctgaagtcggcttgcacaccacagaaaaggctccactcccgcctgcatctgtcctcccttccctctccccagggtccgagtgattggaagctccacattggcactctgccacctggcctcaggggccgcggatgcctattaccagtttggcctgcactgctgggatctggcggctgccacagtcatcatcagagaagcaggcggcatcgtgatagacacttcgggtggacccctcgacctcatggcttgcagagtggttgcggccagcacccgggagatggcgatgctcatagctcaggccttacagacgattaactatgggcgggatgatgagaagtgactgcggctgaggcaaagctgctcccaaggcctccctgggctgctgtgggctcctggggaggtggccctcgtggcccacgctccatgccagtggctcacgctctgctcctggctaccccagagggagttgtcacgctacagtgagtggctggccttttaaatcgacgtctctctcaccaggatttggtgtttagctgtttctctctttaatctcacgtagcctttttcaggttagtacgtgttcttctgtcagggccaaaactcaaatctcctgtgaaatacgtattgataatccaatcttgatttttccccccagaatataaatctcaggtaataaggctttagaactgctgataaagcggatcgttctcaggccctccccccggagtacttcagaatgcaataaatcaaaataatg

SEQ ID NO: 9852 - DNA, 500 bp, Homo sapiens
  source 1..500: mol_type = unassigned DNA; mol_type = unassigned DNA
gctgggctgggctcggcacggggcggggcggagggtggggagcggaaagcaggacgcacggctcccgcggcccgctggctgcccttcccgccagcgcaggtgtgggacgggcggcggactaggcacagagctgcgggagcaggcacagggagtgtggagcctggcggcgggacggcgggatccggtgggagccggagtcccgccgaggggggctggaggtggaggggcccggcgaggccgcgatgaagccgagcggcgaggaccaggcggcgctggcggccggcccctgggaggagtgcttccaggcggccgtgcagctggcgctgcgggcaggacagatcatcagaaaagcccttactgaggaaaaacgtgtctcaacaaaaacatcagctgcagatcttgtgacagaaacagatcaccttgtggaagatttaattatttctgagttgcgagagaggtttccttcacacaggtctcctttttctctagtacacatgtga

SEQ ID NO: 9853 - DNA, 3558 bp, Homo sapiens
  source 1..3558: mol_type = unassigned DNA; mol_type = unassigned DNA
agattattccagaaacagacactgctacatgttcttcataaattaacaccctcataaaggtaaaccaagaaggttatcctcaatcatctggtatcaatatataattatttttcacatttctgttactttttaatgagatttgaggttgttctgtgattgttatcagaattaccaatgcacaaaagccagaatgtatttggaaactagaagagctatttttgttttttggatttttctccaagttcaaggaaccaaagatatctccattaacatataccattctgaaactaaagacatagacaatcccccaagaaatgaaacaactgaaagtactgaaaaaatgtacaaaatgtcaactatgagacgaatattcgatttggcaaagcatcgaacaaaaagatccgcatttttcccaacgggggttaaagtctgtccacaggaatccatgaaacagattttagacagtcttcaagcttattatagattgagagtgtgtcaggaagcagtatgggaagcatatcggatctttctggatcgcatccctgacacaggggaatatcaggactgggtcagcatctgccagcaggagaccttctgcctctttgacattggaaaaaacttcagcaattcccaggagcacctggatcttctccagcagagaataaaacagagaagtttccctgacagaaaagatgaaatatctgcagagaagacattgggagagcctggtgaaaccattgtcatttcaacagatgttgccaacgtctcacttgggcctttccctctcactcctgatgacaccctcctcaatgaaattctcgataatacactcaacgacaccaagatgcctacaacagaaagagaaacagaattcgctgtgttggaggagcagagggtggagctcagcgtctctctggtaaaccagaagttcaaggcagagctcgctgactcccagtccccatattaccaggagctagcaggaaagtcccaacttcagatgcaaaagatatttaagaaacttccaggattcaaaaaaatccatgtgttaggatttagaccaaagaaagaaaaagatggctcaagctccacagagatgcaacttacggccatctttaagagacacagtgcagaagcaaaaagccctgcaagtgacctcctgtcttttgattccaacaaaattgaaagtgaggaagtctatcatggaaccatggaggaggacaagcaaccagaaatctatctcacagctacagacctcaaaaggctgatcagcaaagcactagaggaagaacaatctttggatgtggggacaattcagttcactgatgaaattgctggatcactgccagcctttggtcctgacacccaatcagagctgcccacatcttttgctgttataacagaggatgctactttgagtccagaacttcctcctgttgaaccccagcttgagacagtggacggagcagagcatggtctacctgacacttcttggtctccacctgctatggcctctacctccctgtcagaagctccacctttctttatggcatcaagcatcttctctctgactgatcaaggcaccacagatacaatggccactgaccagacaatgctagtaccagggctcaccatccccaccagtgattattctgcaatcagccaactggctctgggaatttcacatccacctgcatcttcagatgacagccgatcaagtgcaggtggcgaagatatggtcagacacctagatgaaatggatctgtctgacactcctgccccatctgaggtaccagagctcagcgaatatgtttctgtcccagatcatttcttggaggataccactcctgtctcagctttacagtatatcaccactagttctatgaccattgcccccaagggccgagagctggtagtgttcttcagtctgcgtgttgctaacatggccttctccaacgacctgttcaacaagagctctctggagtaccgagctctggagcaacaattcacacagctgctggttccatatctacgatccaatcttacaggatttaagcaacttgaaatacttaacttcagaaacgggagtgtgattgtgaatagcaaaatgaagtttgctaagtcagtgccgtataacctcaccaaggctgtgcacggggtcttggaggattttcgttctgctgcagcccaacaactccatctggaaatagacagctactctctcaacattgaaccagctgatcaagcagatccctgcaagttcctggcctgcggcgaatttgcccaatgtgtaaagaacgaacggactgaggaagcggagtgtcgctgcaaaccaggatatgacagccaggggagcctggacggtctggaaccaggcctctgtggccctggcacaaaggaatgcgaggtcctccagggaaagggagctccatgcaggttgccagatcactctgaaaatcaagcatacaaaactagtgttaaaaagttccaaaatcaacaaaataacaaggtaatcagtaaaagaaattctgaattactgaccgtagaatatgaagaatttaaccatcaagattgggaaggaaattaaaaactgaaaatgtacaattatcatttaggctatctcaagagagatgatttgccttctcaaggaaaatggagacaggcatattcatgggtcatcaaaatccagacatacagtcaacactgagaatcagcacacaccatatttcaaatatagaagagtcatgtacttggcaaccagtaaattctgaagaaaaagacacttacttattattaaaaccccaaatgcaatcagcgaaacatatttttactattcttggatgatagtcaaaatgatcataagccaggtttgcttccaccttccctgaaaattttactcacagatcatttgcaacaagcatagcttacttattgtttagggactgaacaatttattgggaagcaaactctttatatgctagaaagtacatttaaaagatgactacttacgcagggagatgcaggtctctctaaacgcatgaatgtatgtagtgtgtaggcactgtagtgagtgtatatatgctccacactacgtctgataaacacaaacctcagtattcagttattaggcacactagttttatacgcaactactgcttacatagtagactgttttgttgccaataatctttgaattgttctttaaaagaaactgaggttcagatacacataccatggaaaaatcttacttttcttgttactacacaaagctattttaaagaagatgctatgttgggagaagggcgaagttgtactatatgacataatcaattcctgtcttccaccacagatgaacaatgtcttcctataataacttcagaatatttcctcacaccaactttagtgtgtgtatacctagactggcatcaatgtaatccaattcagtccattttttatgtgctgcttaatgaaaatgaatctgtctctatctctttcaaatgttctaatatcagatatatttgctacaaaccttaatttcaataaagtaaaagtgatatactc

SEQ ID NO: 9854 - DNA, 835 bp, Homo sapiens
  source 1..835: mol_type = unassigned DNA; mol_type = unassigned DNA
gagagacccaacgggacctcagcccagccagcccaggtgaagcctgaattttataggcaagctgagctgaaaccttgcccttggacaggatccaatcaaaggagatgtatcactttctgtccaacacctgatcaagcagatccctgcaagttcctggcctgcggcgaatttgcccaatgtgtaaagaacgaacggactgaggaagcggagtgtcgctgcaaaccaggatatgacagccaggggagcctggacggtctggaaccaggcctctgtggccctggcacaaaggaatgcgaggtcctccagggaaagggagctccatgcaggttgccagatcactctgaaaatcaagcatacaaaactagtgttaaaaagttccaaaatcaacaaaataacaaggtaatcagtaaaagaaattctgaattactgaccgtagaatatgaagaatttaaccatcaagattgggaaggaaattaaaaactgaaaatgtacaattatcatttaggctatctcaagagagatgatttgccttctcaaggaaaatggagacaggcatattcatgggtcatcaaaatccagacatacagtcaacactgagaatcagcacacaccatatttcaaatatagaagagtcatgtacttggcaaccagtaaattctgaagaaaaagacacttacttattattaaaaccccaaatgcaatcagcgaaacatatttttactattcttggatgatagtcaaaatgatcataagccaggtttgcttccaccttccctgaaaattttactcacagatcatttgcaacaagcatagcttacttattgtttagggactg

SEQ ID NO: 9855 - DNA, 3324 bp, Homo sapiens
  source 1..3324: mol_type = unassigned DNA; mol_type = unassigned DNA
agattattccagaaacagacactgctacatgttcttcataaattaacaccctcataaaggtaaaccaagaaggttatcctcaatcatctggtatcaatatataattatttttcacatttctgttactttttaatgagatttgaggttgttctgtgattgttatcagaattaccaatgcacaaaagccagaatgtatttggaaactagaagagctatttttgttttttggatttttctccaagttcaaggaaccaaagtgtgtcaggaagcagtatgggaagcatatcggatctttctggatcgcatccctgacacaggggaatatcaggactgggtcagcatctgccagcaggagaccttctgcctctttgacattggaaaaaacttcagcaattcccaggagcacctggatcttctccagcagagaataaaacagagaagtttccctgacagaaaagatgaaatatctgcagagaagacattgggagagcctggtgaaaccattgtcatttcaacagatgttgccaacgtctcacttgggcctttccctctcactcctgatgacaccctcctcaatgaaattctcgataatacactcaacgacaccaagatgcctacaacagaaagagaaacagaattcgctgtgttggaggagcagagggtggagctcagcgtctctctggtaaaccagaagttcaaggcagagctcgctgactcccagtccccatattaccaggagctagcaggaaagtcccaacttcagatgcaaaagatatttaagaaacttccaggattcaaaaaaatccatgtgttaggatttagaccaaagaaagaaaaagatggctcaagctccacagagatgcaacttacggccatctttaagagacacagtgcagaagcaaaaagccctgcaagtgacctcctgtcttttgattccaacaaaattgaaagtgaggaagtctatcatggaaccatggaggaggacaagcaaccagaaatctatctcacagctacagacctcaaaaggctgatcagcaaagcactagaggaagaacaatctttggatgtggggacaattcagttcactgatgaaattgctggatcactgccagcctttggtcctgacacccaatcagagctgcccacatcttttgctgttataacagaggatgctactttgagtccagaacttcctcctgttgaaccccagcttgagacagtggacggagcagagcatggtctacctgacacttcttggtctccacctgctatggcctctacctccctgtcagaagctccacctttctttatggcatcaagcatcttctctctgactgatcaaggcaccacagatacaatggccactgaccagacaatgctagtaccagggctcaccatccccaccagtgattattctgcaatcagccaactggctctgggaatttcacatccacctgcatcttcagatgacagccgatcaagtgcaggtggcgaagatatggtcagacacctagatgaaatggatctgtctgacactcctgccccatctgaggtaccagagctcagcgaatatgtttctgtcccagatcatttcttggaggataccactcctgtctcagctttacagtatatcaccactagttctatgaccattgcccccaagggccgagagctggtagtgttcttcagtctgcgtgttgctaacatggccttctccaacgacctgttcaacaagagctctctggagtaccgagctctggagcaacaattcacacagctgctggttccatatctacgatccaatcttacaggatttaagcaacttgaaatacttaacttcagaaacgggagtgtgattgtgaatagcaaaatgaagtttgctaagtcagtgccgtataacctcaccaaggctgtgcacggggtcttggaggattttcgttctgctgcagcccaacaactccatctggaaatagacagctactctctcaacattgaaccagctgatcaagcagatccctgcaagttcctggcctgcggcgaatttgcccaatgtgtaaagaacgaacggactgaggaagcggagtgtcgctgcaaaccaggatatgacagccaggggagcctggacggtctggaaccaggcctctgtggccctggcacaaaggaatgcgaggtcctccagggaaagggagctccatgcaggttgccagatcactctgaaaatcaagcatacaaaactagtgttaaaaagttccaaaatcaacaaaataacaaggtaatcagtaaaagaaattctgaattactgaccgtagaatatgaagaatttaaccatcaagattgggaaggaaattaaaaactgaaaatgtacaattatcatttaggctatctcaagagagatgatttgccttctcaaggaaaatggagacaggcatattcatgggtcatcaaaatccagacatacagtcaacactgagaatcagcacacaccatatttcaaatatagaagagtcatgtacttggcaaccagtaaattctgaagaaaaagacacttacttattattaaaaccccaaatgcaatcagcgaaacatatttttactattcttggatgatagtcaaaatgatcataagccaggtttgcttccaccttccctgaaaattttactcacagatcatttgcaacaagcatagcttacttattgtttagggactgaacaatttattgggaagcaaactctttatatgctagaaagtacatttaaaagatgactacttacgcagggagatgcaggtctctctaaacgcatgaatgtatgtagtgtgtaggcactgtagtgagtgtatatatgctccacactacgtctgataaacacaaacctcagtattcagttattaggcacactagttttatacgcaactactgcttacatagtagactgttttgttgccaataatctttgaattgttctttaaaagaaactgaggttcagatacacataccatggaaaaatcttacttttcttgttactacacaaagctattttaaagaagatgctatgttgggagaagggcgaagttgtactatatgacataatcaattcctgtcttccaccacagatgaacaatgtcttcctataataacttcagaatatttcctcacaccaactttagtgtgtgtatacctagactggcatcaatgtaatccaattcagtccattttttatgtgctgcttaatgaaaatgaatctgtctctatctctttcaaatgttctaatatcagatatatttgctacaaaccttaatttcaataaagtaaaagtgatatactc

SEQ ID NO: 9856 - DNA, 868 bp, Homo sapiens
  source 1..868: mol_type = unassigned DNA; mol_type = unassigned DNA
agattattccagaaacagacactgctacatgttcttcataaattaacaccctcataaaggtaaaccaagaaggttatcctcaatcatctggtatcaatatataattatttttcacatttctgttactttttaatgagatttgaggttgttctgtgattgttatcagaattaccaatgcacaaaagccagaatgtatttggaaactagaagagctatttttgttttttggatttttctccaagttcaaggaaccaaagatatctccattaacatataccattctgaaactaaagacatagacaatcccccaagaaatgaaacaactgaaagtactgaaaaaatgtacaaaatgtcaactatgagacgaatattcgatttggcaaagcatcgaacaaaaagatccgcatttttcccaacgggggttaaagtctgtccacaggaatccatgaaacagattttagacagtcttcaagcttattatagattgagagtgtgtcaggaagcagtatgggaagcatatcggatctttctggatcgcatccctgacacaggggaatatcaggactgggtcagcatctgccagcaggagaccttctgcctctttgacattggaaaaaacttcagcaattcccaggagcacctggatcttctccagcagagaataaaacagagaagtttccctgacagaaaagatgaaatatctgcagagaagacattgggagagcctggtgaaaccattgtcatttcaacagaaaagaataaaggtaaaaccaaaccattcaatatcttacagtttggaaacaaccatcatgaacatttactgcctattttctgccttctttcttctattatatacacatattactga

SEQ ID NO: 9857 - DNA, 570 bp, Homo sapiens
  source 1..570: mol_type = unassigned DNA; mol_type = unassigned DNA
ggagtgggagtgggccggggccagggccggggagaggggccatccccgcgcgacccgcagcgccgcacagcgagggggagggcgcctgcggggaggacagggtcgggggagcgcccttccgcaggctcctttcattcttccacttaggggtctccaggaatgaaaactggccccagccaggccagagcgcgcgaatgaaaggcggcactgggaccaagagagaagcttcgtcccgcctgggctgcggaaactggcggcgccaggggtgtcccaccgcgcgggcgtccgaaagcggggcaaaggggacagcctcgcccctcgagcggctgctcccgcagctcgctcacccctgcggctggggaagctccaggctacctacacaacctggcccaggctggtcacggtgtcccccctccctgctctgtgccctctccttccagaaatccaccatggagagtaaggatgaggtcagcgacaccgacagtggcatcatcctgcagtctggccccgacagcccggtctccccaatgaaggagctgacccatgcagtgcacaagcagcagagggccc

SEQ ID NO: 9858 - DNA, 708 bp, Homo sapiens
  source 1..708: mol_type = unassigned DNA; mol_type = unassigned DNA
ccggggagaggggccatccccgcgcgacccgcagcgccgcacagcgagggggagggcgcctgcggggaggacagggtcgggggagcgcccttccgcaggctcctttcattcttccacttaggggtctccaggaatgaaaactggccccagccaggccagagcgcgcgaatgaaaggcggcactgggaccaagagagaagcttcgtcccgcctgggctgcggaaactggcggcgccaggggtgtcccaccgcgcgggcgtccgaaagcggggcaaaggggacagcctcgcccctcgagcggctgctcccgcagctcgctcacccctgcggaaatccaccatggagagtaaggatgaggtcagcgacaccgacagtggcatcatcctgcagtctggccccgacagcccggtctccccaatgaaggagctgacccatgcagtgcacaagcagcagagggccctggaagcgaggctggaggcctgcctggaggagctgaggagactctgccttcgggaagcggagctgacgggcaccttgccagcggagtatcccctcaaaccaggggaaaaggcccccaaggttcgccgcaggatcggagcggcttacaaactggatgactgggccttgcacagagaggaccccctaagcagcctggagcgccagctggccctgcagctgcagatcacagaggcagcccgtcggctgtgcc

SEQ ID NO: 9859 - DNA, 4298 bp, Homo sapiens
  source 1..4298: mol_type = unassigned DNA; mol_type = unassigned DNA
ggggcaaaggggacagcctcgcccctcgagcggctgctcccgcagctcgctcacccctgcgggtacgtcgtcactcccgcgtgcggccccgtcccgactcttggatcggactcttcagtcccttcttgcgtcttcccctctttcctctgggccttggtatgccccaggggacagatgtcttgggatctttaacatttgggatgctgcaaatgccgaagttaaatgaaatacctccggggagggcaggccgcagggaggctcggggggagggaagatggcctggacaaacaggtcctgaagctgcgaggctggagtggagggcgcaggggcaggcgggcggcgccagagctccatgggacagctggggaagctccaggctacctacacaacctggcccaggctggtcacggtgtcccccctccctgctctgtgccctctccttccagaaatccaccatggagagtaaggatgaggtcagcgacaccgacagtggcatcatcctgcagtctggccccgacagcccggtctccccaatgaaggagctgacccatgcagtgcacaagcagcagagggccctggaagcgaggctggaggcctgcctggaggagctgaggagactctgccttcgggaagcggagctgacgggcaccttgccagcggagtatcccctcaaaccaggggaaaaggcccccaaggttcgccgcaggatcggagcggcttacaaactggatgactgggccttgcacagagaggaccccctaagcagcctggagcgccagctggccctgcagctgcagatcacagaggcagcccgtcggctgtgcctggaggagaacctcagcaggcaggctcggcggcagcggaagcactccatgctgcaggaggagaagaagctgcaggagctccagcgctgcctggtcgagcggcggcgcaatagcgagccacctccggctgctgctctccccctgggccgagagctcagtgcctctgatgacagctccctgtcagatgggctcctcctggaggaagaggaatcccaagtgccaaaacctcctccagagtctccagccccaccttctcggcctctcccaccccaaacccttgagggtctgcagccaacaggacctgaggctgggagcccagaacgggctccagtccagaacagcccctggaaggaaaccagcctggaccacccctatgagaagcccaggaagtcttctgagccctggagcgagtccagcagcccagccaccacaccacaggatgggcccagtgcctccagcctgtggcttctggagcctgcctcctaccacgtggttcccatccgtggtgttcctggccagtggcagggccgcaccagtgccccagccacccctgagatacaggggaggaggggccagtcgcagtctctgagggtggattccttccgggcgggtcctgagggccgaggtcgcagcgcctttccccgccgccgccccactcactacacggtgacagtgccagattcctgctttcccgcgaccaagcccccgctgccccacgccgcctgccactcctgctcagaagacagtggctctgacgtctccagcatctcccaccccacttcgccgggcagcagcagccccgacatctcctttctgcagcctctctcccctcccaagacccatcgtcaccgcggggcctgggtcccagccggcagcagagagctggtcgcccaccaccccaagctactgctgccgcctggctatttcccggcggggcggtacgtggtggtggctgagagccccctgccgcctggcgagtgggagctgcgccgcgcagccccgggccctgcttacgaggaggagggcactcccctgcgctaccagcgtctggtgccctcccgcagccgcatcgtgcggacgccctccctgaaggacagcccggcaggccgggggctcagcaaggccgccgtgtccgaggagctcaagtggtggcacgagcgtgcacgcctccggagcacccgcccccactcactggaccgccaaggagctttccgggtcaggagcctgccccttgggagagagggcttcggacgagccctgggaccccgggcacaggtgcccacagtttgtgtgctgcggagatcgcctgatggggcccctgtgcaagtctttgtacctgaaaaaggagagatcatcagccaggtgtaactctgcgccccacgctggaaaaaactgtttcatagaggggctgggctgagacccccccacccctgagtgcctctttcagctcccccatccccatcgcaggccgatgacctggagctgagaccttttattattttttttttacacgacttttttcagaagccctgacctaaggatttatatatgtggattgtcctcaatacccctgtgatatgattatgttttatcccccagagtttggcctactggacttaaggccttgcctgtctgactgacagcctctatctccttatataagacaagtggcaggggacgagtgaagcagagtgagccaccttgggagttctccaacgctctgtgctctggttctaagaaattccctggggaactgcccctggccctcctgtcccactattgctggaggctggacatggtacatactcatgcacatgactctcccccatttcccaggtctctgggtaccccagcctgggctgggggagaatctcttcccccttttctaatgtgctctgtgatgcacacaccaagtggtaggtcaaaggtcagtatatcccggtggtgtattgtcttgctagaccctgctattttcctgaccccctaaatcctctttagggacccagtcactataccctgtctatgccctgtgggctcccagacccctgagctttgagtcagtggcatcacagtttgtagcctcagggggtctggctgggggctggtccatgcttgtggttagtggacagcagccaccctttgacagctacctctgggcatctcaagggcttgcagccccactgctccttctaacattttgtttgtttttgagatggagtctcgctctgtcgcccaggctggaatgctgtagcaagatttcggctcactgcaacccccgtctcccgggttcaagcgaatctcctgcctcagccttccgagtagctgggattacaggcaagcaccaccatgcctgctaattttttatttttagtagagatggggtttcatcatgttggccaggctggtctcgaactcctgacctcaagtgatccacctgccttggcctttcaaagtgctgggattacaggcatgagccaccgcacctggcccttctaacgttttttcatcatagtcccaaaaaccaatactttacaagtggttttggaaaggcaccacttttgtggcatgttctggttgggagagggagtcacagttcctactccccccaccagctatgcttctgctctgagaaggtggttatttatacaaacatggacatactcactcccaagggctgatgagatgctgaattttctttgggggcattcattaattgtcccagctgcagcgactggagcaagtctggaagctgcctgtgctaagaccacccagctgtccctgggttctcatcctagggccttctttgcttccaggtcaggggacctgcttcaatgagaaagcaactgaattgaggctaggagaggtagggagagctgagttctgacttcacctgtgcagaactctctgcccccatgttacctggactggaacagactgtgaatatagcagaaggttccaagaactctggtgtctgacctagaagaggcacagttctctctactggaaagaaaacgatgtagccgattgcacaagggtgccaagggaagacccaggatggcccatcaaaggaacctgggggaggatgcaggaggctgaagggatgcacctggcatttctctcactgtgctcttaccgcatcagcaacccccaacttttgggcctactctgccccccatgcgtgaataccctgcttggatgctgtgcttttccggtttgtctctaagcccctttctccagggcatgttggtttccctggcctctcagtgtcctaactggagcccagagtgccttgttctgagccaggagacggctgagcactggccctccacacctaagcgtcctttacattaacttattggtcttgtataacacctggtgccattgccaagtggctgtgtcctcagctacagagctggaattgtgtggggtttagtgctaaatacttcaataaagtctgttttttgtgattggctg

SEQ ID NO: 9860 - DNA, 2197 bp, Homo sapiens
  source 1..2197: mol_type = unassigned DNA; mol_type = unassigned DNA
attagttcagggaaggacttgctcacctgctcctcccctctgactcaagtcataacaagtaacctggttcccctggcccggcagcctgggagggacggcaaggtaggcaggtgagccgagacggacggacggccagcagctccgtcagctggagagagagcacaggcctgtggcttgggagaccctgaggcgacatgtgagggccctgagccccctgactggaagcaggggctgtttttcaactcctggactaaagcccagaagcagctggggaagctccaggctacctacacaacctggcccaggctggtcacggtgtcccccctccctgctctgtgccctctccttccagaaatccaccatggagagtaaggatgaggtcagcgacaccgacagtggcatcatcctgcagtctggccccgacagcccggtctccccaatgaaggagctgacccatgcagtgcacaagcagcagagggccctggaagcgaggctggaggcctgcctggaggagctgaggagactctgccttcgggaagcggagctgacgggcaccttgccagcggagtatcccctcaaaccaggggaaaaggcccccaaggttcgccgcaggatcggagcggcttacaaactggatgactgggccttgcacagagaggaccccctaagcagcctggagcgccagctggccctgcagctgcagatcacagaggcagcccgtcggctgtgcctggaggagaacctcagcaggcaggctcggcggcagcggaagcactccatgctgcaggaggagaagaagctgcaggagctccagcgctgcctggtcgagcggcggcgcaatagcgagccacctccggctgctgctctccccctgggccgagagctcagtgcctctgatgacagctccctgtcagatgggctcctcctggaggaagaggaatcccaagtgccaaaacctcctccagagtctccagccccaccttctcggcctctcccaccccaaacccttgagggtctgcagccaacaggacctgaggctgggagcccagaacgggctccagtccagaacagcccctggaaggaaaccagcctggaccacccctatgagaagcccaggaagtcttctgagccctggagcgagtccagcagcccagccaccacaccacaggatgggcccagtgcctccagcctgtggcttctggagcctgcctcctaccacgtggttcccatccgtggtgttcctggccagtggcagggccgcaccagtgccccagccacccctgagatacaggggaggaggggccagtcgcagtctctgagggtggattccttccgggcgggtcctgagggccgaggtcgcagcgcctttccccgccgccgccccactcactacacggtgacagtgccagattcctgctttcccgcgaccaagcccccgctgccccacgccgcctgccactcctgctcagaagacagtggctctgacgtctccagcatctcccaccccacttcgccgggcagcagcagccccgacatctcctttctgcagcctctctcccctcccaagacccatcgtcaccgcggggcctgggtcccagccggcagcagagagctggtcgcccaccaccccaagctactgctgccgcctggctatttcccggcggggcggtacgtggtggtggctgagagccccctgccgcctggcgagtgggagctgcgccgcgcagccccgggccctgcttacgaggaggagggcactcccctgcgctaccagcgtctggtgccctcccgcagccgcatcgtgcggacgccctccctgaaggacagcccggcaggccgggggctcagcaaggccgccgtgtccgaggagctcaagtggtggcacgagcgtgcacgcctccggagcacccgcccccactcactggaccgccaaggagctttccgggtcaggagcctgccccttgggagagagggcttcggacgagccctgggaccccgggcacaggtgcccacagtttgtgtgctgcggagatcgcctgatggggcccctgtgcaagtctttgtacctgaaaaaggagagatcatcagccaggtgtaactctgcgccccacgctggaaaaaactgtttcatagaggggctgggctgagacccccccacccctgagtgcctctttcagctcccccatccccatcgcag

SEQ ID NO: 9861 - DNA, 554 bp, Homo sapiens
  source 1..554: mol_type = unassigned DNA; mol_type = unassigned DNA
agtacaggtgaagacagagctgtggagaggagacaactggtgtagttgctgactttcccacatcaggaatcaagatcccactggccaacttcaggccctgggatctaaagtcctgttgtgagagcacagaagggatcagttctagacaattccatccaggtcactttaggcttattctcaagatctgaaggcctggccgggtgtggtggctcacgcctgtgatcccagcactttgggaagccgaggtgggtggatcacctgaggtcaggagttcaagaccagcctggccaacctggcaaaaccccgtctctactaaaaatacaaaaattagccaggcatagtggtgtgtgcctgtaatcccagctactcgggaggctgaggcaggagaatcgcttgaacctgggaggtggaggttgcagtgagtcgagatcacaccactgctctccagcctggagctcagtgcctctgatgacagctccctgtcagatgggctcctcctggaggaagggaaaggaaaggtgaactccaagagagctgatcaaccccagatgtcc

SEQ ID NO: 9862 - DNA, 586 bp, Homo sapiens
  source 1..586: mol_type = unassigned DNA; mol_type = unassigned DNA
aatctgggaggcttcttgaaggaggaaggcataaaatagggctgtgtgggaagaaaggaatcccaagtgccaaaacctcctccagagtctccagccccaccttctcggcctctcccaccccaaacccttgagggtctgcagccaacaggacctgaggctgggagcccagaacgggctccagtccagaacagcccctggaaggaaaccagcctggaccacccctatgagaagcccaggaagtcttctgagccctggagcgagtccagcagcccagccaccacaccacaggatgggcccagtgcctccagcctgtggcttctggagcctgcctcctaccacgtggttcccatccgtggtgttcctggccagtggcagggccgcaccagtgccccagccacccctgagatacaggggaggaggggccagtcgcagtctctgagggtggattccttccgggcgggtcctgagggccgaggtcgcagcgcctttccccgccgccgccccactcactacacggtgacagtgccagattcctgctttcccgcgaccaagcccccgctgccccacgccgcctgccactcctgct

SEQ ID NO: 9863 - DNA, 1241 bp, Homo sapiens
  source 1..1241: mol_type = unassigned DNA; mol_type = unassigned DNA
gcccggcaggccgggggctcagcaaggccgccgtgtccgaggagctcaagtggtggcacgagcgtgcacgcctccggagcacccgcccccactcactggaccgccaaggagctttccgggtcaggagcctgccccttgggagagagggcttcggacgagccctgggaccccgggcacaggtgcccacagtttgtgtgctgcggagatcgcctgatggggcccctgtgcaagtctttgtacctgaaaaaggagagatcatcagccagagtttggcctactggacttaaggccttgcctgtctgactgacagcctctatctccttatataagacaagtggcaggggacgagtgaagcagagtgagccaccttgggagttctccaacgctctgtgctctggttctaagaaattccctggggaactgcccctggccctcctgtcccactattgctggaggctggacatgatggagtctcgctctgtcgcccaggctggaatgctgtagcaagatttcggctcactgcaacccccgtctcccgggttcaagcgaatctcctgcctcagccttccgagtagctgggattacaggtcaggggacctgcttcaatgagaaagcaactgaattgaggctaggagaggtagggagagctgagttctgacttcacctgtgcagaactctctgcccccatgttacctggactggaacagactgtgaatatagcagaaggttccaagaactctggtgtctgacctagaagaggcacagttctctctactggaaagaaaacgatgtagccgattgcacaagggtgccaagggaagacccaggatggcccatcaaaggaacctgggggaggatgcaggaggctgaagggatgcacctggcatttctctcactgtgctcttaccgcatcagcaacccccaacttttgggcctactctgccccccatgcgtgaataccctgcttggatgctgtgcttttccggtttgtctctaagcccctttctccagggcatgttggtttccctggcctctcagtgtcctaactggagcccagagtgccttgttctgagccaggagacggctgagcactggccctccacacctaagcgtcctttacattaacttattggtcttgtataacacctggtgccattgccaagtggctgtgtcctcagctacagagctggaattgtgtggggtttagtgctaaatacttcaataaagtctgttttttgtga

SEQ ID NO: 9864 - DNA, 570 bp, Homo sapiens; identical to SEQ ID NO: 9857
  source 1..570: mol_type = unassigned DNA; mol_type = unassigned DNA

SEQ ID NO: 9865 - DNA, 708 bp, Homo sapiens; identical to SEQ ID NO: 9858
  source 1..708: mol_type = unassigned DNA; mol_type = unassigned DNA

SEQ ID NO: 9866 - DNA, 4298 bp, Homo sapiens; identical to SEQ ID NO: 9859
  source 1..4298: mol_type = unassigned DNA; mol_type = unassigned DNA

SEQ ID NO: 9867 - DNA, 2197 bp, Homo sapiens; identical to SEQ ID NO: 9860
  source 1..2197: mol_type = unassigned DNA; mol_type = unassigned DNA

SEQ ID NO: 9868 - DNA, 554 bp, Homo sapiens; identical to SEQ ID NO: 9861
  source 1..554: mol_type = unassigned DNA; mol_type = unassigned DNA

SEQ ID NO: 9869 - DNA, 586 bp, Homo sapiens; identical to SEQ ID NO: 9862
  source 1..586: mol_type = unassigned DNA; mol_type = unassigned DNA

SEQ ID NO: 9870 - DNA, 1241 bp, Homo sapiens; identical to SEQ ID NO: 9863
  source 1..1241: mol_type = unassigned DNA; mol_type = unassigned DNA

SEQ ID NO: 9871 - DNA, 7578 bp, Homo sapiens
  source 1..7578: mol_type = unassigned DNA; mol_type = unassigned DNA
cgccccgcgcccgccaggagccaccgtccgagccttgcggagcgcggcagtgggcgccggctgcccgcagcccctgacccggccccggacggagcgccggccgcaccaccgccctctggccgttgcctcaccggctcggcaagatgtcggtgaaggagggcgcacagcgcaagtgggcagcgctgaaggagaagctggggccacaggattcggaccccacggaggccaacctggagagcgcggaccccgagctgtgcatccggctgctccagatgccctctgtggtcaactactccggcctgcgcaagcgcctggagggcagcgacggcggctggatggtgcagttcctggagcagagcggcctggacctgctgctggaggcgctggcgcggctgtcgggccgcggcgttgcacgtatctccgacgccctgctgcagctcacctgcgtcagctgcgtgcgcgccgtcatgaactcgcggcagggcatcgagtacatcctcagcaaccagggctacgtgcgccagctctcccaggccctggacacatccaacgtgatggtgaagaagcaggtgtttgagctactggctgccctgtgcatctactctcccgagggccacgtgctgaccctggacgccctggaccactacaagacggtgtgcagccagcagtaccgcttcagcattgtcatgaacgagctctccggcagcgacaacgtgccctacgtggtcaccctgcttagcgtgatcaacgccgtcatcttgggccccgaggacctgcgcgcgcgcacccagctgcggaacgagtttatcgggctgcagctgctggacgtcctggctcgcctgcgagacctggaggatgccgacctgctgatccagctggaggctttcgaggaggctaaggccgaggacgaggaggagctgctgcgagtctctggcggggtcgacatgagcagccaccaggaggtctttgcctccctgttccacaaggtgagctgctccccggtgtctgcccagctcctgtcggtgctgcagggcctcctgcacctggagcccaccctccgctccagccagctgctctgggaggccctggagagcctcgtgaaccgggccgtgctcctggccagcgatgcccaggaatgcaccctggaggaagtggttgagcggctcctgtctgtcaaggggcgacccagaccgagccccctggtcaaggcccataaaagcgtccaggccaacctagaccagagccagaggggcagctccccgcaaaacactacaacccccaagcccagcgtggagggccagcagccagcagcagctgctgcctgcgagcccgtggaccacgcccagagtgagagcatcctgaaagtttcgcagcccagagccctggagcagcaggcgtccaccccacccccacccccacccccacccctgctccctggttccagtgccgagccccctccccctcccccaccaccccccctgcccagtgtgggggctaaggccctcccaacagcacccccgcccccacccctgccaggcctgggggccatggcccccccagcacctcctctaccaccacccctgccaggctcctgtgagttcctgcccccaccacctccaccactcccgggcttgggatgcccgcccccacccccacccctgctgcctggtatgggctggggccctcctccacccccacctccactactgccctgcacctgcagcccccccgtggcgggaggcatggaggaggtcatcgtggcccaggtggaccatggcttgggctcagcatgggtccccagccatcggcgggtgaacccacccacactgcgcatgaagaagctgaactggcagaagctgccatccaacgtggcacgtgagcacaactctatgtgggcgtccctgagcagccccgacgccgaggctgtggagcccgacttctccagcatcgagcgactattctccttccctgcagccaagcccaaggagcccaccatggtggccccccgggccaggaaggagcccaaggagatcactttcctcgatgccaagaagagcctgaacctcaacatcttcctgaagcaatttaagtgctccaacgaggaggtcgctgctatgatccgggctggagataccaccaagtttgatgtggaggttctcaaacaactccttaagctccttcccgagaagcacgagattgaaaacctgcgggcattcacagaggagcgagccaagctggccagcgccgaccacttctacctcctcctgctggccattccctgctaccagctgcgaatcgagtgcatgctgctgtgtgagggcgcggccgccgtgctggacatggtgcggcccaaggcccagctggtgctggctgcctgcgaaagcctgctcaccagccgccagctgcccatcttctgccagctgatcctgagaattgggaacttcctcaactacggcagccacaccggtgacgccgacggcttcaagatcagcacattgctgaagctcacggagaccaagtcccagcagaaccgcgtgacgctgctgcaccacgtgctggaggaagcggaaaagagccaccccgacctcctgcagctgccccgggacctggaacagccctcgcaagcagcagggatcaacctggagatcatccgctcagaggccagctccaacctgaagaagcttctggagaccgagcggaaggtgtctgcctccgtggccgaggtccaggagcagtacaccgagcgcctccaggccagcatctcggccttccgggcactggatgagctgtttgaggccatcgagcagaagcaacgggagctggccgactacctgtgtgaggacgcccagcagctgtccctggaggacacgttcagcaccatgaaggctttccgggaccttttcctccgcgccctgaaggagaacaaggaccggaaggagcaggcggcgaaggcagagaggaggaagcagcagctggcggaggaggaggcgcggcggcctcggggagaggacgggaagcctgtcaggaaggggcccgggaagcaggaggaggtgtgtgtcatcgatgccctgctggctgacatcaggaagggcttccagctgcggaagacagcccggggccgcggggacaccgacgggggcagcaaggcagcctccatggatcccccaagagccacagagcctgtggccaccagtaaccctgcaggagatcccgtgggcagcacgcgctgtcccgcctctgagcccggccttgatgctacaacagccagcgagtcccggggctgggaccttgtagacgccgtgacccccggccctcagcccaccctggagcagttggaggagggtggtccacggcccctggagaggcgttcttcctggtatgtggatgccagcgatgtcctaaccactgaggatccccagtgcccccagcccttggagggggcctggccggtgactctgggagatgctcaggccctgaagcccctcaagttctccagcaaccagccccctgcagccggaagttcaaggcaagatgccaaggatcccacgtccttgctgggcgtcctccaggccgaggccgacagcacaagtgaggggctggaggacgctgtccacagccgtggtgccagaccccctgcagcaggcccaggtggggatgaggacgaggacgaggaggacacggccccagagtccgcactggacacatccctggacaagtccttctccgaggatgcggtgaccgactcctcggggtcgggcacactccccagggcccggggccgggcctcaaaggggaccgggaagcgaaggaagaagcgtccctccaggagccaggaaggcctcaggcccaggcccaaggccaagtgagagagcccaggccacaggacatgctgccattctgccaagagaggctcttctgggggccaggctgggactgggccccggaaaccaaaactccgtgccttacccagccggggccctcctggagccttcttggggtgttgtggctgggaacccgacaggcaccagtgccctgccaggcctggtgccctcctggaccgcctgcacgtgccagcctcccacctgcttcctaaaggcaaccctggcccacacccgcatgcgcccggtgcagcctgccaagggccagtcggggggtgctgcgtcctgccagtgtccaccacagctctgcctgcccttcagcccagcaaggtttaatcaaaatgcaatgctttgcaagtctttactgcttggaggtggctgagttgggggccctgggcaggggtaagctggcaggcagtgccatggcaggccagggtcccctcccatggggtctggcccccgttccagcatgtccagcccctgaagttggagtggggggcggtctgcctttgctgccactgccaggcctctgccctgcagctgaaacttggccatcacatcaacagaaaacccctcccagtgccagctgcccagcgtgggcaggccctggggacaatacaggtccacctgaggggctgcagggtgacacccagcagccgctgccccctcactgcccacccagcgagggcagcctacccgagcctgccccctgccaggtgtgtgccctgaggctggcggctggatgcgtggccaataaaaagcagacctagcccggtgtgcgactgtcgtgttcagaggctgcgggagtgggcggtggacgtgggctcccacaaacatggtgagcgctggacaggccccgtgtgaacactcactgttgaggggcccccaggccccgtgtgaacactcactgttgaggggtccctgggcccccaggcaccgtgtgagcattcactgttgagggtcccccagtcccccaggccaggggctgtccctggagccctcaggaggcagtaagaaacatctagaagagggcagacccagtggtgaaccgcatccaacagtggtgagatgggtgcagctctacaggggcgtaatttacaaaccaccagactccctggttatgtgtgtgctgcggtggtgtttgctctccagcagatcaagtttgtgcaatgatccattttgagaatctctccgtcaccccaagaagtcctctcgcacccatcagtccgaccccttccccgtgctcctccccagccctggcagccactcacctgcactccagacgctccagatgtcatgcatgtctcctggcttccttcggctgttttcacgcgccatcctcacggcaggctgtatcaggacttcattccatttcatggctgaagcacattccattgcatgcagggaccacattttgtttgtctgctcttctgtccatggacatctgggttgcttccagtttggggcttctgtgaatcctgctgctgtggacatttgcgtagtcctcgtgtggatgctgctgtggacgtctgcgtcgtcctcgtgtggatgctgctgtggacgtctgcgtcgtcctcgtgtggatgctgctgtggacgtctgcgtagtctcgtgtggatgctgctgtggacgtctgcgtcgtcctcgtgtggatgctgctgtggacatctgcgtagtctcgtgtggatgctgctgtgaacgtctgcgtagtctcgtgtggatgctgctgtggacgtctgcgtagtctcgtgtggatgctgctgtgcacgtctgcgtcgtcctcgtgtggatgctgctgtggacgtctgcgtcgtcctcgtgtggatgctgctgtggacgtctgcgtcgtcctcgtgtggatgctgctgtggacgtctgcgtcgtctcgtgtggatgctgctgtggacgtctgcgtcgtctcgtgtggatgctgctgtggacgtctgcgtcgtctcgtgtggatgctgctgtggacgtctgcgtcgtcctcgtgtggatgctgctgtggacgtctgcgtcgtctcgtgtggatgctgctgtggacgtctgcgtcgtcctcgtgtggatgctgctgtggacgtctgcgtcgtcctcgtgtggatgctgctgtggacgtctgcgtcgtcctcgtgtggatgctgctgtggacgtctgcgtcgtcctcctgtggatgctgctgtggacgtctgcgtcgtcctcgtgtggatgctgctgtggacgtctgcgtagtctcgtgtggatgctgctgtggacgtctgcgtagtctcgtgtggatgctgctgtggacgtctgcgtcgtcctcgatgctgctgtggacgtctgcgtcgtcctcgtgtggatgctgctatggacgtctgcgtagtctcgtgtggatgctgctgtggacgtctgcgtcgtcctcgtgtggatgctgctgtggacgtctgcgtagtctcgtgtggatgctgctgtggacgtctgcgtagtctcgtgtggatgctgctgtggacgtctgcgtcgtcctcgtgtggatgctgctgtggacgtctgcgtagtctcgtgtggatgctgctgtggacgtctgcgtcgtcctcgtgtggatgctgctgtggacgtctgtgtagtctcatgtggatgctgcgagttttcgttgctctggggtagattcgtagcggaggaacaactgggcgacacgctaagtttatgtttaactttttaagtaactgcctaactgttttccaaagcagctgcaccatttttcattcccatccatgctattgtttttcagttaaatagctccactcctccccctccccaccctccacagaactgccagtaaaactggactatggagtattgggtggggtcacctacaaggtcatctgcagcaagtgagaccatcgcccctcctgcctggagaggtgggactggggaccctgtgacaggaggagctgcccttcctggagcctggtttttctttttcctctgtgctccatgagaagtcagtttagtgggctacagccagcaaaggaaccaaaaccaacaggagctctgggggtgccttgcatggcgaggctccgtggctgcacgcgtgtatgcaggtggctgtgggtgtctgtgtgtcctgggccactgtgtgcgatggtcccactgggaggtgtggcccccaaagagtggaacccacaggtggacacacccatgcaccctcgttcttgcccaaggtcacacatcgagacagcagggcccagatggatggccccaagctcggtggctcccgtgctgcccacacctggggacaggcccactgtggggggtaaggggtggaggtgttctaattcgggctgagccgtgtgactggcaggggccccagctgttgggcctgggcaggactgtttttagaaaagccccaactccctgcccctacccgggcccgtggctatttatagtccgggcctggagaagtcagtgagtcactagcgttcgcctctgcagggtcagtccaagcccccttagtgaggtggtctagcatgtcccccagtcccccaagcctctatctgacatctgctagcccagagccccaggggtccccaggaagggctcagagctggtggccccccccaggccttggcagcacctccttgtctgatgggactttgtggttcctggtggacatttaacattgtcggtttctctcatctggaaacaaacctccatgacgctc

SEQ ID NO: 9872 - DNA, 1689 bp, Homo sapiens
  source 1..1689: mol_type = unassigned DNA; mol_type = unassigned DNA
aggagccaccgtccgagccttgcggagcgcggcagtgggcgccggctgcccgcagcccctgacccggccccggacggagcgccggccgcaccaccgccctctggccgttgcctcaccggctcggcaagatgtcggtgaaggagggcgcacagcgcaagtgggcagcgctgaaggagaagctggggccacaggattcggaccccacggaggccaacctggagagcgcggaccccgagctgtgcatccggctgctccagatgccctctgtggtcaactactccggcctgcgcaagcgcctggagggcagcgacggcggctggatggtgcagttcctggagcagagcggcctggacctgctgctggaggcgctggcgcggctgtcgggccgcggcgttgcacgtatctccgacgccctgctgcagctcacctgcgtcagctgcgtgcgcgccgtcatgaactcgcggcagggcatcgagtacatcctcagcaaccagggctacgtgcgccagctctcccaggccctggacacatccaacgtgatggtgaagaagcaggtgtttgagctactggctgccctgtgcatctactctcccgagggccacgtgctgaccctggacgccctggaccactacaagacggtgtgcagccagcagtaccgcttcagcattgtcatgaacgagctctccggcagcgacaacgtgccctacgtggtcaccctgcttagcgtgatcaacgccgtcatcttgggccccgaggacctgcgcgcgcgcacccagctgcggaacgagtttatcgggctgcagctgctggacgtcctggctcgcctgcggtgagtccccactgtagcggtcctgccggctccccctcctgctcccaaggccaggcccacctgccctttggctcccagccacctcacctaagcagcacctccagatggcagggaggtggctccctcggagtaaccccaggggtccagccagaagccaggtctcaggctagaatccagctcactgtccctggcagctgcccacagaaactagggttgcagcagccatagaaaggacagaatgagctcatatcctttgcacaccgtggatggagctggaggccgtgatcctaagtgaaccaacccagaaacagaaaatgaaatgccaataagagggaactacagggtggttcacgtggacgcaagatggagacagggacacgggctccagggcgagagttgaaaaactacctacagggtacagtgttcgtcgctacttggtgtcaggcccactagaacaagggtccccaaccgccaggctgcggaccggtacctggcctattggaaccgggccacgcagcaggaagtgagcggtgggcgggcattcctgcctgagctgcacctcatgtcagatcagcactgcattagattctccagcgcacgcacgcgcgcaagggatccaggctgcgcgctcctcatgacaatctaatgcctgatgatcgggggtggaacagttttatccctaaaccattcccgtcaccccagtctatggaaaaattgtcttccacaaaaccagtccctggtgccaaaaaggctggggaccactgccctagaaggcaaatcgcctacgttacacagtgtaccatgtggcaaacacgcacatgtacccccgagtctaaaataaaaattttttaaaaaagaaa

SEQ ID NO: 9873 - DNA, 4672 bp, Homo sapiens
  source 1..4672: mol_type = unassigned DNA; mol_type = unassigned DNA
gccttgcggagcgcggcagtgggcgccggctgcccgcagcccctgacccggccccggacggagcgccggccgcaccaccgccctctggccgttgcctcaccggctcggcaagatgtcggtgaaggagggcgcacagcgcaagtgggcagcgctgaaggagaagctggggccacaggattcggaccccacggaggccaacctggagagcgcggaccccgagctgtgcatccggctgctccagatgccctctgtggtcaactactccggcctgcgcaagcgcctggagggcagcgacggcggctggatggtgcagttcctggagcagagcggcctggacctgctgctggaggcgctggcgcggctgtcgggccgcggcgttgcacgtatctccgacgccctgctgcagctcacctgcgtcagctgcgtgcgcgccgtcatgaactcgcggcagggcatcgagtacatcctcagcaaccagggctacgtgcgccagctctcccaggccctggacacatccaacgtgatggtgaagaagcaggtgtttgagctactggctgccctgtgcatctactctcccgagggccacgtgctgaccctggacgccctggaccactacaagacggtgtgcagccagcagtaccgcttcagcattgtcatgaacgagctctccggcagcgacaacgtgccctacgtggtcaccctgcttagcgtgatcaacgccgtcatcttgggccccgaggacctgcgcgcgcgcacccagctgcggaacgagtttatcgggctgcagctgctggacgtcctggctcgcctgcgagacctggaggatgccgacctgctgatccagctggaggctttcgaggaggctaaggccgaggacgaggaggagctgctgcgagtctctggcggggtcgacatgagcagccaccaggaggtctttgcctccctgttccacaaggtgagctgctccccggtgtctgcccagctcctgtcggtgctgcagggcctcctgcacctggagcccaccctccgctccagccagctgctctgggaggccctggagagcctcgtgaaccgggccgtgctcctggccagcgatgcccaggaatgcaccctggaggaagtggttgagcggctcctgtctgtcaaggggcgacccagaccgagccccctggtcaaggcccataaaagcgtccaggccaacctagaccagagccagaggggcagctccccgcaaaacactacaacccccaagcccagcgtggagggccagcagccagcagcagctgctgcctgcgagcccgtggaccacgcccagagtgagagcatcctgaaagtttcgcagcccagagccctggagcagcaggcgtccaccccacccccacccccacccccacccctgctccctggttccagtgccgagccccctccccctcccccaccaccccccctgcccagtgtgggggctaaggccctcccaacagcacccccgcccccacccctgccaggcctgggggccatggcccccccagcacctcctctaccaccacccctgccaggctcctgtgagttcctgcccccaccacctccaccactcccgggcttgggatgcccgcccccacccccacccctgctgcctggtatgggctggggccctcctccacccccacctccactactgccctgcacctgcagcccccccgtggcgggaggcatggaggaggtcatcgtggcccaggtggaccatggcttgggctcagcatgggtccccagccatcggcgggtgaacccacccacactgcgcatgaagaagctgaactggcagaagctgccatccaacgtggcacgtgagcacaactctatgtgggcgtccctgagcagccccgacgccgaggctgtggagcccgacttctccagcatcgagcgactattctccttccctgcagccaagcccaaggagcccaccatggtggccccccgggccaggaaggagcccaaggagatcactttcctcgatgccaagaagagcctgaacctcaacatcttcctgaagcaatttaagtgctccaacgaggaggtcgctgctatgatccgggctggagataccaccaagtttgatgtggaggttctcaaacaactccttaagctccttcccgagaagcacgagattgaaaacctgcgggcattcacagaggagcgagccaagctggccagcgccgaccacttctacctcctcctgctggccattccctgctaccagctgcgaatcgagtgcatgctgctgtgtgagggcgcggccgccgtgctggacatggtgcggcccaaggcccagctggtgctggctgcctgcgaaagcctgctcaccagccgccagctgcccatcttctgccagctgatcctgagaattgggaacttcctcaactacggcagccacaccggtgacgccgacggcttcaagatcagcacattgctgaagctcacggagaccaagtcccagcagaaccgcgtgacgctgctgcaccacgtgctggaggaagcggaaaagagccaccccgacctcctgcagctgccccgggacctggaacagccctcgcaagcagcagggatcaacctggagatcatccgctcagaggccagctccaacctgaagaagcttctggagaccgagcggaaggtgtctgcctccgtggccgaggtccaggagcagtacaccgagcgcctccaggccagcatctcggccttccgggcactggatgagctgtttgaggccatcgagcagaagcaacgggagctggccgactacctgtgtgaggacgcccagcagctgtccctggaggacacgttcagcaccatgaaggctttccgggaccttttcctccgcgccctgaaggagaacaaggaccggaaggagcaggcggcgaaggcagagaggaggaagcagcagctggcggaggaggaggcgcggcggcctcggggagaggacgggaagcctgtcaggaaggggcccgggaagcaggaggaggtgtgtgtcatcgatgccctgctggctgacatcaggaagggcttccagctgcggaagacagcccggggccgcggggacaccgacgggggcagcaaggcagcctccatggatcccccaagagccacagagcctgtggccaccagtaaccctgcaggagatcccgtgggcagcacgcgctgtcccgcctctgagcccggccttgatgctacaacagccagcgagtcccggggctgggaccttgtagacgccgtgacccccggccctcagcccaccctggagcagttggaggagggtggtccacggcccctggagaggcgttcttcctggtatgtggatgccagcgatgtcctaaccactgaggatccccagtgcccccagcccttggagggggcctggccggtgactctgggagatgctcaggccctgaagcccctcaagttctccagcaaccagccccctgcagccggaagttcaaggcaagatgccaaggatcccacgtccttgctgggcgtcctccaggccgaggccgacagcacaagtgaggggctggaggacgctgtccacagccgtggtgccagaccccctgcagcaggcccaggtggggatgaggacgaggacgaggaggacacggccccagagtccgcactggacacatccctggacaagtccttctccgaggatgcggtgaccgactcctcggggtcgggcacactccccagggcccggggccgggcctcaaaggggaccgggaagcgaaggaagaagcgtccctccaggagccaggaagaggttccccctgattctgatgataataaaacaaagaaactgtgtgtgatccagtaaggcctcaggcccaggcccaaggccaagtgagagagcccaggccacaggacatgctgccattctgccaagagaggctcttctgggggccaggctgggactgggccccggaaaccaaaactccgtgccttacccagccggggccctcctggagccttcttggggtgttgtggctgggaacccgacaggcaccagtgccctgccaggcctggtgccctcctggaccgcctgcacgtgccagcctcccacctgcttcctaaaggcaaccctggcccacacccgcatgcgcccggtgcagcctgccaagggccagtcggggggtgctgcgtcctgccagtgtccaccacagctctgcctgcccttcagcccagcaaggtttaatcaaaatgcaatgctttgcaagtctttactgcttggaggtggctgagttgggggccctgggcaggggtaagctggcaggcagtgccatggcaggccagggtcccctcccatggggtctggcccccgttccagcatgtccagcccctgaagttggagtggggggcggtctgcctttgctgccactgccaggcctctgccctgcagctgaaacttggccatcacatcaacagaaaacccctcccagtgccagctgcccagcgtgggcaggccctggggacaatacaggtccacctgaggggctgcagggtgacacccagcagccgctgccccctcactgcccacccagcgagggcagcctacccgagcctgccccctgccaggtgtgtgccctgaggctggcggctggatgcgtggccaataaaaagcagacct

SEQ ID NO: 9874 - DNA, 3050 bp, Homo sapiens
  source 1..3050: mol_type = unassigned DNA; mol_type = unassigned DNA
ggcatggaggaggtcatcgtggcccaggtggaccatggcttgggctcagcatgggtccccagccatcggcgggtgaacccacccacactgcgcatgaagaagctgaactggcagaagctgccatccaacgtggcacgtgagcacaactctatgtgggcgtccctgagcagccccgacgccgaggctgtggagcccgacttctccagcatcgagcgactattctccttccctgcagccaagcccaaggagcccaccatggtggccccccgggccaggaaggagcccaaggagatcactttcctcgatgccaagaagagcctgaacctcaacatcttcctgaagcaatttaagtgctccaacgaggaggtcgctgctatgatccgggctggagataccaccaagtttgatgtggaggttctcaaacaactccttaagctccttcccgagaagcacgagattgaaaacctgcgggcattcacagaggagcgagccaagctggccagcgccgaccacttctacctcctcctgctggccattccctgctaccagctgcgaatcgagtgcatgctgctgtgtgagggcgcggccgccgtgctggacatggtgcggcccaaggcccagctggtgctggctgcctgcgaaagcctgctcaccagccgccagctgcccatcttctgccagctgatcctgagaattgggaacttcctcaactacggcagccacaccggtgacgccgacggcttcaagatcagcacattgctgaagctcacggagaccaagtcccagcagaaccgcgtgacgctgctgcaccacgtgctggaggaagcggaaaagagccaccccgacctcctgcagctgccccgggacctggaacagccctcgcaagcagcagggatcaacctggagatcatccgctcagaggccagctccaacctgaagaagcttctggagaccgagcggaaggtgtctgcctccgtggccgaggtccaggagcagtacaccgagcgcctccaggccagcatctcggccttccgggcactggatgagctgtttgaggccatcgagcagaagcaacgggagctggccgactacctgtgtgaggacgcccagcagctgtccctggaggacacgttcagcaccatgaaggctttccgggaccttttcctccgcgccctgaaggagaacaaggaccggaaggagcaggcggcgaaggcagagaggaggaagcagcagctggcggaggaggaggcgcggcggcctcggggagaggacgggaagcctgtcaggaaggggcccgggaagcaggaggaggtgtgtgtcatcgatgccctgctggctgacatcaggaagggcttccagctgcggaagacagcccggggccgcggggacaccgacgggggcagcaaggcagcctccatggatcccccaagagccacagagcctgtggccaccagtaaccctgcaggagatcccgtgggcagcacgcgctgtcccgcctctgagcccggccttgatgctacaacagccagcgagtcccggggctgggaccttgtagacgccgtgacccccggccctcagcccaccctggagcagttggaggagggtggtccacggcccctggagaggcgttcttcctggtatgtggatgccagcgatgtcctaaccactgaggatccccagtgcccccagcccttggagggggcctggccggtgactctgggagatgctcaggccctgaagcccctcaagttctccagcaaccagccccctgcagccggaagttcaaggcaagatgccaaggatcccacgtccttgctgggcgtcctccaggccgaggccgacagcacaagtgaggggctggaggacgctgtccacagccgtggtgccagaccccctgcagcaggcccaggtggggatgaggacgaggacgaggaggacacggccccagagtccgcactggacacatccctggacaagtccttctccgaggatgcggtgaccgactcctcggggtcgggcacactccccagggcccggggccgggcctcaaaggggaccgggaagcgaaggaagaagcgtccctccaggagccaggaagaggttccccctgattctgatgataataaaacaaagaaactgtgtgtgatccagtaagaacattcctgcccctttttgtcttgtatgacattgacgttctggaagataacttcactttgggtttgcctgattgcgcccccaagcctcaggcccaggcccaaggccaagtgagagagcccaggccacaggacatgctgccattctgccaagagaggctcttctgggggccaggctgggactgggccccggaaaccaaaactccgtgccttacccagccggggccctcctggagccttcttggggtgttgtggctgggaacccgacaggcaccagtgccctgccaggcctggtgccctcctggaccgcctgcacgtgccagcctcccacctgcttcctaaaggcaaccctggcccacacccgcatgcgcccggtgcagcctgccaagggccagtcggggggtgctgcgtcctgccagtgtccaccacagctctgcctgcccttcagcccagcaaggtttaatcaaaatgcaatgctttgcaagtctttactgcttggaggtggctgagttgggggccctgggcaggggtaagctggcaggcagtgccatggcaggccagggtcccctcccatggggtctggcccccgttccagcatgtccagcccctgaagttggagtggggggcggtctgcctttgctgccactgccaggcctctgccctgcagctgaaacttggccatcacatcaacagaaaacccctcccagtgccagctgcccagcgtgggcaggccctggggacaatacaggtccacctgaggggctgcagggtgacacccagcagccgctgccccctcactgcccacccagcgagggcagcctacccgagcctgccccctgccaggtgtgtgccctgaggctggcggctggatgcgtggccaataaaaagcagacctag

SEQ ID NO: 9875 - DNA, 947 bp, Homo sapiens
  source 1..947: mol_type = unassigned DNA; mol_type = unassigned DNA
gggtgcctgctgtacgctggacctggacctactgggccccaggcaggacatcctttagaccctctgggaggctccagcccctgcctgctggatcgccaggccccggggctgcgagagcctcactggccgtgtccccacccgacagagcacaactctatgtgggcgtccctgagcagccccgacgccgaggctgtggagcccgacttctccagcatcgagcgactattctccttccctgcagccaagcccaaggagcccaccatggtggccccccgggccaggaaggagcccaaggaggtggggacggggaggggactcagaccggggccgcctgcctggccaccctccggtaccagcctgttgggtggggggttttctagatcactttcctcgatgccaagaagagcctgaacctcaacatcttcctgaagcaatttaagtgctccaacgaggaggtcgctgctatgatccgggctggagataccaccaagtttgatgtggaggttctcaaacaactccttaagctccttcccgagaagcacgagattgaaaacctgcgggcattcacagaggagcgagccaagctggccagcgccgaccacttctacctcctcctgctggccattccctgctaccagctgcgaatcgagtgcatgctgctgtgtgagggcgcggccgccgtgctggacatggtgcggcccaaggcccagctggtgctggctgcctgcgaaagcctgctcaccagccgccagctgcccatcttctgccagctgatcctgagaattgggaacttcctcaactacggcagccacaccggtgacgccgacggcttcaagatcagcacattgctgaagctcacggagaccaagtcccagcagaaccgcgtgacgctgctgcaccacgtgctggaggaagcggaaaagagccaccccgacctcctgcagctg

SEQ ID NO: 9876 - DNA, 581 bp, Homo sapiens
  source 1..581: mol_type = unassigned DNA; mol_type = unassigned DNA
tcacgtctgtcaggcacactgtaggtgtccactcccgtcggtggagggtttgcagcccccaggccctgtcctgtgatccttccggtgctgggctgagcctggggaggagccagggagtgcaggggcactggcaagcaggaccacaccccaccgccagggcatctgggggctccgaaccaagagcccctctccagccctggctgcccctgcaggcctgctcaccagccgccagctgcccatcttctgccagctgatcctgagaattgggaacttcctcaactacgaagcggaaaagagccaccccgacctcctgcagctgccccgggacctggaacagccctcgcaagcagcagggatcaacctggagatcatccgctcagaggccagctccaacctgaagaagcttctggagaccgagcggaaggtgtctgcctccgtggccgaggtccaggagcagtacaccgagcgcctccaggccagcatctcggccttccgggcactggatgagctgtttgaggccatcgagcagaagcaacgggagctggccgactacctgtgtgaggacgcccagcagctgtccc

SEQ ID NO: 9877 - DNA, 545 bp, Homo sapiens
  source 1..545: mol_type = unassigned DNA; mol_type = unassigned DNA
accaccgtcctcagggcctgtccctgtggccgtcaccctcccgcaactcagggcctcaccccgggtggtgcccgcgcggggctctcacgggactgtcacgtgcccttgcccccaggccagcatctcggccttccgggcactggatgagctgtttgaggccatcgagcagaagcaacgggagctggccgactacctgtgtgaggacgcccagcagctgtccctggaggacacgttcagcaccatgaaggctttccgggaccttttcctccgcgccctgaaggagaacaaggaccggaaggagcaggcggcgaaggcagagaggaggaagcagcagctggcggaggaggaggcgcggcggcctcggggagaggacgggaagcctgtcaggaaggggcccgggaagcaggaggaggtgtgtgtcatcgatgccctgctggctgacatcaggaagggcttccagctgcggaagacagcccggggccgcggggacaccgacgggggcagcaaggcagcctccatggatcccccaagagccacagagcctg

SEQ ID NO: 9878 - DNA, 1102 bp, Homo sapiens
  source 1..1102: mol_type = unassigned DNA; mol_type = unassigned DNA
aactgcagttccagtaaccctgtggctttcctgctctgtctgttggtggagggctatcttcactctaagtgtgtcaatggcgtggggccttctggggcatgtccccaggaagtctgtgaggagaccgggacagtcgcaagggcagatgctgccagggacaagtacactgcaacccccctcctgttggacagtgtcctcccaccccgaggccatgggtgggtctatggagaagcagattaccccccgcacaccgagtcttctggggggcgaccagccaaaggtcaatcagccaggcctcaggcccaggcccaaggccaagtgagagagcccaggccacaggacatgctgccattctgccaagagaggctcttctgggggccaggctgggactgggccccggaaaccaaaactccgtgccttacccagccggggccctcctggagccttcttggggtgttgtggctgggaacccgacaggcaccagtgccctgccaggcctggtgccctcctggaccgcctgcacgtgccagcctcccacctgcttcctaaaggcaaccctggcccacacccgcatgcgcccggtgcagcctgccaagggccagtcggggggtgctgcgtcctgccagtgtccaccacagctctgcctgcccttcagcccagcaaggtttaatcaaaatgcaatgctttgcaagtctttactgcttggaggtggctgagttgggggccctgggcaggggtaagctggcaggcagtgccatggcaggccagggtcccctcccatggggtctggcccccgttccagcatgtccagcccctgaagttggagtggggggcggtctgcctttgctgccactgccaggcctctgccctgcagctgaaacttggccatcacatcaacagaaaacccctcccagtgccagctgcccagcgtgggcaggccctggggacaatacaggtccacctgaggggctgcagggtgacacccagcagccgctgccccctcactgcccacccagcgagggcagcctacccgagcctgccccctgccaggtgtgtgccctgaggctggcggctggatgcgtggccaataaaaagcagacct

SEQ ID NO: 9879 - DNA, 2956 bp, Homo sapiens
  source 1..2956: mol_type = unassigned DNA; mol_type = unassigned DNA
ggcatggaggaggtcatcgtggcccaggtggaccatggcttgggctcagcatgggtccccagccatcggcgggtgaacccacccacactgcgcatgaagaagctgaactggcagaagctgccatccaacgtggcacgtgagcacaactctatgtgggcgtccctgagcagccccgacgccgaggctgtggagcccgacttctccagcatcgagcgactattctccttccctgcagccaagcccaaggagcccaccatggtggccccccgggccaggaaggagcccaaggagatcactttcctcgatgccaagaagagcctgaacctcaacatcttcctgaagcaatttaagtgctccaacgaggaggtcgctgctatgatccgggctggagataccaccaagtttgatgtggaggttctcaaacaactccttaagctccttcccgagaagcacgagattgaaaacctgcgggcattcacagaggagcgagccaagctggccagcgccgaccacttctacctcctcctgctggccattccctgctaccagctgcgaatcgagtgcatgctgctgtgtgagggcgcggccgccgtgctggacatggtgcggcccaaggcccagctggtgctggctgcctgcgaaagtgagctccccatcccacctggtgccaggggctggtgagactcactccctgcccctcccagggcagccacaccggtgacgccgacggcttcaagatcagcacattgctgaagctcacggagaccaagtcccagcagaaccgcgtgacgctgctgcaccacgtgctggaggaagcggaaaagagccaccccgacctcctgcagctgccccgggacctggaacagccctcgcaagcagcagggatcaacctggagatcatccgctcagaggccagctccaacctgaagaagcttctggagaccgagcggaaggtgtctgcctccgtggccgaggtccaggagcagtacaccgagcgcctccaggccagcatctcggccttccgggcactggatgagctgtttgaggccatcgagcagaagcaacgggagctggccgactacctgtgtgaggacgcccagcagctgtccctggaggacacgttcagcaccatgaaggctttccgggaccttttcctccgcgccctgaaggagaacaaggaccggaaggagcaggcggcgaaggcagagaggaggaagcagcagctggcggaggaggaggcgcggcggcctcggggagaggacgggaagcctgtcaggaaggggcccgggaagcaggaggaggtgtgtgtcatcgatgccctgctggctgacatcaggaagggcttccagctgcggaagacagcccggggccgcggggacaccgacgggggcagcaaggcagcctccatggatcccccaagagccacagagcctgtggccaccagtaaccctgcaggagatcccgtgggcagcacgcgctgtcccgcctctgagcccggccttgatgctacaacagccagcgagtcccggggctgggaccttgtagacgccgtgacccccggccctcagcccaccctggagcagttggaggagggtggtccacggcccctggagaggcgttcttcctggtatgtggatgccagcgatgtcctaaccactgaggatccccagtgcccccagcccttggagggggcctggccggtgactctgggagatgctcaggccctgaagcccctcaagttctccagcaaccagccccctgcagccggaagttcaaggcaagatgccaaggatcccacgtccttgctgggcgtcctccaggccgaggccgacagcacaagtgaggggctggaggacgctgtccacagccgtggtgccagaccccctgcagcaggcccaggtggggatgaggacgaggacgaggaggacacggccccagagtccgcactggacacatccctggacaagtccttctccgaggatgcggtgaccgactcctcggggtcgggcacactccccagggcccggggccgggcctcaaaggggaccgggaagcgaaggaagaagcgtccctccaggagccaggaagaggttccccctgattctgatgataataaaacaaagaaactgtgtgtgatccagtaaggcctcaggcccaggcccaaggccaagtgagagagcccaggccacaggacatgctgccattctgccaagagaggctcttctgggggccaggctgggactgggccccggaaaccaaaactccgtgccttacccagccggggccctcctggagccttcttggggtgttgtggctgggaacccgacaggcaccagtgccctgccaggcctggtgccctcctggaccgcctgcacgtgccagcctcccacctgcttcctaaaggcaaccctggcccacacccgcatgcgcccggtgcagcctgccaagggccagtcggggggtgctgcgtcctgccagtgtccaccacagctctgcctgcccttcagcccagcaaggtttaatcaaaatgcaatgctttgcaagtctttactgcttggaggtggctgagttgggggccctgggcaggggtaagctggcaggcagtgccatggcaggccagggtcccctcccatggggtctggcccccgttccagcatgtccagcccctgaagttggagtggggggcggtctgcctttgctgccactgccaggcctctgccctgcagctgaaacttggccatcacatcaacagaaaacccctcccagtgccagctgcccagcgtgggcaggccctggggacaatacaggtccacctgaggggctgcagggtgacacccagcagccgctgccccctcactgcccacccagcgagggcagcctacccgagcctgccccctgccaggtgtgtgccctgaggctggcggctggatgcgtggccaataaaaagcagacctag

SEQ ID NO: 9880 - DNA, 386 bp, Homo sapiens
  source 1..386: mol_type = unassigned DNA; mol_type = unassigned DNA
gcggccgcgttccggcgtgatccctggaagctgccagcaggtgctgctcaaggaaggaacagcttcagccataggtgacagtggcacacatctcactgaagacagagaaggacaagttgaaaacatggatttttgtgttgtaccatgtcttatgatggtatcattcaacaatttttaaaattagattttggaaaacatttttttatcttctacctcattgtattctttcaaccgccaagtgaagccagtactttaagcctcactgccaatttacagagcacagaataaaacagaagagaataaaatgatatgggttgcagcttcccagttgtaacgagcaaaaggataggagcctcagactcttagttctgaaccctgcctgggtt

SEQ ID NO: 9881 - DNA, 6064 bp, Homo sapiens
  source 1..6064: mol_type = unassigned DNA; mol_type = unassigned DNA
agtacagtataaaacttcacagtgccaataccatgaagaggagctcagacagctcttaccacatgatacaagagccggctggtggaagagtggggaccagaaagagaatttgctgaagaggagaaggaaaaaaaaaacaccaaaaaaaaaaataaaaaaatccacacacacaaaaaaacctgcgcgtgaggggggaggaaaagcagggccttttaaaaaggcaatcacaacaacttttgctgccaggatgcccttgctttggctgagaggatttctgttggcaagttgctggattatagtgaggagttcccccaccccaggatccgaggggcacagcgcggcccccgactgtccgtcctgtgcgctggccgccctcccaaaggatgtacccaactctcagccagagatggtggaggccgtcaagaagcacattttaaacatgctgcacttgaagaagagacccgatgtcacccagccggtacccaaggcggcgcttctgaacgcgatcagaaagcttcatgtgggcaaagtcggggagaacgggtatgtggagatagaggatgacattggaaggagggcagaaatgaatgaacttatggagcagacctcggagatcatcacgtttgccgagtcaggaacagccaggaagacgctgcacttcgagatttccaaggaaggcagtgacctgtcagtggtggagcgtgcagaagtctggctcttcctaaaagtccccaaggccaacaggaccaggaccaaagtcaccatccgcctcttccagcagcagaagcacccgcagggcagcttggacacaggggaagaggccgaggaagtgggcttaaagggggagaggagtgaactgttgctctctgaaaaagtagtagacgctcggaagagcacctggcatgtcttccctgtctccagcagcatccagcggttgctggaccagggcaagagctccctggacgttcggattgcctgtgagcagtgccaggagagtggcgccagcttggttctcctgggcaagaagaagaagaaagaagaggagggggaagggaaaaagaagggcggaggtgaaggtggggcaggagcagatgaggaaaaggagcagtcgcacagacctttcctcatgctgcaggcccggcagtctgaagaccaccctcatcgccggcgtcggcggggcttggagtgtgatggcaaggtcaacatctgctgtaagaaacagttctttgtcagtttcaaggacatcggctggaatgactggatcattgctccctctggctatcatgccaactactgcgagggtgagtgcccgagccatatagcaggcacgtccgggtcctcactgtccttccactcaacagtcatcaaccactaccgcatgcggggccatagcccctttgccaacctcaaatcgtgctgtgtgcccaccaagctgagacccatgtccatgttgtactatgatgatggtcaaaacatcatcaaaaaggacattcagaacatgatcgtggaggagtgtgggtgctcatagagttgcccagcccagggggaaagggagcaagagttgtccagagaagacagtggcaaaatgaagaaatttttaaggtttctgagttaaccagaaaaatagaaattaaaaacaaaacaaaaaaaaaaacaaaaaaaaacaaaagtaaattaaaaacaaaacctgatgaaacagatgaaggaagatgtggaaaaaatccttagccagggctcagagatgaagcagtgaaagagacaggaattgggagggaaagggagaatggtgtaccctttatttcttctgaaatcacactgatgacatcagttgtttaaacggggtattgtcctttccccccttgaggttcccttgtgagccttgaatcaaccaatctagtctgcagtagtgtggactagaacaacccaaatagcatctagaaagccatgagtttgaaagggcccatcacaggcactttcctacccaattacccaggtcataaggtatgtctgtgtgacacttatctctgtgtatatcagcatacacacacacacacacacacacacacacacacacaggcatttccacacattacatatatacacatactggtaaaagaacaatcgtgtgcaggtggtcacacttcctttttctgtaccacttttgcaacaaaacaaaacaaacaacattaaaaaattgagaacaagtatggaaagaatgaaagatcaaggaaaaaagaataccaagttacatttcgttaaggtgcttatgatcttagaactatgcaacctaataggtttgaaactgtttacctgagagagaacaaaaagagagacttttttgtattggaagtaatctgattaatttttattttcttcaaggagagatacttgaaaggaatatgtttgtccatctgttggatccaaacatttctatattttgtaaatgttgttgttgttttttttttaatcgtttactatttgcactacaatggtgtttgacctgtctaatccttatttaacaagtattttctttggttgggggtgggggtggggtttaagagctgcacttaatgtgagctataaaagaactgctacagcacacaaaatagctatttttattattataattataattattattattattttgtaccttaaaaaatagacacatacaccaaagacatttgtgtgagcctttaaacagtctgtctgtggttggtatcattcaccatcaatgagtcaggggttgggattcaaggttgagtagtgtggattgtgttcaggcttaaaagacctgagaagtttggtttttgactccttttacatccatgaaacaggacatttcatactggatgtacagtagttgtacactgttggatatcaagttcaatcaaattcatggaactacatgcttgtatgtgtatatatacattgcttgtgcatatgcatatctgtatgtatatatacatgtattgtaccatgtccatacacattttaagcacttcaggctgtcattttttaatgttcttaaagcaatgaatgtttgtgtgcaaaacacagtatttttaagaaggataggctatagtttttgcttttactctgaactaggtgggcgcatttcaaaaattcggatgggaaaaagcctggaaattccagtgaatattcagcaaggccctctttcattgtacagggatcaaatttcctcctcttttttgtgccccctcccacttctacaagttatcccctgtggggaaaacaggatgataatcaaaactctgggctgatgtttttccaacttagtgtctattggaatcaatcttaaatcagaagctttttcagaaaaataatatttaggccagaattagagttgagtgtattttttaaaaatgattaaggcttggttgtgagaaatattacctgtaccagctgggaaaaataatgtcatcactaactaaaagataattaatttgagagaaagtgttaagagagggagagtaaggaagagaacagttaagaggaggcagaggtgagggcagtagtaaaaatctctaaaattttaatttacagccaaaattcttcatgtgtaaatttgtattgattcagatgcagaaatgaaaaaaaaacacctttgttttataaatatcaaagtacatgcttaaagccaagtttttatctagtttattctagtacttagcttgcctggaatagctaataaattattcatgtatgtgcttttgaaaatccagagccctatttttacacacttgtgtgaagttggcaaacattttgaaaaatggaaaaaagtttctaataattgggaacaattacattaattaatattttgtaaaatattgaagcttttagccctatgtcaatttgtagattaaaataaattaattataggaaaggaagataacagtgagaaaccaaacattacaaaaggtggtttagctctccttgaaaaatatactaagttggtatactataacacttggctatatgtaggcaatgtcactactgggcaaatacacttactgtgttctagaggcagccctttcttatgcagaaaatacaatacgcactgcatgagaagcttgagagtggattctaatccaggtctgtcgaccttggatatcatgcatgtgggaaggtgggtgtggtgagaaaagttttaaggcaagagtagatggccatgttcaactttacaaaatttcttggaaaactggcagtattttgaactgcatcttctttggtaccggaacctgcagaaacagtgtgagaaattaagtcctggttcactgcgcagtagcaaagatggtcaaggccatggaaaaagcagaaatttaccaagaaagctgatacccatgtatagttcccactcatctcaaatacatctgctatctttttaagctaagtcctagacatatcggggataacatgggggttgattagtgaccacagttatcagaagcagagaaatgtaattccatattttatttgaaacttattccatattttaattggatattgagtgattgggttatcaaacacccacaaactttaattttgttaaatttatatggctttgaaatagaagtataagttgctaccattttttgataacattgaaagatagtattttaccatctttaatcatcttggaaaatacaagtcctgtgaacaaccactctttcacctagcagcatgaggccaaaagtaaaggctttaaattataacatatgggattcttagtagtatgtttttttcttgaaactcagtggctctatctaaccttactatctcctcactctttctctaagactaaactctaggctcttaaaaatctgcccacaccaatcttagaagctctgaaaagaatttgtctttaaatatcttttaatagtaacatgtattttatggaccaaattgacattttcgactattttttccaaaaaagtcaggtgaatttcagcacactgagttgggaatttcttatcccagaagaccaaccaatttcatatttatttaagattgattccatactccgttttcaaggagaatccctgcagtctccttaaaggtagaacaaatactttctatttttttttcaccattgtgggattggactttaagaggtgactctaaaaaaacagagaacaaatatgtctcagttgtattaagcacggacccatattatcatattcacttaaaaaaatgatttcctgtgcaccttttggcaacttctcttttcaatgtagggaaaaacttagtcaccctgaaaacccacaaaataaataaaacttgtagatgtgggcagaaggtttgggggtggacattgtatgtgtttaaattaaaccctgtatcactgagaagctgttgtatgggtcagagaaaatgaatgcttagaagctgttcacatcttcaagagcagaagcaaaccacatgtctcagctatattattatttattttttatgcataaagtgaatcatttcttctgtattaatttccaaagggttttaccctctatttaaatgctttgaaaaacagtgcattgacaatgggttgatatttttctttaaaagaaaaatataattatgaaagccaagataatctgaagcctgttttattttaaaactttttatgttctgtggttgatgttgtttgtttgtttgtttctattttgttggttttttactttgttttttgttttgttttgttttgttttgcatactacatgcagttctttaaccaatgtctgtttggctaatgtaattaaagttgttaatttatatgagtgcatttcaactatgtcaatggtttcttaatatttattgtgtagaagtactggtaatttttttatttacaatatgtttaaagagataacagtttgatatgttttcatgtgtttatagcagaagttatttatttctatggcattccagcggatattttggtgtttgcgaggcatgcagtcaatattttgtacagttagtggacagtattcagcaacgcctgatagcttctttggccttatgttaaataaaaagacctgtttgggatgta

SEQ ID NO: 9882 - DNA, 2403 bp, Homo sapiens
  source 1..2403: mol_type = unassigned DNA; mol_type = unassigned DNA
agagaacctttcctatccatctgcagccctgcttggcccttgcctcagtgaatttaccactatcataatcacagtgtgcagagtgtgttaaattaagaacagaatccacagtacgcaatgcacagaaaagcctgccttctgctgcagagaacttgaaactgtgcctaaaatttatagtaccgtaaacatctcagggcctcgagtgataagtatggctggatttccgttaactatagaaatccaggcagggagatcctcccagggagttgcaagttctaagatgaacttcttgaagattgttcccagatttgtgcatgggatacatgtacagcagacagttgtaaggaggtccacggtcatggaaaagaggatatgtttctatatgccaccaagtgggaaaaatggaagtgagggaaaatatttgattaatcaaaaaattttagtttggatacctgctttcatagtaattgttgctgtgtcattaaacatacagttgcttaggaaaagagaaggaaataggtgactttctaattttagagttaggctggaactgagtggttgctaaattcaactgccctgacaatgtggggatttcctgtccattagcagcgattgctatttgacatatgtttctggtgcccattaatctgccctgtaatgggtcagaggcaaaaatgggggattcagaggtactaggtggctctcttaatttaatagaactcaatgctaaggacgcctctatttgttaataagtaatcaagtcattggctactttctgctaaacactagactatgatagtgaccttagaccccgggcattctaaaccaggctggcaggagggtggtggtggaggtgatgtgaggtaagcctcctagaggaactgtcatccaaacaatctgaaaattgaaacattattaaaggcagcactaagggtggtatgttggagttggggcaggagcacttaaggcagaaggaacagcaggtgtcactgcctgcagttgagaaagggggtggaattctcaaggccttagaccccagagaacaggactgggcaagagctgacattcaagggaggaacagcatgtacagagcccaaagtcccagccactttctgttggatactgagcaataggaattcagtaaaggactttcaagaagaagtgatgtgatcagatccacctgtgggaaagatgcctttagctgcttcatggagaaatgactggagaggaggccttccttagtgttgcagaggcaaagtaaagaaaatgctgctgcagtgacccagcaaagaggtgatggcggaggaatcaggctgtgacaagggaagaagaggctggctcaagtgtgtctcgactgcacagacttacacagcgaggaacagccaggaagacgctgcacttcgagatttccaaggaaggcagtgacctgtcagtggtggagcgtgcagaagtctggctcttcctaaaagtccccaaggccaacaggaccaggaccaaagtcaccatccgcctcttccagcagcagaagcacccgcagggcagcttggacacaggggaagaggccgaggaagtgggcttaaagggggagaggagtgaactgttgctctctgaaaaagtagtagacgctcggaagagcacctggcatgtcttccctgtctccagcagcatccagcggttgctggaccagggcaagagctccctggacgttcggattgcctgtgagcagtgccaggagagtggcgccagcttggttctcctgggcaagaagaagaagaaagaagaggagggggaagggaaaaagaagggcggaggtgaaggtggggcaggagcagatgaggaaaaggagcagtcgcacagacctttcctcatgctgcaggcccggcagtctgaagaccaccctcatcgccggcgtcggcggggcttggagtgtgatggcaaggtcaacatctgctgtaagaaacagttctttgtcagtttcaaggacatcggctggaatgactggatcattgctccctctggctatcatgccaactactgcgagggtgagtgcccgagccatatagcaggcacgtccgggtcctcactgtccttccactcaacagtcatcaaccactaccgcatgcggggccatagcccctttgccaacctcaaatcgtgctgtgtgcccaccaagctgagacccatgtccatgttgtactatgatgatggtcaaaacatcatcaaaaaggacattcagaacatgatcgtggaggagtgtgggtgctcatagagttgcccagcccagggggaaagggagcaagagttgtccagagaagacagtggcaaaatgaagaaatttttaaggtttctgagttaaccagaaaaatagaaattaaaaacaaaacaaaaaaaaaaacaaaaaaa

SEQ ID NO: 9883 - DNA, 1632 bp, Homo sapiens
  source 1..1632: mol_type = unassigned DNA; mol_type = unassigned DNA
ctccctgacagccacaaacctacagcactgactgcattcagagaggaacctgcaaacaaaacttcacagaaaactttttgttcttgttccagagaatttgctgaagaggagaaggaaaaaaaaaacaccaaaaaaaaaaataaaaaaatccacacacacaaaaaaacctgcgcgtgaggggggaggaaaagcagggccttttaaaaaggcaatcacaacaacttttgctgccaggatgcccttgctttggctgagaggatttctgttggcaagttgctggattatagtgaggagttcccccaccccaggatccgaggggcacagcgcggcccccgactgtccgtcctgtgcgctggccgccctcccaaaggatgtacccaactctcagccagagatggtggaggccgtcaagaagcacattttaaacatgctgcacttgaagaagagacccgatgtcacccagccggtacccaaggcggcgcttctgaacgcgatcagaaagcttcatgtgggcaaagtcggggagaacgggtatgtggagatagaggatgacattggaaggagggcagaaatgaatgaacttatggagcagacctcggagatcatcacgtttgccgagtcaggaacagccaggaagacgctgcacttcgagatttccaaggaaggcagtgacctgtcagtggtggagcgtgcagaagtctggctcttcctaaaagtccccaaggccaacaggaccaggaccaaagtcaccatccgcctcttccagcagcagaagcacccgcagggcagcttggacacaggggaagaggccgaggaagtgggcttaaagggggagaggagtgaactgttgctctctgaaaaagtagtagacgctcggaagagcacctggcatgtcttccctgtctccagcagcatccagcggttgctggaccagggcaagagctccctggacgttcggattgcctgtgagcagtgccaggagagtggcgccagcttggttctcctgggcaagaagaagaagaaagaagaggagggggaagggaaaaagaagggcggaggtgaaggtggggcaggagcagatgaggaaaaggagcagtcgcacagacctttcctcatgctgcaggcccggcagtctgaagaccaccctcatcgccggcgtcggcggggcttggagtgtgatggcaaggtcaacatctgctgtaagaaacagttctttgtcagtttcaaggacatcggctggaatgactggatcattgctccctctggctatcatgccaactactgcgagggtgagtgcccgagccatatagcaggcacgtccgggtcctcactgtccttccactcaacagtcatcaaccactaccgcatgcggggccatagcccctttgccaacctcaaatcgtgctgtgtgcccaccaagctgagacccatgtccatgttgtactatgatgatggtcaaaacatcatcaaaaaggacattcagaacatgatcgtggaggagtgtgggtgctcatagagttgcccagcccagggggaaagggagcaagagttgtccagagaagacagtggcaaaatgaagaaatttttaaggtttctgagttaaccagaaaaatagaaattaaaaacaaaaca

SEQ ID NO: 9884 - DNA, 2002 bp, Homo sapiens
  source 1..2002: mol_type = unassigned DNA; mol_type = unassigned DNA
gggttcgctagtggctgctcctcgaggcgagaacagagccatgcaaatgctccagcgtggagttgggtttgtgaagtcgccagtaaatcaggccgcctccactaggtgaataacgcggtggcagcgggccactttgctagtgcagtcgctggaggaccgcgctccgcactcagaagggggcagttggctggtgcgcgagcgctcccggctcgcctctgtccgcggggagccagccggcccctccgcagctgccaaaaggggggaaaaaatcaagagctgctcttaaaagaagttgcccttgctggtgctcagggtaaaaatagaggctgccgcttagaccggcttggccctggctccaggcatcctgcgagctgggctcgagcagcggccgcgttccggcgtgatccctggaagctgccagcaggtgctgctcaagtgccaataccatgaagaggagctcagacagctcttaccacatgatacaagagccggctggtggaagagtggggaccagaaagagaatttgctgaagaggagaaggaaaaaaaaaacaccaaaaaaaaaaataaaaaaatccacacacacaaaaaaacctgcgcgtgaggggggaggaaaagcagggccttttaaaaaggcaatcacaacaacttttgctgccaggatgcccttgctttggctgagaggatttctgttggcaagttgctggattatagtgaggagttcccccaccccaggatccgaggggcacagcgcggcccccgactgtccgtcctgtgcgctggccgccctcccaaaggatgtacccaactctcagccagagatggtggaggccgtcaagaagcacattttaaacatgctgcacttgaagaagagacccgatgtcacccagccggtacccaaggcggcgcttctgaacgcgatcagaaagcttcatgtgggcaaagtcggggagaacgggtatgtggagatagaggatgacattggaaggagggcagaaatgaatgaacttatggagcagacctcggagatcatcacgtttgccgagtcaggaacagccaggaagacgctgcacttcgagatttccaaggaaggcagtgacctgtcagtggtggagcgtgcagaagtctggctcttcctaaaagtccccaaggccaacaggaccaggaccaaagtcaccatccgcctcttccagcagcagaagcacccgcagggcagcttggacacaggggaagaggccgaggaagtgggcttaaagggggagaggagtgaactgttgctctctgaaaaagtagtagacgctcggaagagcacctggcatgtcttccctgtctccagcagcatccagcggttgctggaccagggcaagagctccctggacgttcggattgcctgtgagcagtgccaggagagtggcgccagcttggttctcctgggcaagaagaagaagaaagaagaggagggggaagggaaaaagaagggcggaggtgaaggtggggcaggagcagatgaggaaaaggagcagtcgcacagacctttcctcatgctgcaggcccggcagtctgaagaccaccctcatcgccggcgtcggcggggcttggagtgtgatggcaaggtcaacatctgctgtaagaaacagttctttgtcagtttcaaggacatcggctggaatgactggatcattgctccctctggctatcatgccaactactgcgagggtgagtgcccgagccatatagcaggcacgtccgggtcctcactgtccttccactcaacagtcatcaaccactaccgcatgcggggccatagcccctttgccaacctcaaatcgtgctgtgtgcccaccaagctgagacccatgtccatgttgtactatgatgatggtcaaaacatcatcaaaaaggacattcagaacatgatcgtggaggagtgtgggtgctcatagagttgcccagcccagggggaaagggagcaagagttgtccagagaagacagtggcaaaatg

SEQ ID NO: 9885 - DNA, 1919 bp, Homo sapiens
  source 1..1919: mol_type = unassigned DNA; mol_type = unassigned DNA
ctctgaatcatcgcgctccacttgtgacgtcgcggacgcccggctcgggcaggcgtggggggcccgcgcgtcccgggagccccgaggcggcagcgcgcgtttccacgccgcggtcccgcgggaaagccgggggcggcggcctggctgaggccaagctcggatccggtgccgagccaagcggggccgtgcgtcgccggggcttcgccttcgctcgcgtgacctccgccgtcctccccaaccctcgtcctctggccgcgcctgcggccgcacgcccagcgcccctcgcctaacctcgcgcccgggccgcgcctcctcctcctcctgctccccgccgcttccgtttctcgagggaaaggctgctgcctcctgctctgtcctcatccccggcttagctgacggcccagagggtgggtgccaattccaccagcagctgcaactgaaaagcaaggttcagaaatgtcagatatcctccgggagctgctctgtgtctctgagaaggctgctaacattgcccgggcgtgcagacagcaggaagccctcttccagctgctgatcgaagaaaagaaagagggagaaaagaacaagaagtttgcagttgacttcaagacgctggctgatgtactggtacaggaagttataaaacagaatatggagaacaagtttccaggcttggaaaaaaatatttttggagaagaatccaatgagtttactaatgactggggggaaaagattaccttgaggttgtgttcaacagaggaggaaacagcagagcttcttagcaaagtcctcaatggtaacaaggtggcatctgaagcattagccagggttgttcatcaggatgttgcctttactgacccaactctggattccacagagatcaatgttccacaggacattttgggaatttgggtggaccccatagattcaacttatcagtatataaaaggttctgctgacattaaatccaaccagggaatcttcccctgtggacttcagtgtgtcaccattttaattggtgtctatgacatacagacaggggttcccctgatgggagtcatcaatcaaccttttgtgtcacgagatccaaacaccctcaggtggaaaggacagtgctattggggcctttcttacatggggaccaacatgcattcactacagctcaccatctctagaagaaacggcagtgaaacacacactggaaacaccggctctgaggcagcattctcccccagtttttcagccgtaattagtacaagtgaaaaggagactatcaaagctgcattgtcacgtgtgtgtggagatcgcatatttggggcagctggggctggttataagagcctatgtgttgtccaaggcctcgttgacatttacatcttttcagaagataccacattcaaatgggactcttgtgctgctcatgccatactgagggccatgggtgggggaatagtagacttgaaagaatgcttagaaagaaatccagaaacagggcttgatttgccacagttggtgtaccacgtggaaaatgagggtgctgctggggtggatcggtgggccaacaagggaggactcattgcatacagatccaggaagcggctggagacattcctgagcctcctggtccaaaacctggcacctgcagagacgcatacctagaggaactctaaccccggtgtacctgtataaactgaactgtgaaactgtttcggttatctctgtcttttgaggatggctttgtcctgttgctggttaacattcaccttcctcttttgaggagtatttttccattatgtattcataataatgttaatttcaataaatgacattcatgcagcaattatattggtgtatgaaattcttacagtgaatattgtgctgttagtgctgcttgaaacatttcaataaaatattgaccagga

SEQ ID NO: 9886 - DNA, 552 bp, Homo sapiens
  source 1..552: mol_type = unassigned DNA; mol_type = unassigned DNA
agccccgaggcggcagcgcgcgtttccacgccgcggtcccgcgggaaagccgggggcggcggcctggctgaggccaagctcggatccggtgccgagccaagcggggccgtgcgtcgccggggcttcgccttcgctcgcgtgacctccgccgtcctccccaaccctcgtcctctggccgcgcctgcggccgcacgcccagcgcccctcgcctaacctcgcgcccgggccgcgcctcctcctcctcctgctccccgccgcttccgtttctcgagggaaaggctgctgcctcctgctctgtcctcatccccggcttagtccttcagagcttacatcatgtggccgagtttatatacctgattggcaaaacagagcctaagaaccagctctcctgtatcccaagcaaggctctttctaccgcacaccctgcaggcccatccaggcccatccagacaataaacactgacggcccagagggtgggtgccaattccaccagcagctgcaactgaaaagcaaggttcagaaatgtcagatatcctccgggagctgctctg

SEQ ID NO: 9887 - DNA, 613 bp, Homo sapiens
  source 1..613: mol_type = unassigned DNA; mol_type = unassigned DNA
gcgcctcctcctcctcctgctccccgccgcttccgtttctcgagggaaaggctgctgcctcctgctctgtcctcatccccggcttagtccttcagagcttacatcatgtggccgagtttatatacctgattggcaaaacagagcctaagaaccagctctcctgtatcccaagcaaggctctttctaccgcacaccctgcaggcccatccaggcccatccagacaataaacaggtgaaagaaagcactacttcaatattgctgctaagcatatgatcattctaagctgacggcccagagggtgggtgccaattccaccagcagctgcaactgaaaagcaaggttcagaaatgtcagatatcctccgggagctgctctgtgtctctgagaaggctgctaacattgcccgggcgtgcagacagcaggaagccctcttccagctgctgatcgaagaaaagaaagagggagaaaagaacaagaagtttgcagttgacttcaagacgctggctgatgtactggtacaggaagttataaaacagaatatggagaacaagtttccaggcttggaaaaaaatatttttggagaagaatccaatgagtttactaatgactggg

SEQ ID NO: 9888 - DNA, 812 bp, Homo sapiens
  source 1..812: mol_type = unassigned DNA; mol_type = unassigned DNA
cgtttctcgagggaaaggctgctgcctcctgctctgtcctcatccccggcttagggtgaaagaaagcactacttcaatattgctgctaagcatatgatcattctaagctgacggcccagagggtgggtgccaattccaccagcagctgcaactgaaaagcaaggttcagaaatgtcagatatcctccgggagctgctctgtgtctctgagaaggctgctaacattgcccgggcgtgcagacagcaggaagccctcttccagctgctgatcgaagaaaagaaagagggagaaaagaacaagaagtttgcagttgacttcaagacgctggctgatgtactggtacaggaagttataaaacagaatatggagaacaagtttccaggcttggaaaaaaatatttttggagaagaatccaatgagtttactaatgactggggggaaaagattaccttgaggttgtgttcaacagaggaggaaacagcagagcttcttagcaaagtcctcaatggtaacaaggtggcatctgaagcattagccagggttgttcatcaggatgttgcctttactgacccaactctggattccacagagatcaatgttccacaggacattttgggaatttgggtggaccccatagattcaacttatcagtatataaaaggttctgctgacattaaatccaaccagggaatcttcccctgtggacttcagtgtgtcaccattttaattggtgtctatgacatacagacaggggttcccctgatgggagtcatcaatcaaccttttgtgtcacgagatccaaacaccctcag

SEQ ID NO: 9889 - DNA, 797 bp, Homo sapiens
  source 1..797: mol_type = unassigned DNA; mol_type = unassigned DNA
gggaaaggctgctgcctcctgctctgtcctcatccccggcttaggtaacacgttttcctccttacgacacccaccacagggtccccgcgccgctgcccctcctccttggatctggggcccgggctggtgagcggcgcgcgccgtcgcctctccgcgggtagctgacggcccagagggtgggtgccaattccaccagcagctgcaactgaaaagcaaggttcagaaatgtcagatatcctccgggagctgctctgtgtctctgagaaggctgctaacattgcccgggcgtgcagacagcaggaagccctcttccagctgctgatcgaagaaaagaaagagggagaaaagaacaagaagtttgcagttgacttcaagacgctggctgatgtactggtacaggaagttataaaacagaatatggagaacaagtttccaggcttggaaaaaaatatttttggagaagaatccaatgagtttactaatgactggggggaaaagattaccttgaggttgtgttcaacagaggaggaaacagcagagcttcttagcaaagtcctcaatggtaacaaggtggcatctgaagcattagccagggttgttcatcaggatgttgcctttactgacccaactctggattccacagagatcaatgttccacaggacattttgggaatttgggtggaccccatagattcaacttatcagtatataaaaggttctgctgacattaaatccaaccagggaatcttcccctgtggacttcagtgtgtcaccattttaattggtgtctatgacat

SEQ ID NO: 9890 - DNA, 454 bp, Homo sapiens
  source 1..454: mol_type = unassigned DNA; mol_type = unassigned DNA
tgcctcctgctctgtcctcatccccggcttagggtgaaagaaagcactacttcaatattgctgctaagcatatgatcattctaagctgacggcccagagggtgggtgccaattccaccagcagctgcaactgaaaagcaaggttcagaaatgtcagatatcctccgggagctgctctgtgtctctgagaaggctgctaacattgcccgggcgtgcagacagcaggaagccctcttccagctgctgatcgaagaaaagaaagagggagaaaagaacaagaagtttgcagttgacttcaagacgctggctgatgtactggtacaggaagttataaaacagaatatggagaacaagtttccaggcttggaaaaaaatatttttggagaagaatccaatgagtttactaatgactgggcctcttccctcacttctgtcaagggctgaaaccagattaa

SEQ ID NO: 9891 - DNA, 480 bp, Homo sapiens
  source 1..480: mol_type = unassigned DNA; mol_type = unassigned DNA
tgcctcctgctctgtcctcatccccggcttagtccttcagagcttacatcatgtggccgagtttatatacctgattggcaaaacagagcctaagaaccagctctcctgtatcccaagcaaggctctttctaccgcacaccctgcaggcccatccaggcccatccagacaataaacactgacggcccagagggtgggtgccaattccaccagcagctgcaactgaaaagcaaggttcagaaatgtcagatatcctccgggagctgctctgtgtctctgagaaggctgctaacattgcccgggcgtgcagacagcaggaagccctcttccagctgctgatcgaagaaaagaaagagggagaaaagaacaagaagtttgcagttgacttcaagacgctggctgatgtactggtacaggaagttataaaacagaatatggagaacaaggggaaaagattaccttgaggttgtgttcaacagagg

SEQ ID NO: 9892 - DNA, 626 bp, Homo sapiens
  source 1..626: mol_type = unassigned DNA; mol_type = unassigned DNA
tgtcctcatccccggcttaggtaacacgttttcctccttacgacacccaccacagggtccccgcgccgctgcccctcctccttggatctggggcccgggctggtgagcggcgcgcgccgtcgcctctccgcggctgacggcccagagggtgggtgccaattccaccagcagctgcaactgaaaagcaaggttcagaaatgtcagatatcctccgggagctgctctgtgtctctgagaaggctgctaacattgcccgggcgtgcagacagcaggaagccctcttccagctgctgatcgaagaaaagaaagagggagaaaagaacaagaagtttgcagttgacttcaagacgctggctgatgtactggtacaggaagttataaaacagaatatggagaacaagtttccaggcttggaaaaaaatatttttggagaagaatccaatgagtttactaatgactggggggaaaagattaccttgaggttgtgttcaacagaggaggaaacagcagagcttcttagcaaagtcctcaatggtaacaaggtggcatctgaagcattagccagggttgttcatcaggatgttgcctttactgacccaactctggattccacagagatcaatgtt

SEQ ID NO: 9893 - DNA, 840 bp, Homo sapiens
  source 1..840: mol_type = unassigned DNA; mol_type = unassigned DNA
gtgagtcgatggcgccgggagggttcctcgcctctgcgcgccggcctgcgaggtccctgccccggcagcgaggccgcccccggccgggcccggccaggcatgcccggcatcgccgctgcagccagcgcggaggggagctcctgacggcccagagggtgggtgccaattccaccagcagctgcaactgaaaagcaaggttcagaaatgtcagatatcctccgggagctgctctgtgtctctgagaaggctgctaacattgcccgggcgtgcagacagcaggaagccctcttccagctgctgatcgaagaaaagaaagagggagaaaagaacaagaagtttgcagttgacttcaagacgctggctgatgtactggtacaggaagttataaaacagaatatggagaacaagtttccaggcttggaaaaaaatatttttggagaagaatccaatgagtttactaatgactggggggaaaagattaccttgaggttgtgttcaacagaggaggaaacagcagagcttcttagcaaagtcctcaatggtaacaaggtggcatctgaagcattagccagggttgttcatcaggatgttgcctttactgacccaactctggattccacagagatcaatgttccacaggacattttgggaatttgggtggaccccatagattcaacttatcagtatataaaaggttctgctgacattaaatccaaccagggaatcttcccctgtggacttcagtgtgtcaccattttaattggtgtctatgacatacagacaggggttcccctgatgggagtcatcaatcaaccttttgtgtcacgagatccaaacacc

SEQ ID NO: 9894 - DNA, 425 bp, Homo sapiens
  source 1..425: mol_type = unassigned DNA; mol_type = unassigned DNA
gggcccggccaggcatgcccggcatcgccgctgcagccagcgcggaggggagctcaaattgcttaaaagataattatgttatataaagtgatcaatgaaaacaaacgtcatcttcattttttaaagtccttcagagcttacatcatgtggccgagtttatatacctgattggcaaaacagagcctaagaaccagctctcctgtatcccaagcaaggctctttctaccgcacaccctgcaggcccatccaggcccatccagacaataaacactgacggcccagagggtgggtgccaattccaccagcagctgcaactgaaaagcaaggttcagaaatgtcagatatcctccgggagctgctctgtgtctctgagaaggctgctaacattgcccgggcgtgcagacagcaggaagccctcttccagc

SEQ ID NO: 9895 - DNA, 631 bp, Homo sapiens
  source 1..631: mol_type = unassigned DNA; mol_type = unassigned DNA
agattactgcagcatttgtgctgaaactcaccagggttaaattgatgagctttctgcgtgaaagaagggagtggtggtgatttccggagcttgtagccaggctgacggcccagagggtgggtgccaattccaccagcagctgcaactgaaaagcaaggttcagaaatgtcagatatcctccgggagctgctctgtgtctctgagaaggctgctaacattgcccgggcgtgcagacagcaggaagccctcttccagctgctgatcgaagaaaagaaagagggagaaaagaacaagaagtttgcagttgacttcaagacgctggctgatgtactggtacaggaagttataaaacagaatatggagaacaagtttccaggcttggaaaaaaatatttttggagaagaatccaatgagtttactaatgactggggggaaaagattaccttgaggttgtgttcaacagaggaggaaacagcagagcttcttagcaaagtcctcaatggtaacaaggtggcatctgaagcattagccagggttgttcatcaggatgttgcctttactgacccaactctggattccacagagatcaatgttccacaggacattttgggaatttgggtggaccccatag

SEQ ID NO: 9896 - DNA, 541 bp, Homo sapiens
  source 1..541: mol_type = unassigned DNA; mol_type = unassigned DNA
gctgaaactcaccagggttaaattgatgagctttctgcgtgaaagaagggagtggtggtgatttccggagcttgtagccagggtgattagctcgcctgagtgttattagggtgttataaggagtgtttcttggttattcaacagtgtagttagtatcgtttcttttaagaaaaaaaattgattttaacacttgaataaaagaaacactgctgatattgtttatcttgaaagctttcaaatcggactccttgagatcttcacgctactgttaagctgacggcccagagggtgggtgccaattccaccagcagctgcaactgaaaagcaaggttcagaaatgtcagatatcctccgggagctgctctgtgtctctgagaaggctgctaacattgcccgggcgtgcagacagcaggaagccctcttccagctgctgatcgaagaaaagaaagagggagaaaagaacaagaagtttgcagttgacttcaagacgctggctgatgtactggtacaggaagttataaaacagaatatggagaacaag

SEQ ID NO: 9897 - DNA, 670 bp, Homo sapiens
  source 1..670: mol_type = unassigned DNA; mol_type = unassigned DNA
cacattcttgtatttttccagctgacggcccagagggtgggtgccaattccaccagcagctgcaactgaaaagcaaggttcagaaatgtcagatatcctccgggagctgctctgtgtctctgagaaggctgctaacattgcccgggcgtgcagacagcaggaagccctcttccagctgctgatcgaagaaaagaaagagggagaaaagaacaagaagtttgcagttgacttcaagacgctggctgatgtactggtacaggaagttataaaacagaatatggagaacaagtttccaggcttggaaaaaaatatttttggagaagaatccaatgagtttactaatgactggggtaagtataagaatcttaatgtgtctttgtaatttaattatcatatggtattctagtctctagtttataccatgaactaaatgtttggaagccacttactgtaaacaacataatatatttgaatgttaaggttcattcaatttctacctcagaatatcatgccatttaacttaagtagagagatgtggtatcttagaataatttagcaagtccatgtatcattttagatataaatctgtggcatttaagtaacttataactcaagctttgggaaaattgcatggccctttgggaatctaatgtaagttattaatgcccca

SEQ ID NO: 9898 - DNA, 832 bp, Homo sapiens
  source 1..832: mol_type = unassigned DNA; mol_type = unassigned DNA
ttaaaatgtacagttaagttcttattgattatagttaccctattgtgctatcaaatagtaggtctttttttttcacccattggaaggaggcttttccatctcacattgtactagtcctctgattagtagtatttctaaaataatcccaccaattattctggttattactttttcaatgcttttgataagtaacaaatatttgaatgcctgttatatacaaattgctatgccacaggaactatagacacatcctctcccttcaagagttctcacagtcaggaaaatgaaacacaagcaatttaaaagtaaagtacaagaggccaaataacaattcaatacagtgacatccaaaggtaaaaaattattggttaccaaatcagtagaagagagaagtcatatggaacagagtcttctaaatgatctttacctgaatccaaacacatttgtttcctttttcagattcaacttatcagtatataaaaggttctgctgacattaaatccaaccagggaatcttcccctgtggacttcagtgtgtcaccattttaattggtgtctatgacatacagacaggggttcccctgatgggagtcatcaatcaaccttttgtgtcacgagatccaaacaccctcaggtggaaaggacagtgctattggggcctttcttacatggggaccaacatgcattcactacagctcaccatctctagaagaaacggcagtgaaacacacactggaaacaccggctctgaggcagcattctcccccagtttttcagccgtaattagtacaagtgaaaaggagactatcaaagctgcattgtcacgtgtgtg

SEQ ID NO: 9899 - DNA, 2162 bp, Homo sapiens
  source 1..2162: mol_type = unassigned DNA; mol_type = unassigned DNA
gaatggaggaggaagatttaaaagtgaattcgtgggcggcgacaaggaaacagcagccgtggccaagctgaccccagagcccttcccttcctggccctccctctgaatcatcgcgctccacttgtgacgtcgcggacgcccggctcgggcaggcgtggggggcccgcgcgtcccgggagccccgaggcggcagcgcgcgtttccacgccgcggtcccgcgggaaagccgggggcggcggcctggctgaggccaagctcggatccggtgccgagccaagcggggccgtgcgtcgccggggcttcgccttcgctcgcgtgacctccgccgtcctccccaaccctcgtcctctggccgcgcctgcggccgcacgcccagcgcccctcgcctaacctcgcgcccgggccgcgcctcctcctcctcctgctccccgccgcttccgtttctcgagggaaaggctgctgcctcctgctctgtcctcatccccggcttagtccttcagagcttacatcatgtggccgagtttatatacctgattggcaaaacagagcctaagaaccagctctcctgtatcccaagcaaggctctttctaccgcacaccctgcaggcccatccaggcccatccagacaataaacactgacggcccagagggtgggtgccaattccaccagcagctgcaactgaaaagcaaggttcagaaatgtcagatatcctccgggagctgctctgtgtctctgagaaggctgctaacattgcccgggcgtgcagacagcaggaagccctcttccagctgctgatcgaagaaaagaaagagggagaaaagaacaagaagtttgcagttgacttcaagacgctggctgatgtactggtacaggaagttataaaacagaatatggagaacaagtttccaggcttggaaaaaaatatttttggagaagaatccaatgagtttactaatgactggggggaaaagattaccttgaggttgtgttcaacagaggaggaaacagcagagcttcttagcaaagtcctcaatggtaacaaggtggcatctgaagcattagccagggttgttcatcaggatgttgcctttactgacccaactctggattccacagagatcaatgttccacaggacattttgggaatttgggtggaccccatagattcaacttatcagtatataaaaggttctgctgacattaaatccaaccagggaatcttcccctgtggacttcagtgtgtcaccattttaattggtgtctatgacatacagacaggggttcccctgatgggagtcatcaatcaaccttttgtgtcacgagatccaaacaccctcaggtggaaaggacagtgctattggggcctttcttacatggggaccaacatgcattcactacagctcaccatctctagaagaaacggcagtgaaacacacactggaaacaccggctctgaggcagcattctcccccagtttttcagccgtaattagtacaagtgaaaaggagactatcaaagctgcattgtcacgtgtgtgtggagatcgcatatttggggcagctggggctggttataagagcctatgtgttgtccaaggcctcgttgacatttacatcttttcagaagataccacattcaaatgggactcttgtgctgctcatgccatactgagggccatgggtgggggaatagtagacttgaaagaatgcttagaaagaaatccagaaacagggcttgatttgccacagttggtgtaccacgtggaaaatgagggtgctgctggggtggatcggtgggccaacaagggaggactcattgcatacagatccaggaagcggctggagacattcctgagcctcctggtccaaaacctggcacctgcagagacgcatacctagaggaactctaaccccggtgtacctgtataaactgaactgtgaaactgtttcggttatctctgtcttttgaggatggctttgtcctgttgctggttaacattcaccttcctcttttgaggagtatttttccattatgtattcataataatgttaatttcaataaatgacattcatgcagcaattatattggtgtatgaaattcttacagtgaatattgtgctgttagtgctgcttgaaacatttcaataaaatattgaccagg

SEQ ID NO: 9900 - DNA, 8831 bp, Homo sapiens
  source 1..8831: mol_type = unassigned DNA; mol_type = unassigned DNA
cacacgctcgcaagcgaacgcaggaaagtcaggctaaaagtgtctgctgctgctgccgccccccactccgcctccgggagagaatacaaagaaatggtgttacctggcaagaggtcttctgtcttttatgaaaaattagacaaaggctttacaggaggcatagtactggaaatctgctcctgatgaggtctcagaaagcttccactcgtggtggaaggcaaaggaggagcaggcacatcacatgagccttgaaaccagcgaaacaataatcaaagagcagttctgtcaaagaaaacaacataaatcaggtacagaatttcagagtgggatatcagatctttagtgtgaagatacatctacattaaaccaggaatcactagaactgacatttggacaagaaaatttggaaaattttaaaactgtgaaggttgatcatggaaattaaagaggaaggggcatcagaagaagggcagcactttcttcctacagcccaggccaatgatcccggggactgtcagttcacaagtatccagaagactccaaatgaaccgcagttggaattcatccttgcatgcaaggatctcgtggctcctgtccgtgatcgtaaactgaatacactggtgcagatctccgtaatccaccccgtggagcagagtctgacaagatactccagcaccgaaattgtggagggaacaagggacccactgtttttgactggtgtcacattcccatctgagtatcccatctatgaggagaccaaaataaaactaacagtctatgatgtcaaggataagtctcatgacaccgttcgaaccagtgtcctaccagaacataaggatcccccgccagaagttgggcgaagtttcttgggctatgccagttttaaagtgggagagctgctgaagtcaaaggagcaattgctggtcctgagcctgagaacttcagatggtggcaaagtggttggcaccatagaagtcagtgtcgtgaagatgggggagattgaggatggggaagccgaccacatcaccacagatgtacagggacaaaagtgtgccctggtatgtgaatgtacagccccggaaagtgtgagcggaaaagataacttaccttttttgaattcagtgttaaagaacccagtatgtaaattatatagatttcccacatctgacaataagtggatgcgaattcgagagcagatgtcagagagcattctttcctttcatattcctaaggaattgatttcccttcacattaaagaagatttgtgcagaaaccaggagataaaagaacttggtgagctttctccacattgggacaatctgcgaaaaaatgtccttactcactgtgatcaaatggtgaatatgtaccaagacattctgacagaacttagcaaggaaacagggtcctctttcaaatcaagcagcagcaaaggagagaaaacattagaatttgttccaataaatctacatctgcaaagaatgcaggtacacagccctcacttgaaagatgctctctacgatgtcatcactgtgggagccccagctgcccattttcagggatttaagaatggtggtcttcggaagctactccatagatttgaaacagaaagaagaaataccggataccagtttatttactattcacctgaaaacacagccaaagcaaaggaagttctcagcaacatcaatcaactacaacctcttatagcaacccatgcagacctactgcttaattctgcaagccagcattctccagacagcttgaagaattctttaaagatgctttcagaaaaaacagagctttttgtacatgccttcaaggatcaacttgtcaggagtgctcttttagcactctacactgcaaggccaggaggcattcttaagaagccaccctctcctaagagcagcacagaggagagcagtccccaagaccaacccccagtgatgagagggcaggactccataccacatcattcagactatgatgaggaagagtgggacagggtgtgggccaatgtggggaagagcctgaactgcattattgctatggtggacaaactgattgaaagagatggtggcagtgaaggcagtggcggcaacaatgatggagaaaaggaaccttcattaacagatgccattccctctcacccaagagaggactggtatgaacagttgtatcccctcatccttaccctgaaggactgcatgggagaagtggtgaaccgagccaagcagtccctgacatttgtgctccttcaggaacttgcgtacagcttgccccagtgtctgatgctgacgctaagaagagacatcgtcttcagccaagcacttgctggattggtttgtggttttatcatcaaattacagacaagtctgtatgacccaggcttcctacagcagcttcacacagtggggttgatagtacaatatgaaggactgctaagtacatacagcgatgaaattggaatgctagaggacatggccgttggcatttccgatttaaagaaagttgcatttaaaataattgaagccaaatccaatgatgtgttgccagttataacaggaagacgagaacattacgtggtagaggtcaagcttccagccagaatgtttgagtcactacctctacagattaaagaaggacagttgcttcatgtgtatccagtactttttaatgttggaatcaatgaacagcaaactctggctgaaaggtttggagatgtctctttgcaagaaagtattaatcaggaaaacttcgaacttctacaagaatattacaagatatttatggaaaagatgcctcctgattatatttcacattttcaggaacaaaatgatttaaaagcattgctagaaaatctccttcaaaatatccaatccaaaaaaagaaagaatgtagaaattatgtggctggctgcaacgatttgccgcaaactgaatggtattcgtttcacctgttgtaaaagtgccaaagacaggacatcgatgtcagtgacacttgaacaatgctcaatcttgagagatgagcaccagttacacaaggacttctttatccgagcgctggattgcatgagaagagaaggatgccgcatagagaatgtactgaagaatatcaaatgcagaaagtatgctttcaacatgctacagctgatggctttccccaagtactacagacctccagaggggacttatggaaaagctgacacctaagtttaccaacatgttaataaacaggaacacaaatacatttcagttggataatcttcaccttggtcttttttgtttgtttttattgtcatgaatttgtggtgggggagatgatcacagatgtttcccaaaatctaggaactacttcaattcatcatcagcatattgctctgaaagaaatccattttaaaaaatcttacatgattcagtactgtcatttctagttctaagcttctatgtgttgagcctagctgattgagattggttcacaaagtgtaaatttcattcatgagtatttaaatgtttctgaggaaacatggatcatttcaataggactaggggtgattcacagagcaccactctccaaccaaatggaagagaggagagggggaaaaggaacatattttttttgtgatacaacttaatagcctatgagaacacagtcaacctgagaatcaatgtaagggatttaaaaaaaatgtgtagccactcaattaggtagagttaactcatgatctggaatactgaggcagtttgcaggtatgttccacaatgatctctatcatccagtcaaggtgtgactcctcccttgcaacaggcatatgcatggagtgagtaaagtggtcaacagacctttcaaaaccatggcatcttttcagaactctgacttgggttgtgtgatctagctgtgaatgtagcaatatagaacgtttaatagaatgataagcaaaacactgcaatgatctaaaattacaaataaaataaaaatgaacaacattttgatacccaaaatgaaaattcccatcagcctgaactttatgttgtgaagttcatgaatgtcagtgaggtatctctgagatgtttcttagcagtcatcctggtgtaagcatgcagttatggcataggtttgtgtgtgttaataagcctttaaaacatatgcaaccacaacaaatgataaagtaaaacaattattttctgttgccctgaatatcaaacttgcccttgcccttactcagcaaaataacatttataagttttccaaaatcccaaagtagaagtttccttaaaaaaatcatcttgtataataccagtattcaaacatgggtaaggttaatcacccccaatcactcaggagatagttgcagaatttgaattacaatctcttcttactttcctagcctgtggcttgtcacttctccaaattgccatgctaaatatgcatgaaaattgagggagaatgctagttaaaaagaaattaggatttatcactggaattgaaactaagagtacaaaagtctgaacgaatgaaacttttctccaaattttacaaattcttgttcctttctcattagaagagcatgctatccaaagcataaatctcccttgaaaataacagaggcttcttaagccctctcttagctatgatcaatggatgatattatgcttcccatagctaatgtgatagctccttgcctaggattcctgttgaaataaggattctagccccatgttaagtttttcaaattactacaaattttagataagcatttggagctttttatactagaattatcaattttttattttagctaattacctgtgggcattatacttgaggcaggtaccaaactacttacagcctttttaatgaaaatgtgctgtgtactttgaatccattcatagacaaaattaccttgatgttctcttaactcattctttattttagtgattaaatacaacctttgagttgttcaatatcatttgaaaatggtaggatttgtggttattttcattaccctattagatttaagataggctgggatgacagaggcctccttgaatagctatgaagcctcattcagcatatcaaatggtagtctgagttctaagaaaccttaagtaatttatcattctgtaaatactcttataagcaataatttttatttgtatttttgaaaacaaactacttaaatatggaaaaatattaactggaaagccagcagtagggttttctatttttaaaagacatttcaaggatttcctgtaatcccagcactttgggagccaaggtggatagatcacctgaggtcaggaattggagatcagcctggccaacatggtgaaaccccatctctactaaagatacaaaaattagctggatgtggtggcacacacgtgtaatcccagctacttgggaggctgaggcaagagaatcgcttgaaccccggaggcggaggttgcagtgagctgagatcatgccattgcactccagcctgggtgaaaagagcgaaactccatctttaaataagtaaataaatgaataatatagaagtctcaaattatagtgcttactgtaatacaaatgcttatgaattttcattcattaccatagtcatctgcatttccttatagaaagcctgtactggtgcaaacttctaaaagtggatttcatcaagaaaatgtgtttcatagagacaacaatattgcttttttcctgagaggcagttcattcttaaacaaccacttcactatttcttaagttattaaggctaaatcaaagagcaaatgttaaagtgtttaaatctctcttgaacaaacacagccacagtcatgctattctatctatattttcacttaaaagatacaccagcagacctattttaggaggtcatattgagccaaaaaatgaactgagcaaatgacatttccaaactctttttttgctcaaaaataatatgttcccctttgatattaaatgcagatatcaattctggattagctatttactgagccctaggaaaaacatatttaaagacaaggaaaccattcatttacatctcatatcattgctttttgcttttaaatatcgccttgaggtttgtctacactctgccaaaacaatccctgaacataagtttggtcagcctcataattcagtgagtcgagcaaccatttgttccaagtgataaattgtactaaatgacaaactgcccaatcagggcagagctccatggacccagcctccagcccttattttataagactaacccctcttctgaaaaactctgaaggcttaaaagctagcatttggatggaggatacttcctttttatccttcagctatgtatggcactttacataaaataagaggtaaaaaaggagagaaactgatgtgtataaagtaatgcctttcttcccaagcaaatcaaacctctccctatgtaaaagttgatagtgtaccaagagacacaataccactggtgggctggaactagctcgttctgatgcataaaagttgataattaaagtaccagaaattttgtaagctagttgttaaacattaccattattaaatatgaaattataaaacacagtggaatacattaaaaaccaatgtaataatcaaaacataccacttcccaattattttactaccttatactatttattagtactcttgagtctatttaggtctattacatctttacagtgaaaacaggatacaatattgtgctactgtgggtctcttcctgactgcagattcagtaacatggtgttcgtagcttgaaactgtccacagtgggagtatttaacaccatagaaactggctggcaaatgctacaaactagcaattttaattcctggaaaggcaattgttgagcatttaccagcacacaatgaatgccatattcttttttttttattaggaaataaattattggaggcagtataaaattatttaaaaagtatcaaatgcaatcccttatcttcagatggctataattttggttatataaatgttttggtttttaccttctttaaagactcctattaggttaaaagtcatatttgatgactatattttattcataattaaattattaaatcaccttttctcctgataatgctttgccagagaattcttagcaattcaactgtagtctaagcaataactcagggctaaattcagggaactgttagcccaatcagatatcactaaaaatgtacttcaccatctattttggagtttataattttggcatttgctaaaagtaggaaaaacagtaacatattactgtgcccagattctaataaatatagctcaattgaaaccaaaactgttacattaaacaaattacactctggcactatgctaaatcaccacagatgttttaggtgtttgatttccaagcaggatggtatatcatttgtttggttcaatatatgaggcaccatttgtagtcttttaggaaataaattagcttttatcacagatttaggaaacttgtctaaaaaaactgtgatcatcagttacagagggaaggaaacatattgaacacaaggcatcatagtagctggaggccttaaaaattatgcacgaccaaaaagaatgatttggtgagagatgtgtagctgattgacaattttagtgtgaattcatattcatttaacccagcagcaatctacataagctatgctttttcccacctgtatttatgtttcttagcttataaagtcccaatatattatatcttttgttgctttggcagttttaatttagagctctgcgttcacagagatgccacctatagcaaaaactatctttaagaattggaaaataaaatgaatgttttagataaaatattgcaagccattatgtgtagagttaatgtatggaaatttgcatttgtttttctgaatcatggtgtacattaatcactcattgaattctatttctaagcaaataagagaatcaaacatttctaaaaggaacatatgtcttgctattaataacaaggagacaggaaaaatagtaaggtaatataagcaaaaaaaaaaatgtaatgaatttagctatcctaaattggaatttttacagattgcatgcatacttagaattttaaatttttaaaagatttacaattgagtatggtacccacagagagtgagtaccaagggaaggaagacctaatacaagtgatgttgcctgataaatcacatcttgccaaaaaaaatatattttagtaaatacagttctttaggaagaaaaatgttgccctttcacactcacagtgtaaatacattcataatattccttcaatcatctaaattaccgccaggtcatgaaaggacgcgatcaatgatgacctattgcactcacaggtaacattgactcaaattttggcaatattgctatattatctagataattcttgtgatgtttttatgtcactatcaacattaaaaatattttgttaaacaactatgaaactttcaaaagtttgcatataactgtatgggcactctcatttcactgcatacatacaatactttgtatacacatacttctcgtgtggatattttataattttatttaatctaacatttaacttttaggtttttgtggtactcatctgaaaggttggcatttgttttctttttatgttatatatgtattttagatgaatcaataatgtgtattcctagaaattttttctaggcataaatagatcattttatgttggcatttaagagatatcatttttgttttattgttctgtgtaaaccatattcattgtacactgtgtgtatatttttgtttaaataaatgatttttatttttta

SEQ ID NO: 9901 - DNA, 3165 bp, Homo sapiens
  source 1..3165: mol_type = unassigned DNA; mol_type = unassigned DNA
cccaagaggggtcttactcatccttttccattttggagaggttctgctgactctacattaagcccagacagggtggtgtcctgctttgctcctttctgctctctgcgttcctctgctgccttgatggattctgatgtggttgctcagatgatcagcctgcaggagccttgaaaccagcgaaacaataatcaaagagcagttctgtcaaagaaaacaacataaatcaggtacagaatttcagagtgggatatcagatctttagtgtgaagatacatctacattaaaccaggaatcactagaactgacatttggacaagaaaatttggaaaattttaaaactgtgaaggttgatcatggaaattaaagaggaaggggcatcagaagaagggcagcactttcttcctacagcccaggccaatgatcccggggactgtcagttcacaagtatccagaagactccaaatgaaccgcagttggaattcatccttgcatgcaaggatctcgtggctcctgtccgtgatcgtaaactgaatacactggtgcagatctccgtaatccaccccgtggagcagagtctgacaagatactccagcaccgaaattgtggagggaacaagggacccactgtttttgactggtgtcacattcccatctgagtatcccatctatgaggagaccaaaataaaactaacagtctatgatgtcaaggataagtctcatgacaccgttcgaaccagtgtcctaccagaacataaggatcccccgccagaagttgggcgaagtttcttgggctatgccagttttaaagtgggagagctgctgaagtcaaaggagcaattgctggtcctgagcctgagaacttcagatggtggcaaagtggttggcaccatagaagtcagtgtcgtgaagatgggggagattgaggatggggaagccgaccacatcaccacagatgtacagggacaaaagtgtgccctggtatgtgaatgtacagccccggaaagtgtgagcggaaaagataacttaccttttttgaattcagtgttaaagaacccagtatgtaaattatatagatttcccacatctgacaataagtggatgcgaattcgagagcagatgtcagagagcattctttcctttcatattcctaaggaattgatttcccttcacattaaagaagatttgtgcagaaaccaggagataaaagaacttggtgagctttctccacattgggacaatctgcgaaaaaatgtccttactcactgtgatcaaatggtgaatatgtaccaagacattctgacagaacttagcaaggaaacagggtcctctttcaaatcaagcagcagcaaaggagagaaaacattagaatttgttccaataaatctacatctgcaaagaatgcaggtacacagccctcacttgaaagatgctctctacgatgtcatcactgtgggagccccagctgcccattttcagggatttaagaatggtggtcttcggaagctactccatagatttgaaacagaaagaagaaataccggataccagtttatttactattcacctgaaaacacagccaaagcaaaggaagttctcagcaacatcaatcaactacaacctcttatagcaacccatgcagacctactgcttaattctgcaagccagcattctccagacagcttgaagaattctttaaagatgctttcagaaaaaacagagctttttgtacatgccttcaaggatcaacttgtcaggagtgctcttttagcactctacactgcaaggccaggaggcattcttaagaagccaccctctcctaagagcagcacagaggagagcagtccccaagaccaacccccagtgatgagagggcaggactccataccacatcattcagactatgatgaggaagagtgggacagggtgtgggccaatgtggggaagagcctgaactgcattattgctatggtggacaaactgattgaaagagatggtggcagtgaaggcagtggcggcaacaatgatggagaaaaggaaccttcattaacagatgccattccctctcacccaagagaggactggtatgaacagttgtatcccctcatccttaccctgaaggactgcatgggagaagtggtgaaccgagccaagcagtccctgacatttgtgctccttcaggaacttgcgtacagcttgccccagtgtctgatgctgacgctaagaagagacatcgtcttcagccaagcacttgctggattggtttgtggttttatcatcaaattacagacaagtctgtatgacccaggcttcctacagcagcttcacacagtggggttgatagtacaatatgaaggactgctaagtacatacagcgatgaaattggaatgctagaggacatggccgttggcatttccgatttaaagaaagttgcatttaaaataattgaagccaaatccaatgatgtgttgccagttataacaggaagacgagaacattacgtggtagaggtcaagcttccagccagaatgtttgagtcactacctctacagattaaagaaggacagttgcttcatgtgtatccagtactttttaatgttggaatcaatgaacagcaaactctggctgaaaggtttggagatgtctctttgcaagaaagtattaatcaggaaaacttcgaacttctacaagaatattacaagatatttatggaaaagatgcctcctgattatatttcacattttcaggaacaaaatgatttaaaagcattgctagaaaatctccttcaaaatatccaatccaaaaaaagaaagaatgtagaaattatgtggctggctgcaacgatttgccgcaaactgaatggtattcgtttcacctgttgtaaaagtgccaaagacaggacatcgatgtcagtgacacttgaacaatgctcaatcttgagagatgagcaccagttacacaaggacttctttatccgagcgctggattgcatgagaagagaaggatgccgcatagagaatgtactgaagaatatcaaatgcagaaagtatgctttcaacatgctacagctgatggctttccccaagtactacagacctccagaggggacttatggaaaagctgacacctaagtttaccaacatgttaataaacaggaacacaaataca

SEQ ID NO: 9902 - DNA, 4334 bp, Homo sapiens
  source 1..4334: mol_type = unassigned DNA; mol_type = unassigned DNA
cgcacacgctcacacgctcgcaagcgaacgcaggaaagtcaggctaaaagtgtctgctgctgctgccgccccccactccgcctccgggagagaatacaaagaaatggtgttacctggcaagaggtcttctgtcttttatgaaaaattagacaaagagccttgaaaccagcgaaacaataatcaaagagcagttctgtcaaagaaaacaacataaatcaggtacagaatttcagagtgggatatcagatctttagtgtgaagatacatctacattaaaccaggaatcactagaactgacatttggacaagaaaatttggaaaattttaaaactgtgaaggttgatcatggaaattaaagaggaaggggcatcagaagaagggcagcactttcttcctacagcccaggccaatgatcccggggactgtcagttcacaagtatccagaagactccaaatgaaccgcagttggaattcatccttgcatgcaaggatctcgtggctcctgtccgtgatcgtaaactgaatacactggtgcagatctccgtaatccaccccgtggagcagagtctgacaagatactccagcaccgaaattgtggagggaacaagggacccactgtttttgactggtgtcacattcccatctgagtatcccatctatgaggagaccaaaataaaactaacagtctatgatgtcaaggataagtctcatgacaccgttcgaaccagtgtcctaccagaacataaggatcccccgccagaagttgggcgaagtttcttgggctatgccagttttaaagtgggagagctgctgaagtcaaaggagcaattgctggtcctgagcctgagaacttcagatggtggcaaagtggttggcaccatagaagtcagtgtcgtgaagatgggggagattgaggatggggaagccgaccacatcaccacagatgtacagggacaaaagtgtgccctggtatgtgaatgtacagccccggaaagtgtgagcggaaaagataacttaccttttttgaattcagtgttaaagaacccagtatgtaaattatatagatttcccacatctgacaataagtggatgcgaattcgagagcagatgtcagagagcattctttcctttcatattcctaaggaattgatttcccttcacattaaagaagatttgtgcagaaaccaggagataaaagaacttggtgagctttctccacattgggacaatctgcgaaaaaatgtccttactcactgtgatcaaatggtgaatatgtaccaagacattctgacagaacttagcaaggaaacagggtcctctttcaaatcaagcagcagcaaaggagagaaaacattagaatttgttccaataaatctacatctgcaaagaatgcaggtacacagccctcacttgaaagatgctctctacgatgtcatcactgtgggagccccagctgcccattttcagggatttaagaatggtggtcttcggaagctactccatagatttgaaacagaaagaagaaataccggataccagtttatttactattcacctgaaaacacagccaaagcaaaggaagttctcagcaacatcaatcaactacaacctcttatagcaacccatgcagacctactgcttaattctgcaagccagcattctccagacagcttgaagaattctttaaagatgctttcagaaaaaacagagctttttgtacatgccttcaaggatcaacttgtcaggagtgctcttttagcactctacactgcaaggccaggaggcattcttaagaagccaccctctcctaagagcagcacagaggagagcagtccccaagaccaacccccagtgatgagagggcaggactccataccacatcattcagactatgatgaggaagagtgggacagggtgtgggccaatgtggggaagagcctgaactgcattattgctatggtggacaaactgattgaaagagatggtggcagtgaaggcagtggcggcaacaatgatggagaaaaggaaccttcattaacagatgccattccctctcacccaagagaggactggtatgaacagttgtatcccctcatccttaccctgaaggactgcatgggagaagtggtgaaccgagccaagcagtccctgacatttgtgctccttcaggaacttgcgtacagcttgccccagtgtctgatgctgacgctaagaagagacatcgtcttcagccaagcacttgctggattggtttgtggttttatcatcaaattacagacaagtctgtatgacccaggcttcctacagcagcttcacacagtggggttgatagtacaatatgaaggactgctaagtacatacagcgatgaaattggaatgctagaggacatggccgttggcatttccgatttaaagaaagttgcatttaaaataattgaagccaaatccaatgatgtgttgccagttataacaggaagacgagaacattacgtggtagaggtcaagcttccagccagaatgtttgagtcactacctctacagattaaagaaggacagttgcttcatgtgtatccagtactttttaatgttggaatcaatgaacagcaaactctggctgaaaggtttggagatgtctctttgcaagaaagtattaatcaggaaaacttcgaacttctacaagaatattacaagatatttatggaaaagatgcctcctgattatatttcacattttcaggaacaaaatgatttaaaagcattgctagaaaatctccttcaaaatatccaatccaaaaaaagaaagaatgtagaaattatgtggctggctgcaacgatttgccgcaaactgaatggtattcgtttcacctgttgtaaaagtgccaaagacaggacatcgatgtcagtgacacttgaacaatgctcaatcttgagagatgagcaccagttacacaaggacttctttatccgagcgctggattgcatgagaagcagacaaacccagggagcactgaatgaatccgatgatcctgaaacaggctgtctaactgataacaagccaacttctcgacacttctatcctgtcgccttgctgcttgtcagctcacacctgctagttgtgtggcttattttaagtctggcgttactcttagccaaataccaataagttttatgttgtattcctttttcttttctacaaatgacaatgaactttaaattatggggacaatgctgtaatatttttacattttcaaattcacagaatttaaaaaatgttaaattgtgtttagtttgtttttcctaaaatctaaaaaacaaaaagtactatgcattaggtggattattttgctcttttgttcatggaaaggtgtttcccactgttaactagctcaagaagaatttttaaattactgtctttggaataagacaaagaacagaatcctgaaagcttgaagttctgaacctcctgtcctcatcccactaaatttattaaagaaattaagactgaaatttgcacaaacactgaaaccctgagacaagttctagagatgtgggaggttgcagactttatttccactgtgctaatatcatagatgccatctgctgatagaaattttttttaacctgttttacttctttgctgcaattaactcttttctgtcaagtaactttatggagagaatggctatttatgttttgtaattaaattacctgtttgtatctcttgtttgggttgatttggctttcagaggacttttctattctttttaacaaggtcttgtttgtgtcttgatgtaccattcccagcacttgtgacttttgtactgtccgtggacaagcactcttcctttataaagctgagacttggcccaggctgttcagaaagccattttctctcttccttgcacagctaaaataataaaatagagatgaaatttttctttaaaaatctatagggccagacttaataaattaaatgccttatttctagaacctgcatccttagggctacatatagattttaatgtgttttaaagagactgagaaattaatttgtggaaatgttataaaaaggcagatatatttatgaaactaaagtggagctgtattgtggagcaaattatatttaaagagtttattaaattttaaatgttaagagtaaagagacttaagtcatctctttcagagggcaataatggtattgggcctggcctaggatttaattttgtaagatgtatcatcacttgtggaaaaaaaaaatgtagagttgaatctttgttatttttacttggatggttgctgcaactctgcattaaacaaataaagcatatttattta

SEQ ID NO: 9903 - DNA, 2265 bp, Homo sapiens
  source 1..2265: mol_type = unassigned DNA; mol_type = unassigned DNA
atatctggaatacaaagttgttgctgccagtgatttgaggaattctaataagaggaacaacagcattgcgaagtttcttgggctatgccagttttaaagtgggagagctgctgaagtcaaaggagcaattgctggtcctgagcctgagaacttcagatggtggcaaagtggttggcaccatagaagtcagtgtcgtgaagatgggggagattgaggatggggaagccgaccacatcaccacagatgtacagggacaaaagtgtgccctggtatgtgaatgtacagccccggaaagtgtgagcggaaaagataacttaccttttttgaattcagtgttaaagaacccagtatgtaaattatatagatttcccacatctgacaataagtggatgcgaattcgagagcagatgtcagagagcattctttcctttcatattcctaaggaattgatttcccttcacattaaagaagatttgtgcagaaaccaggagataaaagaacttggtgagctttctccacattgggacaatctgcgaaaaaatgtccttactcactgtgatcaaatggtgaatatgtaccaagacattctgacagaacttagcaaggaaacagggtcctctttcaaatcaagcagcagcaaaggagagaaaacattagaatttgttccaataaatctacatctgcaaagaatgcaggtacacagccctcacttgaaagatgctctctacgatgtcatcactgtgggagccccagctgcccattttcagggatttaagaatggtggtcttcggaagctactccatagatttgaaacagaaagaagaaataccggataccagtttatttactattcacctgaaaacacagccaaagcaaaggaagttctcagcaacatcaatcaactacaacctcttatagcaacccatgcagacctactgcttaattctgcaagccagcattctccagacagcttgaagaattctttaaagatgctttcagaaaaaacagagctttttgtacatgccttcaaggatcaacttgtcaggagtgctcttttagcactctacactgcaaggccaggaggcattcttaagaagccaccctctcctaagagcagcacagaggagagcagtccccaagaccaacccccagtgatgagagggcaggactccataccacatcattcagactatgatgaggaagagtgggacagggtgtgggccaatgtggggaagagcctgaactgcattattgctatggtggacaaactgattgaaagagatggtggcagtgaaggcagtggcggcaacaatgatggagaaaaggaaccttcattaacagatgccattccctctcacccaagagaggactggtatgaacagttgtatcccctcatccttaccctgaaggactgcatgggagaagtggtgaaccgagccaagcagtccctgacatttgtgctccttcaggaacttgcgtacagcttgccccagtgtctgatgctgacgctaagaagagacatcgtcttcagccaagcacttgctggattggtttgtggttttatcatcaaattacagacaagtctgtatgacccaggcttcctacagcagcttcacacagtggggttgatagtacaatatgaaggactgctaagtacatacagcgatgaaattggaatgctagaggacatggccgttggcatttccgatttaaagaaagttgcatttaaaataattgaagccaaatccaatgatgtgttgccagttataacaggaagacgagaacattacgtggtagaggtcaagcttccagccagaatgtttgagtcactacctctacagattaaagaaggacagttgcttcatgtgtatccagtactttttaatgttggaatcaatgaacagcaaactctggctgaaaggtttggagatgtctctttgcaagaaagtattaatcaggaaaacttcgaacttctacaagaatattacaagatatttatggaaaagatgcctcctgattatatttcacattttcaggaacaaaatgatttaaaagcattgctagaaaatctccttcaaaatatccaatccaaaaaaagaaagaatgtagaaattatgtggctggctgcaacgatttgccgcaaactgaatggtattcgtttcacctgttgtaaaagtgccaaagacaggacatcgatgtcagtgacacttgaacaatgctcaatcttgagagatgagcaccagttacacaaggacttctttatcc

SEQ ID NO: 9904 - DNA, 2953 bp, Homo sapiens
  source 1..2953: mol_type = unassigned DNA; mol_type = unassigned DNA
aaaggataaattaaagtcgagatggacctgaggaagaccacatgagggctgatggggaagaggcatttgaagagccttgaaaccagcgaaacaataatcaaagagcagttctgtcaaagaaaacaacataaatcaggtacagaatttcagagtgggatatcagatctttagtgtgaagatacatctacattaaaccaggaatcactagaactgacatttggacaagaaaatttggaaaattttaaaactgtgaaggttgatcatggaaattaaagaggaaggggcatcagaagaagggcagcactttcttcctacagcccaggccaatgatcccggggactgtcagttcacaagtatccagaagactccaaatgaaccgcagttggaattcatccttgcatgcaaggatctcgtggctcctgtccgtgatcgtaaactgaatacactggtgcagatctccgtaatccaccccgtggagcagagtctgacaagatactccagcaccgaaattgtggagggaacaagggacccactgtttttgactggtgtcacattcccatctgagtatcccatctatgaggagaccaaaataaaactaacagtctatgatgtcaaggataagtctcatgacaccgttcgaaccagtgtcctaccagaacataaggatcccccgccagaagttgggcgaagtttcttgggctatgccagttttaaagtgggagagctgctgaagtcaaaggagcaattgctggtcctgagcctgagaacttcagatggtggcaaagtggttggcaccatagaagtcagtgtcgtgaagatgggggagattgaggatggggaagccgaccacatcaccacagatgtacagggacaaaagtgtgccctggtatgtgaatgtacagccccggaaagtgtgagcggaaaagataacttaccttttttgaattcagtgttaaagaacccagtatgtaaattatatagatttcccacatctgacaataagtggatgcgaattcgagagcagatgtcagagagcattctttcctttcatattcctaaggaattgatttcccttcacattaaagaagatttgtgcagaaaccaggagataaaagaacttggtgagctttctccacattgggacaatctgcgaaaaaatgtccttactcactgtgatcaaatggtgaatatgtaccaagacattctgacagaacttagcaaggaaacagggtcctctttcaaatcaagcagcagcaaaggagagaaaacattagaatttgttccaataaatctacatctgcaaagaatgcagatgctctctacgatgtcatcactgtgggagccccagctgcccattttcagggatttaagaatggtggtcttcggaagctactccatagatttgaaacagaaagaagaaataccggataccagtttatttactattcacctgaaaacacagccaaagcaaaggaagttctcagcaacatcaatcaactacaacctcttatagcaacccatgcagacctactgcttaattctgcaagccagcattctccagacagcttgaagaattctttaaagatgctttcagaaaaaacagagctttttgtacatgccttcaaggatcaacttgtcaggagtgctcttttagcactctacactgcaaggccaggaggcattcttaagaagccaccctctcctaagagcagcacagaggagagcagtccccaagaccaacccccagtgatgagagggcaggactccataccacatcattcagactatgatgaggaagagtgggacagggtgtgggccaatgtggggaagagcctgaactgcattattgctatggtggacaaactgattgaaagagatggtggcagtgaaggcagtggcggcaacaatgatggagaaaaggaaccttcattaacagatgccattccctctcacccaagagaggactggtatgaacagttgtatcccctcatccttaccctgaaggactgcatgggagaagtggtgaaccgagccaagcagtccctgacatttgtgctccttcaggaacttgcgtacagcttgccccagtgtctgatgctgacgctaagaagagacatcgtcttcagccaagcacttgctggattggtttgtggttttatcatcaaattacagacaagtctgtatgacccaggcttcctacagcagcttcacacagtggggttgatagtacaatatgaaggactgctaagtacatacagcgatgaaattggaatgctagaggacatggccgttggcatttccgatttaaagaaagttgcatttaaaataattgaagccaaatccaatgatgtgttgccagttataacaggaagacgagaacattacgtggtagaggtcaagcttccagccagaatgtttgagtcactacctctacagattaaagaaggacagttgcttcatgtgtatccagtactttttaatgttggaatcaatgaacagcaaactctggctgaaaggtttggagatgtctctttgcaagaaagtattaatcaggaaaacttcgaacttctacaagaatattacaagatatttatggaaaagatgcctcctgattattctactactcacgaaagattggctggcctcccagtataccagtctagtaagtctgcacataatggcatgaaatcaaaagacataaattcaattgaaagctcacttagatatttcacattttcaggaacaaaatgatttaaaagcattgctagaaaatctccttcaaaatatccaatccaaaaaaagaaagaatgtagaaattatgtggctggctgcaacgatttgccgcaaactgaatggtattcgtttcacctgttgtaaaagtgccaaagacaggacatcgatgtcagtgacacttgaacaatgctcaatcttgagagatgagcaccagttacac

SEQ ID NO: 9905 - DNA, 2855 bp, Homo sapiens
  source 1..2855: mol_type = unassigned DNA; mol_type = unassigned DNA
ggatgtttcctgccctcgaacatcagaatccatgtttttcagcttttgggctcttggacttacaccagtggtttgccagggccccccagccttcgaccacagattgaaggctacactgttggcctccctacttttgaggttttggaacttggactggcttccttgctcctcagtttgcagacagcctattgtggaacttcaccttgtgatcgtagccttgaaaccagcgaaacaataatcaaagagcagttctgtcaaagaaaacaacataaatcaggtacagaatttcagagtgggatatcagatctttagtgtgaagatacatctacattaaaccaggaatcactagaactgacatttggacaagaaaatttggaaaattttaaaactgtgaaggttgatcatggaaattaaagaggaaggggcatcagaagaagggcagcactttcttcctacagcccaggccaatgatcccggggactgtcagttcacaagtatccagaagactccaaatgaaccgcagttggaattcatccttgcatgcaaggatctcgtggctcctgtccgtgatcgtaaactgaatacactggtgcagatctccgtaatccaccccgtggagcagagtctgacaagatactccagcaccgaaattgtggagggaacaagggacccactgtttttgactggtgtcacattcccatctgagtatcccatctatgaggagaccaaaataaaactaacagtctatgatgtcaaggataagtctcatgacaccgttcgaaccagtgtcctaccagaacataaggatcccccgccagaagttgggcgaagtttcttgggctatgccagttttaaagtgggagagctgctgaagtcaaaggagcaattgctggtcctgagcctgagaacttcagatggtggcaaagtggttggcaccatagaagtcagtgtcgtgaagatgggggagattgaggatggggaagccgaccacatcaccacagatgtacagggacaaaagtgtgccctggtatgtgaatgtacagccccggaaagtgtgagcggaaaagataacttaccttttttgaattcagtgttaaagaacccagtatgtaaattatatagatttcccacatctgacaataagtggatgcgaattcgagagcagatgtcagagagcattctttcctttcatattcctaaggaattgatttcccttcacattaaagaagatttgtgcagaaaccaggagataaaagaacttggtgagctttctccacattgggacaatctgcgaaaaaatgtccttactcactgtgatcaaatggtgaatatgtaccaagacattctgacagaacttagcaaggaaacagggtcctctttcaaatcaagcagcagcaaaggagagaaaacattagaatttgttccaataaatctacatctgcaaagaatgcaggtacacagccctcacttgaaagatgctctctacgatgtcatcactgtgggagccccagctgcccattttcagggatttaagaatggtggtcttcggaagctactccatagatttgaaacagaaagaagaaataccggataccagtttatttactattcacctgaaaacacagccaaagcaaaggaagttctcagcaacatcaatcaactacaacctcttatagcaacccatgcagacctactgcttaattctgcaagccagcattctccagacagcttgaagaattctttaaagatgctttcagaaaaaacagagctttttgtacatgccttcaaggatcaacttgtcaggagtgctcttttagcactctacactgcaaggccaggaggcattcttaagaagccaccctctcctaagagcagcacagaggagagcagtccccaagaccaacccccagtgatgagagggcaggactccataccacatcattcagactatgatgaggaagagtgggacagggtgtgggccaatgtggggaagagcctgaactgcattattgctatggtggacaaactgattgaaagagatggtggcagtgaaggcagtggcggcaacaatgatggagaaaaggaaccttcattaacagatgccattccctctcacccaagagaggactggtatgaacagttgtatcccctcatccttaccctgaaggactgcatgggagaagtggtgaaccgagccaagcagtccctgacatttgtgctccttcaggaacttgcgtacagcttgccccagtgtctgatgctgacgctaagaagagacatcgtcttcagccaagcacttgctggattggtttgtggttttatcatcaaattacagacaagtctgtatgacccaggcttcctacagcagcttcacacagtggggttgatagtacaatatgaaggactgctaagtacatacagcgatgaaattggaatgctagaggacatggccgttggcatttccgatttaaagaaagttgcatttaaaataattgaagccaaatccaatgatgtgttgccagttataacaggaagacgagaacattacgtggtagaggtcaagcttccagccagaatgtttgagtcactacctctacagattaaagaaggacagttgcttcatgtgtatccagtactttttaatgttggaatcaatgaacagcaaactctggctgaaaggtttggagatgtctctttgcaagaaagtattaatcaggaaaacttcgaacttctacaagaatattacaagatatttatggaaaagatgcctcctgattatatttcacattttcaggaacaaaatgatttaaaagcattgctagaaaatctccttcaaaatatccaatccaaaaaaa

SEQ ID NO: 9906 - DNA, 2155 bp, Homo sapiens
  source 1..2155: mol_type = unassigned DNA; mol_type = unassigned DNA
atatgcagagaaaattatagttagtgaaacaactctgggtgctgtattttacctcttgttattttctagcctgttggtctcttttcttttagggaaaatgatacattttcaccctttaatcctaccccatgagcgaagtttcttgggctatgccagttttaaagtgggagagctgctgaagtcaaaggagcaattgctggtcctgagcctgagaacttcagatggtggcaaagtggttggcaccatagaagtcagtgtcgtgaagatgggggagattgaggatggggaagccgaccacatcaccacagatgtacagggacaaaagtgtgccctggtatgtgaatgtacagccccggaaagtgtgagcggaaaagataacttaccttttttgaattcagtgttaaagaacccagtatgtaaattatatagatttcccacatctgacaataagtggatgcgaattcgagagcagatgtcagagagcattctttcctttcatattcctaaggaattgatttcccttcacattaaagaagatttgtgcagaaaccaggagataaaagaacttggtgagctttctccacattgggacaatctgcgaaaaaatgtccttactcactgtgatcaaatggtgaatatgtaccaagacattctgacagaacttagcaaggaaacagggtcctctttcaaatcaagcagcagcaaaggagagaaaacattagaatttgttccaataaatctacatctgcaaagaatgcaggtacacagccctcacttgaaagatgctctctacgatgtcatcactgtgggagccccagctgcccattttcagggatttaagaatggtggtcttcggaagctactccatagatttgaaacagaaagaagaaataccggataccagtttatttactattcacctgaaaacacagccaaagcaaaggaagttctcagcaacatcaatcaactacaacctcttatagcaacccatgcagacctactgcttaattctgcaagccagcattctccagacagcttgaagaattctttaaagatgctttcagaaaaaacagagctttttgtacatgccttcaaggatcaacttgtcaggagtgctcttttagcactctacactgcaaggccaggaggcattcttaagaagccaccctctcctaagagcagcacagaggagagcagtccccaagaccaacccccagtgatgagagggcaggactccataccacatcattcagactatgatgaggaagagtgggacagggtgtgggccaatgtggggaagagcctgaactgcattattgctatggtggacaaactgattgaaagagatggtggcagtgaaggcagtggcggcaacaatgatggagaaaaggaaccttcattaacagatgccattccctctcacccaagagaggactggtatgaacagttgtatcccctcatccttaccctgaaggactgcatgggagaagtggtgaaccgagccaagcagtccctgacatttgtgctccttcaggaacttgcgtacagcttgccccagtgtctgatgctgacgctaagaagagacatcgtcttcagccaagcacttgctggattggtttgtggttttatcatcaaattacagacaagtctgtatgacccaggcttcctacagcagcttcacacagtggggttgatagtacaatatgaaggactgctaagtacatacagcgatgaaattggaatgctagaggacatggccgttggcatttccgatttaaagaaagttgcatttaaaataattgaagccaaatccaatgatgtgttgccagttataacaggaagacgagaacattacgtggtagaggtcaagcttccagccagaatgtttgagtcactacctctacagattaaagaaggacagttgcttcatgtgtatccagtactttttaatgttggaatcaatgaacagcaaactctggctgaaaggtttggagatgtctctttgcaagaaagtattaatcaggaaaacttcgaacttctacaagaatattacaagatatttatggaaaagatgcctcctgattatatttcacattttcaggaacaaaatgatttaaaagcattgctagaaaatctccttcaaaatatccaatcc

SEQ ID NO: 9907 - DNA, 719 bp, Homo sapiens
  source 1..719: mol_type = unassigned DNA; mol_type = unassigned DNA
gagtatcccatctatgaggagaccaaaataaaactaacagtctatgatgtcaaggataagtctcatgacaccttcaggatcaacagattaacttcactgtgaattttttgacccctgaggcaagtgttcaaaccagtattgacttggcttcttccaaccttcattttatgtgtcagctgtgatgcaatacttcaagtgcttcataaagataagggctgcacttttccctcagagcactggccaaataataatcaggttcgaaccagtgtcctaccagaacataaggatcccccgccagaagttgggcgaagtttcttgggctatgccagttttaaagtgggagagctgctgaagtcaaaggagcaattgctggtcctgagcctgagaacttcagatggtggcaaagtggttggcaccatagaagtcagtgtcgtgaagatgggggagattgaggatggggaagccgaccacatcaccacagatgtacagggacaaaagtgtgccctggtatgtgaatgtacagccccggaaagtgtgagcggaaaagataacttaccttttttgaattcagtgttaaagaacccagtatgtaaattatatagatttcccacatctgacaataagtggatgcgaattcgagagcagatgtcagagagcattctttcctttcatattcctaaggaattgatttcccttcacattaaagaagatttgtgcag

SEQ ID NO: 9908 - DNA, 570 bp, Homo sapiens
  source 1..570: mol_type = unassigned DNA; mol_type = unassigned DNA
aatccaccccgtggagcagagtctgacaagatactccagcaccgaaattgtggagggaacaagggacccactgtttttgactggtgtcacattcccatctgagtatcccatctatgaggagaccaaaataaaactaacagtctatgatgtcaaggataagtctcatgacaccatagctaactcatccagaatttgagtataagtggatcttgaggtcctcagagctgagacaacttgagacaacttgctcagtcacctgttcaaatgtctgcaggatggttggccaagtgcaagacatcacatgagcttcttgacagctgcacgatggttcgaaccagtgtcctaccagaacataaggatcccccgccagaagttgggcgaagtttcttgggctatgccagttttaaagtgggagagctgctgaagtcaaaggagcaattgctggtcctgagcctgagaacttcagatggtggcaaagtggttggcaccatagaagtcagtgtcgtgaagatgggggagattgaggatggggaagccgaccacatcaccacagatgtacagggacaaaag

SEQ ID NO: 9909 - DNA, 673 bp, Homo sapiens
  source 1..673: mol_type = unassigned DNA; mol_type = unassigned DNA
atggaaattaaagaggaaggggcatcagaagaagggcagcactttcttcctacagcccaggccaatgatcccggggactgtcagttcacaagtatccagaagactccaaatgaaccgcagttggaattcatccttgcatgcaaggatctcgtggctcctgtccgtgatcgtaaactgaatacactggtgcagatctccgtaatccaccccgtggagcagagtctgacaagatactccagcaccgaaattgtggagggaacaagggacccactgtttttgactggtgtcacattcccatctgagtatcccatctatgaggagaccaaaataaaactaacagtctatgatgtcaaggataagtctcatgacaccatagctaactcatccagaatttgagtataagtggatcttgaggtcctcagagctgagacaacttgagacaacttgctcagtcacctgttcaaatgtctgcaggatggttggccaagtgcaagacatcacatgagcttcttgacagctgcacgatggtaacttaatgagacacaacagttttcttgtgaaatagctggacatgcagagaggtcacatgaataataagctcacacctgtgttcccgccacccggatattattcaaagcacaaaacatcataaataaagtcaaggtcctctata

SEQ ID NO: 9910 - DNA, 563 bp, Homo sapiens
  source 1..563: mol_type = unassigned DNA; mol_type = unassigned DNA
aaagcgcagatggggagagtcatttgccccacaccctacacagcccggaataaccaggaatacaaagaaatggtgttacctggcaagaggtcttctgtcttttatgaaaaattagacaaagagccttgaaaccagcgaaacaataatcaaagagcagttctgtcaaagaaaacaacataaatcaggtacagaatttcagagtgggatatcagatctttagtgtgaagatacatctacattaaaccaggaatcactagaactgacatttggacaagaaaatttggaaaattttaaaactgtgaaggttgatcatggaaattaaagaggaaggggcatcagaagaagggcagcactttcttcctacagcccaggccaatgatcccggggactgtcagttcacaagtatccagaagactccaaatgaaccgcagttggaattcatccttgcatgcaaggatctcgtggctcctgtccgtgatcgtaaactgaatacactggtgcagatctccgtaatccaccccgtggagcagagtctgacaagatactccagcaccgaaattgtg

SEQ ID NO: 9911 - DNA, 548 bp, Homo sapiens
  source 1..548: mol_type = unassigned DNA; mol_type = unassigned DNA
aaattaaagtcgagatggacctgaggaagaccacatgagggctgatggggaagaggcatttgaagagccttgaaaccagcgaaacaataatcaaagagcagttctgtcaaagaaaacaacataaatcaggtacagaatttcagagtgggatatcagatctttagtgtgaagatacatctacattaaaccaggaatcactagaactgacatttggacaagaaaatttggaaaattttaaaactgtgaaggttgatcatggaaattaaagaggaaggggcatcagaagaagggcagcactttcttcctacagcccaggccaatgatcccggggactgtcagttcacaagtatccagaagactccaaatgaaccgcagttggaattcatccttgctgcagctatctgaataatgggatcaggcctggtgattggatgctgctgaacatctacatgcaaggatctcgtggctcctgtccgtgatcgtaaactgaatacactggtgcagatctccgtaatccaccccgtggagcagagtctgacaagatactc

SEQ ID NO: 9912 - DNA, 526 bp, Homo sapiens
  source 1..526: mol_type = unassigned DNA; mol_type = unassigned DNA
agtcgagatggacctgaggaagaccacatgagggctgatggggaagaggcatttgaagagccttgaaaccagcgaaacaataatcaaagagcagttctgtcaaagaaaacaacataaatcaggtacagaatttcagagtgggatatcagatctttagtgtgaagatacatctacattaaaccaggaatcactagaactgacatttggacaagaaaatttggaaaattttaaaactgtgaaggttgatcatggaaattaaagaggaaggggcatcagaagaagggcagcactttcttcctacagcccaggccaatgatcccggggactgtcagttcacaagtatccagaagactccaaatgaaccgcagttggaattcatccttggaaattaacttcatattcactctgtaagccaccacttgtagaaggtctgttttttttctatggaagcggatgattgtaaaaagtgtcatgtggatatgcaattcagtatacatctgtaccagcatgcaaggatctcgtggct

SEQ ID NO: 9913 - DNA, 523 bp, Homo sapiens
  source 1..523: mol_type = unassigned DNA; mol_type = unassigned DNA
aaattaaagtcgagatggacctgaggaagaccacatgagggctgatggggaagaggcatttgaagctatttgccagtttataattctgtctcctcaaagagtagccttgaaaccagcgaaacaataatcaaagagcagttctgtcaaagaaaacaacataaatcaggtacagaatttcagagtgggatatcagatctttagtgtgaagatacatctacattaaaccaggaatcactagaactgacatttggacaagaaaatttggaaaattttaaaactgtgaaggttgatcatggaaattaaagaggaaggggcatcagaagaagggcagcactttcttcctacagcccaggccaatgatcccggggactgtcagttcacaagtatccagaagactccaaatgaaccgcagttggaattcatccttgctgcagctatctgaataatgggatcaggcctggtgattggatgctgctgaacatctagaaattaacttcatattcactctgtaagccaccacttg

SEQ ID NO: 9914 - DNA, 558 bp, Homo sapiens
  source 1..558: mol_type = unassigned DNA; mol_type = unassigned DNA
aaagaaaggataaattaaagtcgagatggacctgaggaagaccacatgagggctgatggggaagaggcatttgaaggctttacaggaggcatagtactggaaatctgctcctgatgaggtctcagaaagcttccactcgtggtggaaggcaaaggaggagcaggcacatcacatgagccttgaaaccagcgaaacaataatcaaagagcagttctgtcaaagaaaacaacataaatcaggtacagaatttcagagtgggatatcagatctttagtgtgaagatacatctacattaaaccaggaatcactagaactgacatttggacaagaaaatttggaaaattttaaaactgtgaaggttgatcatggaaattaaagaggaaggggcatcagaagaagggcagcactttcttcctacagcccaggccaatgatcccggggactgtcagttcacaagtatccagaagactccaaatgaaccgcagttggaattcatccttgctgcagctatctgaataatgggatcaggcctggtgattggatgctgctgaacatcta

SEQ ID NO: 9915 - DNA, 1506 bp, Homo sapiens
  source 1..1506: mol_type = unassigned DNA; mol_type = unassigned DNA
agacagcagaaggatcactgggctggaagctctaacaggcattgccagcctagctacctgcagtttgaggcaagggcagggtcacttaccctgctgtctgaatgtctcctgggacaacaggaggctgcactcactggctgagttcagacagaagagggatcatcggactggaagctctggcagagccttgaaaccagcgaaacaataatcaaagagcagttctgtcaaagaaaacaacataaatcaggtacagaatttcagagtgggatatcagatctttagtgtgaagatacatctacattaaaccaggaatcactagaactgacatttggacaagaaaatttggaaaattttaaaactgtgaaggttgatcatggaaattaaagaggaaggggcatcagaagaagggcagcactttcttcctacagcccaggccaatgatcccggggactgtcagttcacaagtatccagaagactccaaatgaaccgcagttggaattcatccttgatttgaatcaagaattaagagattagcagctgcaagaatttattcataataatgttctaccagtataaaaaacttcaatttctttttttatatatatttttaaaatatactaagaaacaacaacagataattttatcttgtcaaatggcaagaaatgcttgatgagcgaacacaagtttactaaaaaaatattatttcaagtcatcatggaactgtattgttgatcctagaagacacagtccccaaactgttaggttccttagcactttaagatcttcaactacaccatttcttgaagaattttttaaaaactactctttcaagggtattacagataaacccgtggatgttttactgtccatttttgtcatttttttctttgagattttttaattccacaaatcctccgacgtcacctattattgtatgagtaacttctattcatttcccaatgaaagaataatagcttcttaaatatttttatcatgtttaagggtgtgcatatttatttaatcagaagtaaaacaagaacaaattctaggaaaaagaaattcagtaaggaagagggctttttcgtctaattttaactaaatctttgatatttgattctctactcttaaccaaagtattcaaattatttaggaatttcaatgaccttgctttctaaattaggaaaacagccacaccaatcaatttgctaggtgccatattgctttgtataagttattttccatcaaggatttgtgtctgctttgtgtgctgctatataataattatgtcttgctgaagttcttctgcttattgaattcctctactgaagttccttacttattcaaataagtaaggtaggaggtacttagtcaattgagcagctaattggctaaaagtgtcttgagcacaagataagcatgtactgaaaaactgagtatctcttgtccattgttaactgtatttctaatggttgattgcatttaaattaaataattcacccctacaa

SEQ ID NO: 9916 - DNA, 583 bp, Homo sapiens
  source 1..583: mol_type = unassigned DNA; mol_type = unassigned DNA
gcgcacacgctcacacgctcgcaagcgaacgcaggaaagtcaggctaaaagtgtctgctgctgctgccgccccccactccgcctccgggagagaatacaaagaaatggtgttacctggcaagaggtcttctgtcttttatgaaaaattagacaaagggggcgctgttttggggaaatggcagaactccctcagaggctgatctaagggttcccggcagaaggggccatcttcagaggctctggttgcatgactgtttggagtttgatggcctgaagagccttgaaaccagcgaaacaataatcaaagagcagttctgtcaaagaaaacaacataaatcaggtacagaatttcagagtgggatatcagatctttagtgtgaagatacatctacattaaaccaggaatcactagaactgacatttggacaagaaaatttggaaaattttaaaactgtgaaggttgatcatggaaattaaagaggaaggggcatcagaagaagggcagcactttcttcctacagcccaggccaatgatcccggggactgtcagttcacaagtatccagaagactccaaatgaaccg

SEQ ID NO: 9917 - DNA, 434 bp, Homo sapiens
  source 1..434: mol_type = unassigned DNA; mol_type = unassigned DNA
tcatctctggatcctctggggttaaaaatccatggacacaatctctaaatcctattccagttccagcctcctatggtcttagaatacaaagaaatggtgttacctggcaagaggtcttctgtcttttatgaaaaattagacaaagggggcgctgttttggggaaatggcagaactccctcagaggctgatctaagggttcccggcagaaggggccatcttcagaggctctggttgcatgactgtttggagtttgatggcctgaagatggaagaagctattcagggaaggagtgacttccagctttgaaacaagaactttagaaacttcagaagcatacggaaaaggaaacaagaaaaatgtaatcaagcaagcctcttgaaatgatacaataatataatagcagaattagatccacagaatttatacaattaaa

SEQ ID NO: 9918 - DNA, 341 bp, Homo sapiens
  source 1..341: mol_type = unassigned DNA; mol_type = unassigned DNA
caaccacagatgcacaggagctgagaattctcccaagccaaatacctgcatccaagatcttgtcatgttctattttggagaaacccaaatgaagatgtattcttccttgagtaatttcagatgctggtgtcatctctggatcctctggggttaaaaatccatggacacaatctctaaatcctattccagttccagcctcctatggtcttagagagaaaaatctcattaagtgagaatctaatgggctggaaaaattcaacagactaacctcagatgaagtaatatatttattgaaaaaaatagcaccttgttagctggaaaataatgatacattgacttac

SEQ ID NO: 9919 - DNA, 238 bp, Homo sapiens
  source 1..238: mol_type = unassigned DNA; mol_type = unassigned DNA
atgcacaagtatcagtctgcctgttcaggccttctctaaagtgcaggaagtcactagatctttctaatgtcctggcacagaagtgaagtggatttaacattctcagggcaaccctcaaccacagatgcacaggagctgtaatttcagatgctggtgtcatctctggatcctctggggttaaaaatccatggacacaatctctaaatcctattccagttccagcctcctatggtcttag

SEQ ID NO: 9920 - DNA, 585 bp, Homo sapiens
  source 1..585: mol_type = unassigned DNA; mol_type = unassigned DNA
ataaatagcaggttacagctcctcctgggcgcgcacacgctcacacgctcgcaagcgaacgcaggaaagtcaggctaaaagtgtctgctgctgctgccgccccccactccgcctccgggagagcctcgtgaagggaatcctgttaaaattcattttacaaactgaaaaacagctttaaaaaggaaaagttatcagcccaaggacattaagaggaacttacaacagcactatctctttgctttatttttgttacctatttcagaaaaacaacaacaacaaaaaactataaaatatgcataaggtatacaaagtgaaaatatggcagtttctgacacacccaccactcaggttaagaaagagaacaattgcctttgaagcttctccagtgcccatccggttggcatctgtctgttcttcctaagacataaatactattttgaagtttgtggctacagtttccttgctttttctttagagtttatctgtatttctttatcctaaagaatatcttttttggtttttcatgcatttaaagttatataaatgaaatcattatgtttgtcaaattcttctataacttgcatt

SEQ ID NO: 9921 - DNA, 3741 bp, Homo sapiens
  source 1..3741: mol_type = unassigned DNA; mol_type = unassigned DNA
gacttctttccattttgttttttgcagagccttgaaaccagcgaaacaataatcaaagagcagttctgtcaaagaaaacaacataaatcaggtacagaatttcagagtgggatatcagatctttagtgtgaagatacatctacattaaaccaggaatcactagaactgacatttggacaagaaaatttggaaaattttaaaactgtgaaggttgatcatggaaattaaagaggaaggggcatcagaagaagggcagcactttcttcctacagcccaggccaatgatcccggggactgtcagttcacaagtatccagaagactccaaatgaaccgcagttggaattcatccttgcatgcaaggatctcgtggctcctgtccgtgatcgtaaactgaatacactggtgcagatctccgtaatccaccccgtggagcagagtctgacaagatactccagcaccgaaattgtggagggaacaagggacccactgtttttgactggtgtcacattcccatctgagtatcccatctatgaggagaccaaaataaaactaacagtctatgatgtcaaggataagtctcatgacaccgttcgaaccagtgtcctaccagaacataaggatcccccgccagaagttgggcgaagtttcttgggctatgccagttttaaagtgggagagctgctgaagtcaaaggagcaattgctggtcctgagcctgagaacttcagatggtggcaaagtggttggcaccatagaagtcagtgtcgtgaagatgggggagattgaggatggggaagccgaccacatcaccacagatgtacagggacaaaagtgtgccctggtatgtgaatgtacagccccggaaagtgtgagcggaaaagataacttaccttttttgaattcagtgttaaagaacccagtatgtaaattatatagatttcccacatctgacaataagtggatgcgaattcgagagcagatgtcagagagcattctttcctttcatattcctaaggaattgatttcccttcacattaaagaagatttgtgcagaaaccaggagataaaagaacttggtgagctttctccacattgggacaatctgcgaaaaaatgtccttactcactgtgatcaaatggtgaatatgtaccaagacattctgacagaacttagcaaggaaacagggtcctctttcaaatcaagcagcagcaaaggagagaaaacattagaatttgttccaataaatctacatctgcaaagaatgcaggtacacagccctcacttgaaagatgctctctacgatgtcatcactgtgggagccccagctgcccattttcagggatttaagaatggtggtcttcggaagctactccatagatttgaaacagaaagaagaaataccggataccagtttatttactattcacctgaaaacacagccaaagcaaaggaagttctcagcaacatcaatcaactacaacctcttatagcaacccatgcagacctactgcttaattctgcaagccagcattctccagacagcttgaagaattctttaaagatgctttcagaaaaaacagagctttttgtacatgccttcaaggatcaacttgtcaggagtgctcttttagcactctacactgcaaggccaggaggcattcttaagaagccaccctctcctaagagcagcacagaggagagcagtccccaagaccaacccccagtgatgagagggcaggactccataccacatcattcagactatgatgaggaagagtgggacagggtgtgggccaatgtggggaagagcctgaactgcattattgctatggtggacaaactgattgaaagagatggtggcagtgaaggcagtggcggcaacaatgatggagaaaaggaaccttcattaacagatgccattccctctcacccaagagaggactggtatgaacagttgtatcccctcatccttaccctgaaggactgcatgggagaagtggtgaaccgagccaagcagtccctgacatttgtgctccttcaggaacttgcgtacagcttgccccagtgtctgatgctgacgctaagaagagacatcgtcttcagccaagcacttgctggattggtttgtggttttatcatcaaattacagacaagtctgtatgacccaggcttcctacagcagcttcacacagtggggttgatagtacaatatgaaggactgctaagtacatacagcgatgaaattggaatgctagaggacatggccgttggcatttccgatttaaagaaagttgcatttaaaataattgaagccaaatccaatgatgtgttgccagttataacaggaagacgagaacattacgtggtagaggtcaagcttccagccagaatgtttgagtcactacctctacagattaaagaaggacagttgcttcatgtgtatccagtactttttaatgttggaatcaatgaacagcaaactctggctgaaaggtttggagatgtctctttgcaagaaagtattaatcaggaaaacttcgaacttctacaagaatattacaagatatttatggaaaagatgcctcctgattatatttcacattttcaggaacaaaatgatttaaaagcattgctagaaaatctccttcaaaatatccaatccaaaaaaagaaagaatgtagaaattatgtggctggctgcaacgatttgccgcaaactgaatggtattcgtttcacctgttgtaaaagtgccaaagacaggacatcgatgtcagtgacacttgaacaatgctcaatcttgagagatgagcaccagttacacaaggacttctttatccgagcgctggattgcatgagaagagaaggatgccgcatagagaatgtactgaagaatatcaaatgcagaaagtatgctttcaacatgctacagctgatggctttccccaagtactacagacctccagaggggacttatggaaaagctgacacctaagtttaccaacatgttaataaacaggaacacaaatacatttcagttggataatcttcaccttggtcttttttgtttgtttttattgtcatgaatttgtggtgggggagatgatcacagatgtttcccaaaatctaggaactacttcaattcatcatcagcatattgctctgaaagaaatccattttaaaaaatcttacatgattcagtactgtcatttctagttctaagcttctatgtgttgagcctagctgattgagattggttcacaaagtgtaaatttcattcatgagtatttaaatgtttctgaggaaacatggatcatttcaataggactaggggtgattcacagagcaccactctccaaccaaatggaagagaggagagggggaaaaggaacatattttttttgtgatacaacttaatagcctatgagaacacagtcaacctgagaatcaatgtaagggatttaaaaaaaatgtgtagccactcaattaggtagagttaactcatgatctggaatactgaggcagtttgcaggtatgttccacaatgatctctatcatccagtcaaggtgtgactcctcccttgcaacaggcatatgcatggagtgagtaaagtggtcaacagacctttcaaaaccatggcatcttttcagaactctgacttgggttgtgtgatctagctgtgaatgtagcaatatagaacgtttaatagaatgataagcaaaacactgcaatgatctaaaatt

SEQ ID NO: 9922 - DNA, 354 bp, Homo sapiens
  source 1..354: mol_type = unassigned DNA; mol_type = unassigned DNA
agagccttgaaaccagcgaaacaataatcaaagagcagttctgtcaaagaaaacaacataaatcaggtacagaatttcagagtgggatatcagatctttagtgtgaagatacatctacattaaaccaggaatcactagaactgacatttggacaagaaaatttggaaaattttaaaactgtgaaggttgatcatggaaattaaagaggaaggggcatcagaagaagggcagcactttcttcctacagcccaggccaatgatcccggggactgtcagttcacaagtatccagaagactccaaatgaaccgcagttggaattcatccttgatttgaatcaagaattaagagattag

SEQ ID NO: 9923 - DNA, 2967 bp, Homo sapiens
  source 1..2967: mol_type = unassigned DNA; mol_type = unassigned DNA
ggaactttcccagcggatctaatggctgcgcgcgggccgctgtgaggcgcggcggcgagcgacgggcgcggggccgcggagcagcgagcgagcgagcgagcgcgaggccggagccccggccaggcccggccgacccgccgagcccgcgatgcgccccggggccgccccccggcgcagctgacgccccgcggccccgcgaagaccccggccggccggtcccggaggaagcggccgccgccgccgccgcccagcccagcgcccgcgccgcccgggcaccatggcggggaaggcggccgccccgggcaccgcggtgctgctggtcacggccaacgtgggctcgctcttcgacgacccagaaaacctgcagaagaactggcttcgggaattttaccaggtcgtgcacacacacaagccgcacttcatggccttgcactgtcaggagtttggagggaagaactacgaggcctccatgtcccacgtggacaagttcgtcaaagaactattgtcgagtgatgcgatgaaagaatataacagggctcgagtctacctggatgaaaactacaaatcccaggagcacttcacggcactaggaagcttttattttcttcatgagtccttaaaaaacatctaccagtttgactttaaagctaagaagtatagaaaggtcgctggcaaagagatctactcggataccttagagagcacgcccatgctggagaaggagaagtttccgcaggactacttccccgagtgcaaatggtcaagaaaaggcttcatccggacgaggtggtgcattgcagactgtgcctttgacttggtgaatatccatcttttccatgatgcttccaatctggtcgcctgggaaacaagcccttccgtgtactcgggaatccggcacaaggcactgggctacgtgctggacagaatcattgatcagcgattcgagaaggtttcctactttgtatttggtgatttcaacttccggctggattccaagtccgtcgtggagacgctctgcacaaaagccaccatgcagacggtccgggccgccgacaccaatgaagtggtgaagctcatatttcgtgagtcggacaacgaccggaaggttatgctccagttagaaaagaaactcttcgactacttcaaccaggaggttttccgagacaacaacggcaccgcgctcttggagtttgacaaggagttgtctgtctttaaggacagactgtatgaactggacatctcgttccctcccagctacccgtacagtgaggacgcccgccagggtgagcagtacatgaacacccggtgcccagcctggtgtgaccgcatcctcatgtccccgtctgccaaggagctggtgctgcggtcggagagcgaggagaaggttgtcacctatgaccacattgggcccaacgtctgcatgggagaccacaagcccgtgttcctggccttccgaatcatgcccggggcaggtaaacctcatgcccatgtgcacaagtgttgtgtcgtgcagtgacgtggtgggaagagatgccagcgccacgagaggacacttcgtgagcctccctgtagccgtggaccgaatacgcactcttgaaagctgcatcgagaacccgcccaagcgccacctgctagacggccagccccacacttcgcttcagcctccggaccattccggagcagcctcacatacctcactgtctcgtctgtctatgtgacattaagtagaaatattggttttttttttttttttttaaataagtcacagtcctgttgtcaaaactctaatagacagcaaagagggtctgtaccgtagacttcacagttttcagtttttaatgattgccagtggaggggcttcttcagcacagagaccccccactgtgtccagggaccccctctgccaggtggaggtgtgtccaggggctggggaagccgagacgggcactccctctgccggccggcagcgtggccctgagcatggcaagggggtctgtctctgccgatgctccttccgcggcactgactctgcgccgtgtcacatggtttttgaatcacactgcagctgctttccatttttatatatatataaatatatataaatatatactttttaaaaataatttataaatcttaccaaaacttatgctaaatatactttccagtatgaacgcacaggagagtcccatcagcaggcggcattggagtctaggagctcagctgtgtgtccatcaacacacaaattcgtaaaaaacacacatggcctcgccatcgtgggtaaaatcggccccacagcacgtctgcaccagcgggccgttactcccatgccgttcttctgtgtaatattaagaactgaatgtgaagtttatagctagcctgggtgtaccttttaagaattttgtaaaccgtttgtctgtcttttgttactgttttatggtgccaagtatcctacgttacaacaataatatcatgggagaaatagaaatagcctagtttgcttccaatagaaactgcttttaacatgggctgtatataaaaatattaaagagaaacaaaactgtacatttcctcattgctccgctacagacaacccatgtcataaccttgttgcaaatatttttctcctatagcagtaagtacagcattagaaggtgattagagagtctgttgatgaaacacaaatgtatgttttattgattttactttagaacactacagagttcctggaccgggtgaaggcattagctgggtgtttgtgtgggataaatactaccactgcaagtgactgctgtccgctgcggaatctgttcttggtggaagcacaggtccgtgtcgctgctgtggttgccgctgtccgcggttcaacacggagtccgccccgcgggtttcagctgttggtcgttctgaggggcctttggaagtgaccggtctggttcctaagcaataaaattgaccgtggtgaaaata

SEQ ID NO: 9924 - DNA, 1432 bp, Homo sapiens
  source 1..1432: mol_type = unassigned DNA; mol_type = unassigned DNA
gcgcgggccgctgtgaggcgcggcggcgagcgacgggcgcggggccgcggagcagcgagcgagcgagcgagcgcgaggccggagccccggccaggcccggccgacccgccgagcccgcgatgcgccccggggccgccccccggcgcagctgacgccccgcggccccgcgaagaccccggccggccggtcccggaggaagcggccgccgccgccgccgcccagcccagcgcccgcgccgcccgggcaccatggcggggaaggcggccgccccgggcaccgcggtgctgctggtcacggccaacgtgggctcgctcttcgacgacccagaaaacctgcagaagaactggcttcgggaattttaccaggtcgtgcacacacacaagccgcacttcatggccttgcactgtcaggagtttggagggaagaactacgaggcctccatgtcccacgtggacaagttcgtcaaagaactattgtcgagtgatgcgatgaaagaatataacagggctcgagtctacctggatgaaaactacaaatcccaggagcacttcacggcactaggaagcttttattttcttcatgagtccttaaaaaacatctaccagtttgactttaaagctaagaagtatagaaaggtcgctggcaaagagatctactcggataccttagagagcacgcccatgctggagaaggagaagtttccgcaggactacttccccgagtgcaaatggtcaagaaaaggcttcatccggacgaggtggtgcattgcagactgtgcctttgacttggtgaatatccatcttttccatgatgcttccaatctggtcgcctgggaaacaagcccttccgtgtactcgggaatccggcacaaggcactgggctacgtgctggacagaatcattgatcagcgattcgagaaggtttcctactttgtatttggtgatttcaacttccggctggattccaagtccgtcgtggagacgctctgcacaaaagccaccatgcagacggtccgggccgccgacaccaatgaagtggtgaagctcatatttcgtgagtcggacaacgaccggaaggttatgctccagttagaaaagaaactcttcgactacttcaaccaggaggttttccgagacaacaacggcaccgcgctcttggagtttgacaaggagttgtctgtctttaaggacagactgtatgaactggacatctcgttccctcccagctacccgtacagtgaggacgcccgccagggtgagcagtacatgaacacccggtgcccagcctggtgtgaccgcatcctcatgtccccgtctgccaaggagctggtgctgcgggtgagtgtgtgctgccccagccctgggcacagagggatgtggagcgctgggtctggtctggcccagccctggtgacagggccccaggggtggggg

SEQ ID NO: 9925 - DNA, 416 bp, Homo sapiens
  source 1..416: mol_type = unassigned DNA; mol_type = unassigned DNA
gtcacggccaacgtgggctcgctcttcgacgacccagaaaacctgcagaagaactggcttcgggaattttaccaggcactaggaagcttttattttcttcatgagtccttaaaaaacatctaccagtttgactttaaagctaagaagtatagaaaggtcgctggcaaagagatctactcggataccttagagagcacgcccatgctggagaaggagaagtttccgcaggactacttccccgagtgcaaatggtcaagaaaaggcttcatccggacgaggtggtgcattgcagactgtgcctttgacttggtgaatatccatcttttccatgatgcttccaatctggtcgcctgggaaacaagcccttccgtgtactcgggaatccggcacaaggcactgggctacgtgctggacag

SEQ ID NO: 9926 - DNA, 832 bp, Homo sapiens
  source 1..832: mol_type = unassigned DNA; mol_type = unassigned DNA
gcagaagaactggcttcgggaattttaccaggtcgtgcacacacacaagccgcacttcatggccttgcactgtcaggagtttggagggaagaactacgaggcctccatgtcccacgtggacaagttcgtcaaagaactattgtcgagtgatgcgatgaaagaatataacagggctcgagtctacctggatgaaaactacaaatcccaggagcacttcacggcactaggaagcttttattttcttcatgagtccttaaaaaacatctaccagtttgactttaaagctaagaagtatagaaaggtcgctggcaaagagatctactcggataccttagagagcacgcccatgctggagaaggagaagtttccgcaggactacttccccgagtgcaaatggtcaagaaaaggcttcatccggacgaggtggtgcattgcagactgtgcctttgacttggtgaatatccatcttttccatgatgcttccaatctggtcgcctgggaaacaagcccttccgtgtactcgggaatccggcacaaggcactgggctacgtgctggacagaatcattgatcagcgattcgagaaggtttcctactttgtatttggtgatttcaacttccggctggattccaagtccgtcgtggagctcttggagtttgacaaggagttgtctgtctttaaggacagactgtatgaactggacatctcgttccctcccagctacccgtacagtgaggacgcccgccagggtgagcagtacatgaacacccggtgcccagcctggtgtgaccgcatcctcatgtccccgtctgccaaggagctggtgctgcgg

SEQ ID NO: 9927 - DNA, 870 bp, Homo sapiens
  source 1..870: mol_type = unassigned DNA
gcactaggaagcttttattttcttcatgagtccttaaaaaacatctaccagtttgactttaaagctaagaagtatagaaaggtcgctggcaaagagatctactcggataccttagagagcacgcccatgctggagaaggagaagtttccgcaggactacttccccgagtgcaaatggtcaagaaaaggcttcatccggacgaggtggtgcattgcagactgtgcctttgacttggtgaatatccatcttttccatgatgcttccaatctggtcgcctgggaaacaagcccttccgtgtactcgggaatccggcacaaggcactgggctacgtgctggacagaatcattgatcagcgattcgagaaggtttcctactttgtatttggtgatttcaacttccggctggattccaagtccgtcgtggaggtaggcgctggcttccctcccgccctggtctcatgccttgctctgtgttgaggaaaacagtggaaggagcgtggccccttactggcactttcaatgccatccgcctcccgggatgcactttttaaggcaaaacctttcaatgaagaagcatgttttgctgtcggcagagggatccgtgttggaatccggggtgcgcgggccctcaaggttgccccggatggcgggtgacagtgctgtggggctttgccctgtggcttccgccgtcggcacacaaggagctgctggagtgccgtcacagcgccaccccctcgatgcccacagagctgcagcctctgcagagtgtcagctccttcacactgtccaacttgatctcagcgattttttgtcataacacgtagaaactgtcagagcccgttttaaacattgtgcttttctgtctgcaaa

SEQ ID NO: 9928 - DNA, 565 bp, Homo sapiens
  source 1..565: mol_type = unassigned DNA
tggtgaatatccatcttttccatgatgcttccaatctggtcgcctgggaaacaagcccttccgtgtactcgggaatccggcacaaggcactgggctacgtgctggacagaatcattgatcagcgattcgagaaggtttcctactttgtatttggtgatttcaacttccggctggattccaagtccgtcgtggagacgctctgcacaaaagccaccatgcagacggtccgggccgccgacaccaatgaagtggtgaagctcatatttcgtgagtcggacaacgaccggaaggttatgctccagttagaaaagaaactcttcgactacttcaaccaggaggttttccgagacaacaacggcaccgcgcgccagtgtctctgcaggagtggcgtgagcggcggccgggacagctcctgacagatgggcaggatcagccgctgccttgtcattgtccacacggccctgcctgccttcactttgtaatcaagaagaatgtgggagaccatgcgaaattggtgatcatgtttgtgaaaaatctcagagagatacaaattatcaattcaaca

SEQ ID NO: 9929 - DNA, 610 bp, Homo sapiens
  source 1..610: mol_type = unassigned DNA
ctggacatctcgttccctcccagctacccgtacagtgaggacgcccgccagggtgagcagtacatgaacacccggtgcccagcctggtgtgaccgcatcctcatgtccccgtctgccaaggagctggtgctgcggtcggagagcgaggagaaggttgtcacctatgaccacattgggcccaacgtctgcatgggagaccacaagcccgtgttcctggccttccgaatcatgcccggggcagggaagagatgccagcgccacgagaggacacttcgtgagcctccctgtagccgtggaccgaatacgcactcttgaaagctgcatcgagaacccgcccaagcgccacctgctagacggccagccccacacttcgcttcagcctccggaccattccggagcagcctcacatacctcactgtctcgtctgtctatgtgacattaagtagaaatattggttttttttttttttttttaaataagtcacagtcctgttgtcaaaactctaatagacagcaaagagggtctgtaccgtagacttcacagttttcagtttttaatgattgccagtggaggggcttcttcagcacagagaccccccactgtgtccagg

SEQ ID NO: 9930 - DNA, 5274 bp, Homo sapiens
  source 1..5274: mol_type = unassigned DNA
ctagggcatggcatcccacgtgggtgtcagcacggccgcagaagaaccacttctctggcccacccatgcctgctaggccatgcttcttcagaagtggccacaactctcctgacgtctccagagccggtcattccacccagggggacttcagctgccactggacacttcaattgtacgctgcgaccagttgccaggaaggagagggctggcaagagagccgcggcagccgtggcagggtgtaggggacggtggacggccagggcccccccctctctctctttctctctctctctcttgcttggtttctgtaatgaggaagttctccgcagctcagtttcctttccctcactgagcgcctgaaacaggaagtcagtcagttaagctggtggcagcagccgaggccaccaagaggcaacgggcggcaggttgcagtggaggggcctccgctcccctcggtggtgtgtgggtcctgggggtgcctgccggcccggccgaggaggcccacgcccaccatggtcccctgctggaaccatggcaacatcacccgctccaaggcggaggagctgctttccaggacaggcaaggacgggagcttcctcgtgcgtgccagcgagtccatctcccgggcatacgcgctctgcgtgctgtatcggaattgcgtttacacttacagaattctgcccaatgaagatgataaattcactgttcaggcatccgaaggcgtctccatgaggttcttcaccaagctggaccagctcatcgagttttacaagaaggaaaacatggggctggtgacccatctgcaataccctgtgccgctggaggaagaggacacaggcgacgaccctgaggaggacacagaaagtgtcgtgtctccacccgagctgcccccaagaaacatcccgctgactgccagctcctgtgaggccaaggaggttcctttttcaaacgagaatccccgagcgaccgagaccagccggccgagcctctccgagacattgttccagcgactgcaaagcatggacaccagtgggcttccagaagagcatcttaaggccatccaagattatttaagcactcagctcgcccaggactctgaatttgtgaagacagggtccagcagtcttcctcacctgaagaaactgaccacactgctctgcaaggagctctatggagaagtcatccggaccctcccatccctggagtctctgcagaggttatttgaccagcagctctccccgggcctccgtccacgtcctcaggttcctggtgaggccaatcccatcaacatggtgtccaagctcagccaactgacaagcctgttgtcgtccattgaagacaaggtcaaggccttgctgcacgagggtcctgagtctccgcaccggccctcccttatccctccagtcacctttgaggtgaaggcagagtctctggggattcctcagaaaatgcagctcaaagtcgacgttgagtctgggaaactgatcattaagaagtccaaggatggttctgaggacaagttctacagccacaagaaaatcctgcagctcattaagtcacagaaatttctgaataagttggtgatcttggtggaaacagagaaggagaagatcctgcggaaggaatatgtttttgctgactccaaaaagagagaaggcttctgccagctcctgcagcagatgaagaacaagcactcagagcagccggagcccgacatgatcaccatcttcatcggcacctggaacatgggtaacgccccccctcccaagaagatcacgtcctggtttctctccaaggggcagggaaagacgcgggacgactctgcggactacatcccccatgacatttacgtgatcggcacccaagaggaccccctgagtgagaaggagtggctggagatcctcaaacactccctgcaagaaatcaccagtgtgacttttaaaacagtcgccatccacacgctctggaacatccgcatcgtggtgctggccaagcctgagcacgagaaccggatcagccacatctgtactgacaacgtgaagacaggcattgcaaacacactggggaacaagggagccgtgggggtgtcgttcatgttcaatggaacctccttagggttcgtcaacagccacttgacttcaggaagtgaaaagaaactcaggcgaaaccaaaactatatgaacattctccggttcctggccctgggcgacaagaagctgagtccctttaacatcactcaccgcttcacgcacctcttctggtttggggatcttaactaccgtgtggatctgcctacctgggaggcagaaaccatcatccagaaaatcaagcagcagcagtacgcagacctcctgtcccacgaccagctgctcacagagaggagggagcagaaggtcttcctacacttcgaggaggaagaaatcacgtttgccccaacctaccgttttgagagactgactcgggacaaatacgcctacaccaagcagaaagcgacagggatgaagtacaacttgccttcctggtgtgaccgagtcctctggaagtcttatcccctggtgcacgtggtgtgtcagtcttatggcagtaccagcgacatcatgacgagtgaccacagccctgtctttgccacatttgaggcaggagtcacttcccagtttgtctccaagaacggtcccgggactgttgacagccaaggacagattgagtttctcaggtgctatgccacattgaagaccaagtcccagaccaaattctacctggagttccactcgagctgcttggagagttttgtcaagagtcaggaaggagaaaatgaagaaggaagtgagggggagctggtggtgaagtttggtgagactcttccaaagctgaagcccattatctctgaccctgagtacctgctagaccagcacatcctcatcagcatcaagtcctctgacagcgacgaatcctatggcgagggctgcattgcccttcggttagaggccacagaaacgcagctgcccatctacacgcctctcacccaccatggggagttgacaggccacttccagggggagatcaagctgcagacctctcagggcaagacgagggagaagctctatgactttgtgaagacggagcgtgatgaatccagtgggccaaagaccctgaagagcctcaccagccacgaccccatgaagcagtgggaagtcactagcagggcccctccgtgcagtggctccagcatcactgaaatcatcaaccccaactacatgggagtggggccctttgggccaccaatgcccctgcacgtgaagcagaccttgtcccctgaccagcagcccacagcctggagctacgaccagccgcccaaggactccccgctggggccctgcaggggagaaagtcctccgacacctcccggccagccgcccatatcacccaagaagtttttaccctcaacagcaaaccggggtctccctcccaggacacaggagtcaaggcccagtgacctggggaagaacgcaggggacacgctgcctcaggaggacctgccgctgacgaagcccgagatgtttgagaaccccctgtatgggtccctgagttccttccctaagcctgctcccaggaaggaccaggaatcccccaaaatgccgcggaaggaacccccgccctgcccggaacccggcatcttgtcgcccagcatcgtgctcaccaaagcccaggaggctgatcgcggcgaggggcccggcaagcaggtgcccgcgccccggctgcgctccttcacgtgctcatcctctgccgagggcagggcggccggcggggacaagagccaagggaagcccaagaccccggtcagctcccaggccccggtgccggccaagaggcccatcaagccttccagatcggaaatcaaccagcagaccccgcccaccccgacgccgcggccgccgctgccagtcaagagcccggcggtgctgcacctccagcactccaagggccgcgactaccgcgacaacaccgagctcccgcatcacggcaagcaccggccggaggaggggccaccagggcctctaggcaggactgccatgcagtgaagccctcagtgagctgccactgagtcgggagcccagaggaacggcgtgaagccactggaccctctcccgggacctcctgctggctcctcctgcccagcttcctatgcaaggctttgtgttttcaggaaagggcctagcttctgtgtggcccacagagttcactgcctgtgagacttagcaccaagtgctgaggctggaagaaaaacgcacaccagacgggcaacaaacagtctgggtccccagctcgctcttggtacttgggaccccagtgcctcgttgagggcgccattctgaagaaaggaactgcagcgccgatttgagggtggagatatagataataataatattaataataataatggccacatggatcgaacactcatgatgtgccaagtgctgtgctaagtgctttacgaacattcgtcatatcaggatgacctcgagagctgaggctctagccacctaaaaccacgtgcccaaacccaccagtttaaaacggtgtgtgttcggaggggtgaaagcattaagaagcccagtgccctcctggagtgagacaagggctcggccttaaggagctgaagagtctgggtagcttgtttagggtacaagaagcctgttctgtccagcttcagtgacacaagctgctttagctaaagtcccgcgggttccggcatggctaggctgagagcagggatctacctggcttctcagttctttggttggaaggagcaggaaatcagctcctattctccagtggagagatctggcctcagcttgggctagagatgccaaggcctgtgccaggttccctgtgccctcctcgaggtgggcagccatcaccagccacagttaagccaagccccccaacatgtattccatcgtgctggtagaagagtctttgctgttgctcccgaaagccgtgctctccagcctggctgccagggagggtgggcctcttggttccaggctcttgaaatagtgcagccttttcttcctatctctgtggctttcagctctgcttccttggttattaggagaatagatgggtgatgtctttccttatgttgctttttcaacatagcagaattaatgtagggagctaaatccagtggtgtgtgtgaatgcagaagggaatgcaccccacattcccatgatggaagtctgcgtaaccaataaattgtgcctttctcactca

SEQ ID NO: 9931 - DNA, 2545 bp, Homo sapiens
  source 1..2545: mol_type = unassigned DNA
ggccaccaagaggcaacgggcggcaggttgcagtggaggggcctccgctcccctcggtggtgtgtgggtcctgggggtgcctgccggcccggccgaggaggcccacgcccaccatggtcccctgctggaaccatggcaacatcacccgctccaaggcggaggagctgctttccaggacaggcaaggacgggagcttcctcgtgcgtgccagcgagtccatctcccgggcatacgcgctctgcgtgctgtatcggaattgcgtttacacttacagaattctgcccaatgaagatgataaattcactgttcaggcatccgaaggcgtctccatgaggttcttcaccaagctggaccagctcatcgagttttacaagaaggaaaacatggggctggtgacccatctgcaataccctgtgccgctggaggaagaggacacaggcgacgaccctgaggaggacacagtagaaagtgtcgtgtctccacccgagctgcccccaagaaacatcccgctgactgccagctcctgtgaggccaaggaggttcctttttcaaacgagaatccccgagcgaccgagaccagccggccgagcctctccgagacattgttccagcgactgcaaagcatggacaccagtgggcttccagaagagcatcttaaggccatccaagattatttaagcactcagctcgcccaggactctgaatttgtgaagacagggtccagcagtcttcctcacctgaagaaactgaccacactgctctgcaaggagctctatggagaagtcatccggaccctcccatccctggagtctctgcagaggttatttgaccagcagctctccccgggcctccgtccacgtcctcaggtaaagggtcttggggttgaaaaggtgagattaataccccagggaggaggattgagttagccagtcctgagggctcaggaggaagaggggagcactgcccattgtgtgttcactgggcaacagcaagcaggtacgcatgggttgggggtgggagcctcagcccctgccctttccaggaagccatctcccactgccagattttgatttgaggaataaagatttcaaattatgcactcatcagcaaaacttatttgtgccaaataagggggtaagcagggcctgttcccatcatttcttatcagaaactgaaaggaaagaaaaagaggagatgcctaaactcttgatcctgcctcttgtcccaggaggagcaggatgaaggtgccccccaacccccgcacctgctcatggcctggcaggaggccaaggtcgtgttgcccattaagcaaatgtctgtgtaacaaaaggtgtcatcaataaagttttaacaagttttttaaaaaagcaaaagctgtatctcagaagaaaatacctgcaacaaagcttagggacaaaggattacagacgaagtattcatgtttatattattatttttatttgagacatggtcttgctttgtcgcccaggctggcgtgcagtggcacaatcacagctcactgcatcctcaaacatcggggctcaagcgatccaccccacctgagcctcccatgtattaaaactgcaatacttttgcaccagctaatagctggggattacaggtgcatgccaccatgccagtctccttttaaaattttttgtagagacagatctcactgtgttgcccaggttggtttcaaacttctggccatcttcctgccccagccttctgaagtgctgggattacaggtgggagccaccatgcctggccatttttaaaaaaattcctacaaataattaagtaaaaacaatccagtttttagaatgcggaaaggctataaacaaggcggttcactgaagagggacagggaatagccagtatagatatgaaaaggcgttcaacctcaccttgttagtaactgggaaatgacatttgacactaggcagcctcttcttgcctattagatggacaaagagttgatgctcaagttgatggttgagtcaggacttggctaggatgtggggtggaggaggtgctcacaggggctcactcctctgctgttgggaatggaaatgggttttctgaacggcagtttggccatttgtatgcaaatgtgaactgcaggcatccctcaagcccgcagttccatatgttggcagcttcttagggactacaagtacacaaagagtaacagaaaaaaacattgaaaatcacataaacaggccaggcgtggtagttcacgcctgtaatcccagtactttgggaggccgaagcgggtggatcacctgaggtcgggaatttgagaccaacctgaccaacatggtgaaacgctgtctctaccaaaaatacaaaaattagccaggtgtggtggcgggcgcctgtaatcccagctactcaggaggctgaggcaggagcattgcttgaacccgggaggtggacgttgcagtgagccgagatggcgccactgcactccagcctgggtgacagagtgagactccatctccatctaaaacagaaaaaaaaaaggaaaaagaaaaaaagaaaa

SEQ ID NO: 9932 - DNA, 4845 bp, Homo sapiens
  source 1..4845: mol_type = unassigned DNA; mol_type = unassigned DNA
gtggaggggcctccgctcccctcggtggtgtgtgggtcctgggggtgcctgccggcccggccgaggaggcccacgcccaccatggtcccctgctggaaccatggcaacatcacccgctccaaggcggaggagctgctttccaggacaggcaaggacgggagcttcctcgtgcgtgccagcgagtccatctcccgggcatacgcgctctgcgtgctgtatcggaattgcgtttacacttacagaattctgcccaatgaagatgataaattcactgttcaggcatccgaaggcgtctccatgaggttcttcaccaagctggaccagctcatcgagttttacaagaaggaaaacatggggctggtgacccatctgcaataccctgtgccgctggaggaagaggacacaggcgacgaccctgaggaggacacagtagaaagtgtcgtgtctccacccgagctgcccccaagaaacatcccgctgactgccagctcctgtgaggccaaggaggttcctttttcaaacgagaatccccgagcgaccgagaccagccggccgagcctctccgagacattgttccagcgactgcaaagcatggacaccagtgggcttccagaagagcatcttaaggccatccaagattatttaagcactcagctcgcccaggactctgaatttgtgaagacagggtccagcagtcttcctcacctgaagaaactgaccacactgctctgcaaggagctctatggagaagtcatccggaccctcccatccctggagtctctgcagaggttatttgaccagcagctctccccgggcctccgtccacgtcctcaggttcctggtgaggccaatcccatcaacatggtgtccaagctcagccaactgacaagcctgttgtcgtccattgaagacaaggtcaaggccttgctgcacgagggtcctgagtctccgcaccggccctcccttatccctccagtcacctttgaggtgaaggcagagtctctggggattcctcagaaaatgcagctcaaagtcgacgttgagtctgggaaactgatcattaagaagtccaaggatggttctgaggacaagttctacagccacaagaaaatcctgcagctcattaagtcacagaaatttctgaataagttggtgatcttggtggaaacagagaaggagaagatcctgcggaaggaatatgtttttgctgactccaaaaagagagaaggcttctgccagctcctgcagcagatgaagaacaagcactcagagcagccggagcccgacatgatcaccatcttcatcggcacctggaacatgggtaacgccccccctcccaagaagatcacgtcctggtttctctccaaggggcagggaaagacgcgggacgactctgcggactacatcccccatgacatttacgtgatcggcacccaagaggaccccctgagtgagaaggagtggctggagatcctcaaacactccctgcaagaaatcaccagtgtgacttttaaaacagtcgccatccacacgctctggaacatccgcatcgtggtgctggccaagcctgagcacgagaaccggatcagccacatctgtactgacaacgtgaagacaggcattgcaaacacactggggaacaagggagccgtgggggtgtcgttcatgttcaatggaacctccttagggttcgtcaacagccacttgacttcaggaagtgaaaagaaactcaggcgaaaccaaaactatatgaacattctccggttcctggccctgggcgacaagaagctgagtccctttaacatcactcaccgcttcacgcacctcttctggtttggggatcttaactaccgtgtggatctgcctacctgggaggcagaaaccatcatccagaaaatcaagcagcagcagtacgcagacctcctgtcccacgaccagctgctcacagagaggagggagcagaaggtcttcctacacttcgaggaggaagaaatcacgtttgccccaacctaccgttttgagagactgactcgggacaaatacgcctacaccaagcagaaagcgacagggatgaagtacaacttgccttcctggtgtgaccgagtcctctggaagtcttatcccctggtgcacgtggtgtgtcagtcttatggcagtaccagcgacatcatgacgagtgaccacagccctgtctttgccacatttgaggcaggagtcacttcccagtttgtctccaagaacggtcccgggactgttgacagccaaggacagattgagtttctcaggtgctatgccacattgaagaccaagtcccagaccaaattctacctggagttccactcgagctgcttggagagttttgtcaagagtcaggaaggagaaaatgaagaaggaagtgagggggagctggtggtgaagtttggtgagactcttccaaagctgaagcccattatctctgaccctgagtacctgctagaccagcacatcctcatcagcatcaagtcctctgacagcgacgaatcctatggcgagggctgcattgcccttcggttagaggccacagaaacgcagctgcccatctacacgcctctcacccaccatggggagttgacaggccacttccagggggagatcaagctgcagacctctcagggcaagacgagggagaagctctatgactttgtgaagacggagcgtgatgaatccagtgggccaaagaccctgaagagcctcaccagccacgaccccatgaagcagtgggaagtcactagcagggcccctccgtgcagtggctccagcatcactgaaatcatcaaccccaactacatgggagtggggccctttgggccaccaatgcccctgcacgtgaagcagaccttgtcccctgaccagcagcccacagcctggagctacgaccagccgcccaaggactccccgctggggccctgcaggggagaaagtcctccgacacctcccggccagccgcccatatcacccaagaagtttttaccctcaacagcaaaccggggtctccctcccaggacacaggagtcaaggcccagtgacctggggaagaacgcaggggacacgctgcctcaggaggacctgccgctgacgaagcccgagatgtttgagaaccccctgtatgggtccctgagttccttccctaagcctgctcccaggaaggaccaggaatcccccaaaatgccgcggaaggaacccccgccctgcccggaacccggcatcttgtcgcccagcatcgtgctcaccaaagcccaggaggctgatcgcggcgaggggcccggcaagcaggtgcccgcgccccggctgcgctccttcacgtgctcatcctctgccgagggcagggcggccggcggggacaagagccaagggaagcccaagaccccggtcagctcccaggccccggtgccggccaagaggcccatcaagccttccagatcggaaatcaaccagcagaccccgcccaccccgacgccgcggccgccgctgccagtcaagagcccggcggtgctgcacctccagcactccaagggccgcgactaccgcgacaacaccgagctcccgcatcacggcaagcaccggccggaggaggggccaccagggcctctaggcaggactgccatgcagtgaagccctcagtgagctgccactgagtcgggagcccagaggaacggcgtgaagccactggaccctctcccgggacctcctgctggctcctcctgcccagcttcctatgcaaggctttgtgttttcaggaaagggcctagcttctgtgtggcccacagagttcactgcctgtgagacttagcaccaagtgctgaggctggaagaaaaacgcacaccagacgggcaacaaacagtctgggtccccagctcgctcttggtacttgggaccccagtgcctcgttgagggcgccattctgaagaaaggaactgcagcgccgatttgagggtggagatatagataataataatattaataataataatggccacatggatcgaacactcatgatgtgccaagtgctgtgctaagtgctttacgaacattcgtcatatcaggatgacctcgagagctgaggctctagccacctaaaaccacgtgcccaaacccaccagtttaaaacggtgtgtgttcggaggggtgaaagcattaagaagcccagtgccctcctggagtgagacaagggctcggccttaaggagctgaagagtctgggtagcttgtttagggtacaagaagcctgttctgtccagcttcagtgacacaagctgctttagctaaagtcccgcgggttccggcatggctaggctgagagcagggatctacctggcttctcagttctttggttggaaggagcaggaaatcagctcctattctccagtggagagatctggcctcagcttgggctagagatgccaaggcctgtgccaggttccctgtgccctcctcgaggtgggcagccatcaccagccacagttaagccaagccccccaacatgtattccatcgtgctggtagaagagtctttgctgttgctcccgaaagccgtgctctccagcctggctgccagggagggtgggcctcttggttccaggctcttgaaatagtgcagccttttcttcctatctctgtggctttcagctctgcttccttggttattaggagaatagatgggtgatgtctttccttatgttgctttttcaacatagcagaattaatgtagggagctaaatccagtggtgtgtgtgaatgcagaagggaatgcaccccacattcccatgatggaagtctgcgtaaccaataaattgtgcctttctcactc

SEQ ID NO: 9933 - DNA, 431 bp, Homo sapiens
  source 1..431: mol_type = unassigned DNA; mol_type = unassigned DNA
gctatctccacatttgtctggcaggctctgcaaaggggattgaggccagtggttctctgtgtcccagaggtgtccctgggagatgtagtgtcactggactagagattcatccttgctatctctgatgcaagacgattgtatcaattcaggctctggaggtatcggaattgcgtttacacttacagaattctgcccaatgaagatgataaattcactgttcaggcatccgaaggcgtctccatgaggttcttcaccaagctggaccagctcatcgagttttacaagaaggaaaacatggggctggtgacccatctgcaataccctgtgccgctggaggaagaggacacaggcgacgaccctgaggaggacacagaaagtgtcgtgtctccacccgagctgcccccaagaaacatcccgctgactgccagctc

SEQ ID NO: 9934 - DNA, 568 bp, Homo sapiens
  source 1..568: mol_type = unassigned DNA; mol_type = unassigned DNA
cccacccagaaggggtgcctctttggggctcattcctgtacctaccaacagcctgaccccttgctcctgttcagctgcccctgagggcagggcctggcaagaaggcatccgaaggcgtctccatgaggttcttcaccaagctggaccagctcatcgagttttacaagaaggaaaacatggggctggtgacccatctgcaataccctgtgccgctggaggaagaggacacaggcgacgaccctgaggaggacacagaaagtgtcgtgtctccacccgagctgcccccaagaaacatcccgctgactgccagctcctgtgaggccaaggaggttcctttttcaaacgagaatccccgagcgaccgagaccagccggccgagcctctccgagacattgttccagcgactgcaaagcatggacaccagtgggcttccagaagagcatcttaaggccatccaagattatttaagcactcagctcgcccaggactctgaatttgtgaagacagggtccagcagtcttcctcacctgaagaaactgaccacactgctctgcaaggagctctatgg

SEQ ID NO: 9935 - DNA, 569 bp, Homo sapiens
  source 1..569: mol_type = unassigned DNA
tggaggaagaggacacaggcgacgaccctgaggaggacacagtagaaagtgtcgtgtctccacccgagctgcccccaagaaacatcccgctgactgccagctcctgtgaggccaaggaggttcctttttcaaacgagaatccccgagcgaccgagaccagccggccgagcctctccgagacattgttccagcgactgcaaagcatggacaccagtgggcttccagaagagcatcttaaggccatccaagattatttaagcactcagctcgcccaggactctgaatttgtgaagacagggtccagcagtcttcctcacctgaagaaactgaccacactgctctgcaaggagctctatgggtaatggctggcccacgggggcgggcaggtgggggcggccaccaggtgagagaaacagctcatgagagcgacctctgcctctgcctggctgaacaaatgcctctgccgcactcacaataattgagtggtgagcacagcttggaaatctctgtggttgtttggaggtcttgttatcatggaatttgaacagtagcttgtgtgtgctgcagct

SEQ ID NO: 9936 - DNA, 3628 bp, Homo sapiens
  source 1..3628: mol_type = unassigned DNA
aagagagaaggcttctgccagctcctgcagcagatgaagaacaagcactcagagcagccggagcccgacatgatcaccatcttcatcggcacctggaacatgggtaacgccccccctcccaagaagatcacgtcctggtttctctccaaggggcagggaaagacgcgggacgactctgcggactacatcccccatgacatttacgtgatcggcacccaagaggaccccctgagtgagaaggagtggctggagatcctcaaacactccctgcaagaaatcaccagtgtgacttttaaaacagtcgccatccacacgctctggaacatccgcatcgtggtgctggccaagcctgagcacgagaaccggatcagccacatctgtactgacaacgtgaagacaggcattgcaaacacactggggaacaagggagccgtgggggtgtcgttcatgttcaatggaacctccttagggttcgtcaacagccacttgacttcaggaagtgaaaagaaactcaggcgaaaccaaaactatatgaacattctccggttcctggccctgggcgacaagaagctgagtccctttaacatcactcaccgcttcacgcacctcttctggtttggggatcttaactaccgtgtggatctgcctacctgggaggcagaaaccatcatccagaaaatcaagcagcagcagtacgcagacctcctgtcccacgaccagctgctcacagagaggagggagcagaaggtcttcctacacttcgaggaggaagaaatcacgtttgccccaacctaccgttttgagagactgactcgggacaaatacgcctacaccaagcagaaagcgacagggatgaagtacaacttgccttcctggtgtgaccgagtcctctggaagtcttatcccctggtgcacgtggtgtgtcagtcttatggcagtaccagcgacatcatgacgagtgaccacagccctgtctttgccacatttgaggcaggagtcacttcccagtttgtctccaagaacggtcccgggactgttgacagccaaggacagattgagtttctcaggtgctatgccacattgaagaccaagtcccagaccaaattctacctggagttccactcgagctgcttggagagttttgtcaagagtcaggaaggagaaaatgaagaaggaagtgagggggagctggtggtgaagtttggtgagactcttccaaagctgaagcccattatctctgaccctgagtacctgctagaccagcacatcctcatcagcatcaagtcctctgacagcgacgaatcctatggcgagggctgcattgcccttcggttagaggccacagaaacgcagctgcccatctacacgcctctcacccaccatggggagttgacaggccacttccagggggagatcaagctgcagacctctcagggcaagacgagggagaagctctatgactttgtgaagacggagcgtgatgaatccagtgggccaaagaccctgaagagcctcaccagccacgaccccatgaagcagtgggaagtcactagcagggcccctccgtgcagtggctccagcatcactgaaatcatcaaccccaactacatgggagtggggccctttgggccaccaatgcccctgcacgtgaagcagaccttgtcccctgaccagcagcccacagcctggagctacgaccagccgcccaaggactccccgctggggccctgcaggggagaaagtcctccgacacctcccggccagccgcccatatcacccaagaagtttttaccctcaacagcaaaccggggtctccctcccaggacacaggagtcaaggcccagtgacctggggaagaacgcaggggacacgctgcctcaggaggacctgccgctgacgaagcccgagatgtttgagaaccccctgtatgggtccctgagttccttccctaagcctgctcccaggaaggaccaggaatcccccaaaatgccgcggaaggaacccccgccctgcccggaacccggcatcttgtcgcccagcatcgtgctcaccaaagcccaggaggctgatcgcggcgaggggcccggcaagcaggtgcccgcgccccggctgcgctccttcacgtgctcatcctctgccgagggcagggcggccggcggggacaagagccaagggaagcccaagaccccggtcagctcccaggccccggtgccggccaagaggcccatcaagccttccagatcggaaatcaaccagcagaccccgcccaccccgacgccgcggccgccgctgccagtcaagagcccggcggtgctgcacctccagcactccaagggccgcgactaccgcgacaacaccgagctcccgcatcacggcaagcaccggccggaggaggggccaccagggcctctaggcaggactgccatgcagtgaagccctcagtgagctgccactgagtcgggagcccagaggaacggcgtgaagccactggaccctctcccgggacctcctgctggctcctcctgcccagcttcctatgcaaggctttgtgttttcaggaaagggcctagcttctgtgtggcccacagagttcactgcctgtgagacttagcaccaagtgctgaggctggaagaaaaacgcacaccagacgggcaacaaacagtctgggtccccagctcgctcttggtacttgggaccccagtgcctcgttgagggcgccattctgaagaaaggaactgcagcgccgatttgagggtggagatatagataataataatattaataataataatggccacatggatcgaacactcatgatgtgccaagtgctgtgctaagtgctttacgaacattcgtcatatcaggatgacctcgagagctgaggctctagccacctaaaaccacgtgcccaaacccaccagtttaaaacggtgtgtgttcggaggggtgaaagcattaagaagcccagtgccctcctggagtgagacaagggctcggccttaaggagctgaagagtctgggtagcttgtttagggtacaagaagcctgttctgtccagcttcagtgacacaagctgctttagctaaagtcccgcgggttccggcatggctaggctgagagcagggatctacctggcttctcagttctttggttggaaggagcaggaaatcagctcctattctccagtggagagatctggcctcagcttgggctagagatgccaaggcctgtgccaggttccctgtgccctcctcgaggtgggcagccatcaccagccacagttaagccaagccccccaacatgtattccatcgtgctggtagaagagtctttgctgttgctcccgaaagccgtgctctccagcctggctgccagggagggtgggcctcttggttccaggctcttgaaatagtgcagccttttcttcctatctctgtggctttcagctctgcttccttggttattaggagaatagatgggtgatgtctttccttatgttgctttttcaacatagcagaattaatgtagggagctaaatccagtggtgtgtgtgaatgcagaagggaatgcaccccacattcccatgatggaagtctgcgtaaccaataaattgtgcctttctcactca

SEQ ID NO: 9937 - DNA, 401 bp, Homo sapiens
  source 1..401: mol_type = unassigned DNA
cgacatgatcaccatcttcatcggcacctggaacatgggtaacgccccccctcccaagaagatcacgtcctggtttctctccaaggggcagggaaagacgcgggacgactctgcggactacatcccccatgacatttacgtgatcggcacccaagaggaccccctgagtgagaaggagtggctggagatcctcaaacactccctgcaagaaatcaccagtgtgacttttaaaacagtgagcagctggctgcacgctgggtcgccatccacacgctctggaacatccgcatcgtggtgctggccaagcctgagcacgagaaccggatcagccacatctgtactgacaacgtgaagacaggcattgcaaacacactggggaacaagggagccgtgggggtgtc

SEQ ID NO: 9938 - DNA, 527 bp, Homo sapiens
  source 1..527: mol_type = unassigned DNA
caccaggtcgccatccacacgctctggaacatccgcatcgtggtgctggccaagcctgagcacgagaaccggatcagccacatctgtactgacaacgtgaagacaggcattgcaaacacactggttcccaggtgatgtgcagctgctggtccagggaactccctttgggaaccactgacctagaatagatcagaacgttggcagaaaaagggaacaagggagccgtgggggtgtcgttcatgttcaatggaacctccttagggttcgtcaacagccacttgacttcaggaagtgaaaagaaactcaggcgaaaccaaaactatatgaacattctccggttcctggccctgggcgacaagaagctgagtccctttaacatcactcaccgcttcacgcacctcttctggtttggggatcttaactaccgtgtggatctgcctacctgggaggcagaaaccatcatccagaaaatcaagcagcagcagtacgcagacctcctgtcccacgaccagctgctcacagagagg

SEQ ID NO: 9939 - DNA, 958 bp, Homo sapiens
  source 1..958: mol_type = unassigned DNA
tgcagcaccatagtgacctcacgtgtggaggaattttgtctgaaggtcagaaaagatatttccttgtgtcattagcctgatggaccgctaactagcactgtttctaaagcagaaagcctcctctggggcctccttacaaatccaagctgatcttgcctagctggggcccaggaatgaagacagccatctagaatcttcactgttctgattctctgctgagcagatgctgctgctcctggtcccctgccctctgtacacccaatgtggcctcaaatgccctttgcatcctggctgtgccatatttgcacactaaggagttctgctgcagcagggctggagggctaagtctcacttccccccacctgctatgctcctcgccccacacctatggcaggagtgacttcctgccacagtggagggggaaccagtgaccccgtgctagatggccgctttttccttgcattaggcgaaaccaaaactatatgaacattctccggttcctggccctgggcgacaagaagctgagtccctttaacatcactcaccgcttcacgcacctcttctggtttggggatcttaactaccgtgtggatctgcctacctgggaggcagaaaccatcatccagaaaatcaagcagcagcagtacgcagacctcctgtcccacgaccagctgctcacagagaggagggagcagaaggtcttcctacacttcgaggaggaagaaatcacgtttgccccaacctaccgttttgagagactgactcgggacaaatacgcctacaccaagcagaaagcgacagggatgaagtacaacttgccttcctggtgtgaccgagtcctctggaagtcttatcccctggtgcacgtggtgtgtcagtcttatggcagtaccagcgacatcatgacgagtgaccacagccctgtctttgccacatttgaggcaggagtcacttccca

SEQ ID NO: 9940 - DNA, 439 bp, Homo sapiens
  source 1..439: mol_type = unassigned DNA
attaggcgaaaccaaaactatatgaacattctccggttcctggccctgggcgacaagaagctgagtccctttaacatcactcaccgcttcacgcacctcttctggtttggggatcttaactaccgtgtggatctgcctacctgggaggcagaaaccatcatccagaaaatcaagcagcagcagtacgcagacctcctgtcccacgaccagctgctcacagagaggagggagcagaaggtcttcctacacttcgaggaggaagaaatcacgtttgccccaacctaccgttttgagagactgactcgggacaaatacgcctacaccaagcagaaagcgacaggggtgagtcctcttcatagacaccttccctgccctccatctcctccccgctggtgtctgttcccaaaaggtgaacagaaagtgtcttcatccattaggc

SEQ ID NO: 9941 - DNA, 568 bp, Homo sapiens
  source 1..568: mol_type = unassigned DNA
gccaccctgccaccatcactctgcagcccgggtcatccagctgcccgcccccagccccgaagcttgtcaggcctggatcagcagggcttctcaccagaggcccgggcatgttcttgttccaggaggcagaaaccatcatccagaaaatcaagcagcagcagtacgcagacctcctgtcccacgaccagctgctcacagagaggagggagcagaaggtcttcctacacttcgaggaggaagaaatcacgtttgccccaacctaccgttttgagagactgactcgggacaaatacgcctacaccaagcagaaagcgacagggatgaagtacaacttgccttcctggtgtgaccgagtcctctggaagtcttatcccctggtgcacgtggtgtgtcagtcttatggcagtaccagcgacatcatgacgagtgaccacagccctgtctttgccacatttgaggcaggagtcacttcccagtttgtctccaagaacggtcccgggactgttgacagccaaggacagattgagtttctcaggtgctatgccacattgaagaccaagtcccagac

SEQ ID NO: 9942 - DNA, 588 bp, Homo sapiens
  source 1..588: mol_type = unassigned DNA
aagaccctgaagagcctcaccagccacgaccccatgaagcagtgggaagtcactagcagggcccctccgtgcagtggctccagcatcactgaaatcatcaaccccaactacatgggagtggggccctttgggccaccaatgcccctgcacgtgaagcagaccttgtcccctgaccagcagcccacagcctggagctacgaccagccgcccaaggactccccgctggggccctgcaggggagaaagtcctccgacacctcccggccagccgcccatatcacccaagaagtttttaccctcaacagcaaaccggggtctccctcccaggacacaggagtcaagtgaagccctcagtgagctgccactgagtcgggagcccagaggaacggcgtgaagccactggaccctctcccgggacctcctgctggctcctcctgcccagcttcctatgcaaggctttgtgttttcaggaaagggcctagcttctgtgtggcccacagagttcactgcctgtgagacttagcaccaagtgctgaggctggaagaaaaacgcacaccagacgggcaacaaacagtctgggtccccagc

SEQ ID NO: 9943 - DNA, 528 bp, Homo sapiens
  source 1..528: mol_type = unassigned DNA
caccgagctcccgcatcacggcaagcaccggccggaggaggggccaccagggcctctaggcaggactgccatgcaggtgcgctgcgccacacgtgggttcgtgtgcatttgtgtgtgtgtgcatgcgtgagtgcgtatgtgtgtacctatgcatatgtgtgtgcatgtgtgtgtgcacgcatgcatatgtgcgtgcatgtgtgaacgcatgcatgtgcacacatgcgagtgatggtcctgggaactgctccatgagaagggagagtcaggatttgaacccaggtctgcctgtcccacacatccctgaccctgcattgcctctgcagcagttgttaaaaggaagaaaggcggggctgtggataaacttagtctagtgtcagtcccagaggaagaagattccataaagaaaaggagcctaaatcatttatatctcattgttattataaatttgttttgcaactgagtttcgccaggtgatctgcctgcctgggcctcccaaagttctgggattacaggcatgagccactg

SEQ ID NO: 9944 - DNA, 5274 bp, Homo sapiens; identical to SEQ ID NO: 9930
  source 1..5274: mol_type = unassigned DNA

SEQ ID NO: 9945 - DNA, 2545 bp, Homo sapiens; identical to SEQ ID NO: 9931
  source 1..2545: mol_type = unassigned DNA; mol_type = unassigned DNA

SEQ ID NO: 9946 - DNA, 4845 bp, Homo sapiens; identical to SEQ ID NO: 9932
  source 1..4845: mol_type = unassigned DNA; mol_type = unassigned DNA

SEQ ID NO: 9947 - DNA, 431 bp, Homo sapiens; identical to SEQ ID NO: 9933
  source 1..431: mol_type = unassigned DNA; mol_type = unassigned DNA

SEQ ID NO: 9948 - DNA, 568 bp, Homo sapiens; identical to SEQ ID NO: 9934
  source 1..568: mol_type = unassigned DNA; mol_type = unassigned DNA

SEQ ID NO: 9949 - DNA, 569 bp, Homo sapiens; identical to SEQ ID NO: 9935
  source 1..569: mol_type = unassigned DNA; mol_type = unassigned DNA

SEQ ID NO: 9950 - DNA, 3628 bp, Homo sapiens; identical to SEQ ID NO: 9936
  source 1..3628: mol_type = unassigned DNA; mol_type = unassigned DNA

SEQ ID NO: 9951 - DNA, 401 bp, Homo sapiens; identical to SEQ ID NO: 9937
  source 1..401: mol_type = unassigned DNA; mol_type = unassigned DNA

SEQ ID NO: 9952 - DNA, 527 bp, Homo sapiens; identical to SEQ ID NO: 9938
  source 1..527: mol_type = unassigned DNA; mol_type = unassigned DNA

SEQ ID NO: 9953 - DNA, 958 bp, Homo sapiens; identical to SEQ ID NO: 9939
  source 1..958: mol_type = unassigned DNA; mol_type = unassigned DNA

SEQ ID NO: 9954 - DNA, 439 bp, Homo sapiens; identical to SEQ ID NO: 9940
  source 1..439: mol_type = unassigned DNA; mol_type = unassigned DNA

SEQ ID NO: 9955 - DNA, 568 bp, Homo sapiens; identical to SEQ ID NO: 9941
  source 1..568: mol_type = unassigned DNA; mol_type = unassigned DNA

SEQ ID NO: 9956 - DNA, 588 bp, Homo sapiens; identical to SEQ ID NO: 9942
  source 1..588: mol_type = unassigned DNA; mol_type = unassigned DNA

SEQ ID NO: 9957 - DNA, 528 bp, Homo sapiens; identical to SEQ ID NO: 9943
  source 1..528: mol_type = unassigned DNA; mol_type = unassigned DNA

SEQ ID NO: 9958 - DNA, 2954 bp, Homo sapiens
  source 1..2954: mol_type = unassigned DNA; mol_type = unassigned DNA
ggcctctgtaaggagacttggagtcgctgcagccaaggctggagccatgagacggccccctggcaatggagaggcggccagcgaaggtccaggtggctggggtctatggggagtccaggagtccaggaggctgtgctgtgccggtcacgaccgctgcaagcaggctttgctgcagattgggatcaacatgatggcactgcctggaggtcgccacctggactccgtcaccctgccgggtcagcggctacacctgatgcaggtggactcagtccagcgctggatggaagatctgaagctcatgaccgagtgcgagtgcatgtgtgtcctgcaggccaagcccatcagcctggaagaggatgcacagggtgacctcatcctggcaggtggccctggccctggagaccccctgcagctgctgctcaaacggggttgggtcattagcacagagctgcgcaggatcgggcagaagctggcccaggaccgctgggcacgggtgcacagcatgagcgtgcgtctgacctgccatgcccgctccatggtcagcgagtacagtgctgtcagcaggaactccttgaaggaaatgggcgagattgagaagctgctaatggagaaatgctcggagctctcggcagtcacagagaggtgccttcaggttgagaatgagcatgtcctgaagtcaatgaaggcctgcgtgagtgagaccctgagcatgctgggccagcactttggtcagctgctggagctggccctgacacgggaggttcaggcactggtgagaaaaattgatgcctcagacaatatctacaccacagagtccaccacagggaacctgttcagcctgacccaggagggggctcccttgtgccgcatcatagccaaggagggtggggtcgtagcactcttcaaggtttgccggcaggacagtttccggtgcttgtacccccaggcgctccgcacgctggcctccatctgctgcgtggaagagggtgtccaccagctggagaaggtggatggcgttctgtgcttggccgacatcctgaccgacaacagccactcagaggccacacgggctgaggctgcggctgtggtggcccaggtcacctccccacacctgcccgtcacccagcacctcagtagcttcctggagagcatggaggagatcgtgacagccctcgtcaaactgtgccaagaggcctcatcaggggaagtcttcctactggcctctgcggcccttgccaacatcacgttctttgacacaatggcctgcgagatgctcctgcagttgaatgccatccgtgttctcctggaagcctgcagtgacaagcagagagtggacacgccttacactcgggaccagattgtgaccatcttggcaaacatgtctgtcctagaacagtgtgcctctgacatcattcaggaaaatggggtccagcttatcatgggcatgctgtctgaaaaaccaaggtctgggactcctgctgaagtggcagcctgtgagcgagtccagcagaaagctgcagtgaccctggctcgtctcagccgagacccagatgtggcacgggaggccgtgcggctcagctgcatgtcccgtctcatcgagctctgcagatccccatcagagaggaacagcagtgacgccgtgcttgtggcctgcctggctgctctgcgtagattggctggggtctgccctgaaggcctccaggactctgactttcagcagttggtccagcctcggctggtggactccttcttactctgcagcaacatggaggagagttttgtgtagtgagtgtgggcgaagaaatacatttggctgttctcacaccccctctgactatgcaccagtgaacacatctgagtacataccagctctcctcatcttcttatttatacttaacttatttttgtgtgaaataaatggaggacaaaatcttagagcaacatcatcaaacagtctttggtccttgagaatcttctttgtgttttattttttgatttctgtagcttttcagttgcagatgttgaaattcgtaatgacaaatatgacaaattgtcatgggtgattccacttcatcttattttttctactctcactatacaatcttgcctcattttttaaaactttggaaccagaggatttcaactgcctagcaagttttttttttaagttggatttgctcttcccaaaaatctaaaatgaatttaataattgggtagaatatattggaaagaagtttctttttctttaataaatggaatcatataaaatgtatcccggattttcttattaaattgtattttaaactaggttcttgcttcccaggtttcattccccaaaaacttttccaaccattaaaagtacacacagaattgtcttgttttcataggtgtataaataggttaagttctgagtgacttagtgagaaaccaaagtgactttcaaaaatacacccaaaggcaccagaaaccctgcttcctttggcttctttgcttttgtgtaacctcctgttcacctcctggtgaatagaatcctcagatgaggcttattgaatgattgattcctcctcaaaagtatacttgaaagcagtggtgtgctgaagccagctcatgcccactcacaagggacaactgtgagaatttcttcctaactctgcactcagtgaccttgcgttggtagccatgagctacttcatgagccctcatgttgaaattggccatagtgggagtatttacaccacagaaattcacagatgctataaagcacagctttcgctttttttttttttagagagagctggtttaccaatttcactgcttgaaagtatcacaaaaatctggggatccttttgaaaatataaatgccatcatattgtgatataatttatacaatataatataattgtgtaaaatcatgattataataatgtttcaataaacatttcttaaattcccaa

SEQ ID NO: 9959 - DNA, 2878 bp, Homo sapiens
  source 1..2878: mol_type = unassigned DNA; mol_type = unassigned DNA
tctggagctccagctgcgccccgccaccactggccgctcgcactaccagcctgtctcgcacgctaaggtcacgaccgctgcaagcaggctttgctgcagattgggatcaacatgatggcactgcctggaggtcgccacctggactccgtcaccctgccgggtcagcggctacacctgatgcaggtggactcagtccagcgctggatggaagatctgaagctcatgaccgagtgcgagtgcatgtgtgtcctgcaggccaagcccatcagcctggaagaggatgcacagggtgacctcatcctggcaggtggccctggccctggagaccccctgcagctgctgctcaaacggggttgggtcattagcacagagctgcgcaggatcgggcagaagctggcccaggaccgctgggcacgggtgcacagcatgagcgtgcgtctgacctgccatgcccgctccatggtcagcgagtacagtgctgtcagcaggaactccttgaaggaaatgggcgagattgagaagctgctaatggagaaatgctcggagctctcggcagtcacagagaggtgccttcaggttgagaatgagcatgtcctgaagtcaatgaaggcctgcgtgagtgagaccctgagcatgctgggccagcactttggtcagctgctggagctggccctgacacgggaggttcaggcactggtgagaaaaattgatgcctcagacaatatctacaccacagagtccaccacagggaacctgttcagcctgacccaggagggggctcccttgtgccgcatcatagccaaggagggtggggtcgtagcactcttcaaggtttgccggcaggacagtttccggtgcttgtacccccaggcgctccgcacgctggcctccatctgctgcgtggaagagggtgtccaccagctggagaaggtggatggcgttctgtgcttggccgacatcctgaccgacaacagccactcagaggccacacgggctgaggctgcggctgtggtggcccaggtcacctccccacacctgcccgtcacccagcacctcagtagcttcctggagagcatggaggagatcgtgacagccctcgtcaaactgtgccaagaggcctcatcaggggaagtcttcctactggcctctgcggcccttgccaacatcacgttctttgacacaatggcctgcgagatgctcctgcagttgaatgccatccgtgttctcctggaagcctgcagtgacaagcagagagtggacacgccttacactcgggaccagattgtgaccatcttggcaaacatgtctgtcctagaacagtgtgcctctgacatcattcaggaaaatggggtccagcttatcatgggcatgctgtctgaaaaaccaaggtctgggactcctgctgaagtggcagcctgtgagcgagtccagcagaaagctgcagtgaccctggctcgtctcagccgagacccagatgtggcacgggaggccgtgcggctcagctgcatgtcccgtctcatcgagctctgcagatccccatcagagaggaacagcagtgacgccgtgcttgtggcctgcctggctgctctgcgtagattggctggggtctgccctgaaggcctccaggactctgactttcagcagttggtccagcctcggctggtggactccttcttactctgcagcaacatggaggagagttttgtgtagtgagtgtgggcgaagaaatacatttggctgttctcacaccccctctgactatgcaccagtgaacacatctgagtacataccagctctcctcatcttcttatttatacttaacttatttttgtgtgaaataaatggaggacaaaatcttagagcaacatcatcaaacagtctttggtccttgagaatcttctttgtgttttattttttgatttctgtagcttttcagttgcagatgttgaaattcgtaatgacaaatatgacaaattgtcatgggtgattccacttcatcttattttttctactctcactatacaatcttgcctcattttttaaaactttggaaccagaggatttcaactgcctagcaagttttttttttaagttggatttgctcttcccaaaaatctaaaatgaatttaataattgggtagaatatattggaaagaagtttctttttctttaataaatggaatcatataaaatgtatcccggattttcttattaaattgtattttaaactaggttcttgcttcccaggtttcattccccaaaaacttttccaaccattaaaagtacacacagaattgtcttgttttcataggtgtataaataggttaagttctgagtgacttagtgagaaaccaaagtgactttcaaaaatacacccaaaggcaccagaaaccctgcttcctttggcttctttgcttttgtgtaacctcctgttcacctcctggtgaatagaatcctcagatgaggcttattgaatgattgattcctcctcaaaagtatacttgaaagcagtggtgtgctgaagccagctcatgcccactcacaagggacaactgtgagaatttcttcctaactctgcactcagtgaccttgcgttggtagccatgagctacttcatgagccctcatgttgaaattggccatagtgggagtatttacaccacagaaattcacagatgctataaagcacagctttcgctttttttttttttagagagagctggtttaccaatttcactgcttgaaagtatcacaaaaatctggggatccttttgaaaatataaatgccatcatattgtgatataatttatacaatataatataattgtgtaaaatcatgattataataatgtttcaataaacatttcttaaattcccaa

SEQ ID NO: 9960 - DNA, 2237 bp, Homo sapiens
  source 1..2237: mol_type = unassigned DNA; mol_type = unassigned DNA
gttgtgccatcctgccctctattttcagggtcacgaccgctgcaagcaggctttgctgcagattgggatcaacatgatggcactgcctggaggtcgccacctggactccgtcaccctgccgggtcagcggctacacctgatgcaggtggactcagtccagcgctggatggaagatctgaagctcatgaccgagtgcgagtgcatgtgtgtcctgcaggccaagcccatcagcctggaagaggatgcacagggtgacctcatcctggcaggtggccctggccctggagaccccctgcagctgctgctcaaacggggttgggtcattagcacagagctgcgcaggatcgggcagaagctggcccaggaccgctgggcacgggtgcacagcatgagcgtgcgtctgacctgccatgcccgctccatggtcagcgagtacagtgctgtcagcaggaactccttgaaggaaatgggcgagattgagaagctgctaatggagaaatgctcggagctctcggcagtcacagagaggtgccttcaggttgagaatgagcatgtcctgaagtcaatgaaggcctgcgtgagtgagaccctgagcatgctgggccagcactttggtcagctgctggagctggccctgacacgggaggttcaggcactggtgagaaaaattgatgcctcagacaatatctacaccacagagtccaccacagggaacctgttcagcctgacccaggagggggctcccttgtgccgcatcatagccaaggagggtggggtcgtagcactcttcaaggtttgccggcaggacagtttccggtgcttgtacccccaggcgctccgcacgctggcctccatctgctgcgtggaagagggtgtccaccagctggagaaggtggatggcgttctgtgcttggccgacatcctgaccgacaacagccactcagaggccacacgggctgaggctgcggctgtggtggcccaggtcacctccccacacctgcccgtcacccagcacctcagtagcttcctggagagcatggaggagatcgtgacagccctcgtcaaactgtgccaagaggcctcatcaggggaagtcttcctactggcctctgcggcccttgccaacatcacgttctttgacacaatggcctgcgagatgctcctgcagttgaatgccatccgtgttctcctggaagcctgcagtgacaagcagagagtggacacgccttacactcgggaccagattgtgaccatcttggcaaacatgtctgtcctagaacagtgtgcctctgacatcattcaggaaaatggggtccagcttatcatgggcatgctgtctgaaaaaccaaggtctgggactcctgctgaagtggcagcctgtgagcgagtccagcagaaagctgcagtgaccctggctcgtctcagccgagacccagatgtggcacgggaggccgtgcggctcagctgcatgtcccgtctcatcgagctctgcagatccccatcagagaggaacagcagtgacgccgtgcttgtggcctgcctggctatggggatacagctgcaggtaaaaaagacaaacatctctgccctcctgctgtggtttttattttggcacattcaaggctgctctgcgtagattggctggggtctgccctgaaggcctccaggactctgactttcagcagttggtccagcctcggctggtggactccttcttactctgcagcaacatggaggagagttttgtgtagtgagtgtgggcgaagaaatacatttggctgttctcacaccccctctgactatgcaccagtgaacacatctgagtacataccagctctcctcatcttcttatttatacttaacttatttttgtgtgaaataaatggaggacaaaatcttagagcaacatcatcaaacagtctttggtccttgagaatcttctttgtgttttattttttgatttctgtagcttttcagttgcagatgttgaaattcgtaatgacaaatatgacaaattgtcatgggtgattccacttcatcttattttttctactctcactatacaatcttgcctcattttttaaaactttggaaccagaggatttcaactgcctagcaagttttttttttaagttggatttgctcttcccaaaaatctaaaatgaatttaataattgggtagaatatattggaaagaagtttctttttctttaataaatggaatcatataaaatgta

SEQ ID NO: 9961 - DNA, 1702 bp, Homo sapiens
  source 1..1702: mol_type = unassigned DNA; mol_type = unassigned DNA
ccatcctgccctctattttcagggtcacgaccgctgcaagcaggctttgctgcagattgggatcaacatgatggcactgcctggaggtcgccacctggactccgtcaccctgccgggtcagcggctacacctgatgcaggtggactcagtccagcgctggatggaagatctgaagctcatgaccgagtgcgagtgcatgtgtgtcctgcaggccaagcccatcagcctggaagaggatgcacagggtgacctcatcctggcaggtggccctggccctggagaccccctgcagctgctgctcaaacggggttgggtcattagcacagagctgcgcaggatcgggcagaagctggcccaggaccgctgggcacgggtgcacagcatgagcgtgcgtctgacctgccatgcccgctccatggtcagcgagtacagtgctgtcagcaggaactccttgaaggaaatgggcgagattgagaagctgctaatggagaaatgctcggagctctcggcagtcacagagaggtgccttcaggttgagaatgagcatgtcctgaagtcaatgaaggcctgcgtgagtgagaccctgagcatgctgggccagcactttggtcagctgctggagctggccctgacacgggaggttcaggcactggtgagaaaaattgatgcctcagacaatatctacaccacagagtccaccacagggaacctgttcagcctgacccaggagggggctcccttgtgccgcatcatagccaaggagggtggggtcgtagcactcttcaaggtttgccggcaggacagtttccggtgcttgtacccccaggcgctccgcacgctggcctccatctgctgcgtggaagagggtgtccaccagctggagaaggtggatggcgttctgtgcttggccgacatcctgaccgacaacagccactcagaggccacacgggctgaggctgcggctgtggtggcccaggtcacctccccacacctgcccgtcacccagcacctcagtagcttcctggagagcatggaggagatcgtgacagccctcgtcaaactgtgccaagaggcctcatcaggggaagtcttcctactggcctctgcggcccttgccaacatcacgttctttgacacaatggcctgcgagatgctcctgcagttgaatgccatccgtgttctcctggaagcctgcagtgacaagcagagagtggacacgccttacactcgggaccagattgtgaccatcttggcaaacatgtctgtcctagaacagtgtgcctctgacatcattcaggaaaatggggtccagcttatcatgggcatgctgtctgaaaaaccaaggtctgggactcctgctgaagtggcagcctgtgagcgagtccagcagaaagctgcagtgaccctggctcgtctcagccgagacccagatgtggcacgggaggccgtgcggctcagctgcatgtcccgtctcatcgagctctgcagatccccatcagagaggaacagcagtgacgccgtgcttgtggcctgcctggctgctctgcgtagattggctggggtctgccctgaaggcctccaggactctgactttcagcagttggtccagcctcggctggtggactccttcttactctgcagcaacatggaggagagttttgtgtagtgagtgtgggcgaagaaatacatttggctgttctca

SEQ ID NO: 9962 - DNA, 1576 bp, Homo sapiens
  source 1..1576: mol_type = unassigned DNA; mol_type = unassigned DNA
ccatcctgccctctattttcagggtcacgaccgctgcaagcaggctttgctgcagattgggatcaacatgatggcactgcctggaggtcgccacctggactccgtcaccctgccgggtcagcggctacacctgatgcaggtggactcagtccagcgctggatggaagatctgaagctcatgaccgagtgcgagtgcatgtgtgtcctgcaggccaagcccatcagcctggaagaggatgcacagggtgacctcatcctggcaggtggccctggccctggagaccccctgcagctgctgctcaaacggggttgggtcattagcacagagctgcgcaggatcgggcagaagctggcccaggaccgctgggcacgggtgcacagcatgagcgtgcgtctgacctgccatgcccgctccatggtcagcgagtacagtgctgtcagcaggaactccttgaaggaaatgggcgagattgagaagctgctaatggagaaatgctcggagctctcggcagtcacagagaggtgccttcaggttgagaatgagcatgtcctgaagtcaatgaaggcctgcgtgagtgagaccctgagcatgctgggccagcactttggtcagctgctggagctggccctgacacgggaggttcaggcactggtgagaaaaattgatgcctcagacaatatctacaccacagagtccaccacagggaacctgttcagcctgacccaggagggggctcccttgtgccgcatcatagccaaggtggatggcgttctgtgcttggccgacatcctgaccgacaacagccactcagaggccacacgggctgaggctgcggctgtggtggcccaggtcacctccccacacctgcccgtcacccagcacctcagtagcttcctggagagcatggaggagatcgtgacagccctcgtcaaactgtgccaagaggcctcatcaggggaagtcttcctactggcctctgcggcccttgccaacatcacgttctttgacacaatggcctgcgagatgctcctgcagttgaatgccatccgtgttctcctggaagcctgcagtgacaagcagagagtggacacgccttacactcgggaccagattgtgaccatcttggcaaacatgtctgtcctagaacagtgtgcctctgacatcattcaggaaaatggggtccagcttatcatgggcatgctgtctgaaaaaccaaggtctgggactcctgctgaagtggcagcctgtgagcgagtccagcagaaagctgcagtgaccctggctcgtctcagccgagacccagatgtggcacgggaggccgtgcggctcagctgcatgtcccgtctcatcgagctctgcagatccccatcagagaggaacagcagtgacgccgtgcttgtggcctgcctggctgctctgcgtagattggctggggtctgccctgaaggcctccaggactctgactttcagcagttggtccagcctcggctggtggactccttcttactctgcagcaacatggaggagagttttgtgtagtgagtgtgggcgaagaaatacatttggctgttctca

SEQ ID NO: 9963 - DNA, 1077 bp, Homo sapiens
  source 1..1077: mol_type = unassigned DNA; mol_type = unassigned DNA
cactcacaagctcgggttaccaatacatagtgttagatgcgaagggaatgggaagccaggatggagacccactctcctatttggcaaaacttgctaatgaggctggacaacagccttgccttgaggcttcaatctccactagtccaggcactggtgagaaaaattgatgcctcagacaatatctacaccacagagtccaccacagggaacctgttcagcctgacccaggagggggctcccttgtgccgcatcatagccaaggtggatggcgttctgtgcttggccgacatcctgaccgacaacagccactcagaggccacacgggctgaggctgcggctgtggtggcccaggtcacctccccacacctgcccgtcacccagcacctcagtagcttcctggagagcatggaggagatcgtgacagccctcgtcaaactgtgccaagaggcctcatcaggggaagtcttcctactggcctctgcggcccttgccaacatcacgttctttgacacaatggcctgcgagatgctcctgcagttgaatgccatccgtgttctcctggaagcctgcagtgacaagcagagagtggacacgccttacactcgggaccagattgtgaccatcttggcaaacatgtctgtcctagaacagtgtgcctctgacatcattcaggaaaatggggtccagcttatcatgggcatgctgtctgaaaaaccaaggtctgggactcctgctgaagtggcagcctgtgagcgagtccagcagaaagctgcagtgaccctggctcgtctcagccgagacccagatgtggcacgggaggccgtgcggctcagctgcatgtcccgtctcatcgagctctgcagatccccatcagagaggaacagcagtgacgccgtgcttgtggcctgcctggctgctctgcgtagattggctggggtctgccctgaaggcctccaggactctgactttcagcagttggtccagcctcggctggtggactccttcttactctgcagcaacatggaggagagttttgtgtagtgagtgtgggcgaagaaatacatttggctgttctca

SEQ ID NO: 9964 - DNA, 763 bp, Homo sapiens
  source 1..763: mol_type = unassigned DNA; mol_type = unassigned DNA
agtaggtgagggttagtatccaggaaagaagcttggatggaagaagtcaatccagaattgtgaccatcttggcaaacatgtctgtcctagaacagtgtgcctctgacatcattcaggaaaatggggtccagcttatcatgggcatgctgtctgaaaaaccaaggtctgggactcctgctgaagtggcagcctgtgagcgagtccagcagaaagctgcagtgaccctggctcgtctcagccgagacccagatgtggcacgggaggccgtgcggctcagctgcatgtcccgtctcatcgagctctgcagatccccatcagagaggaacagcagtgacgccgtgcttgtggcctgcctggctgctctgcgtagattggctggggtctgccctgaaggcctccaggactctgactttcagcagttggtccagcctcggctggtggactccttcttactctgcagcaacatggaggagagttttgtgtagtgagtgtgggcgaagaaatacatttggctgttctcacaccccctctgactatgcaccagtgaacacatctgagtacataccagctctcctcatcttcttatttatacttaacttatttttgtgtgaaataaatggaggacaaaatcttagagcaacatcatcaaacagtctttggtccttgagaatcttctttgtgttttattttttgatttctgtagcttttcagttgcagatgttgaaattcgtaatgacaaatatgacaaattgtcatgggtgat

SEQ ID NO: 9965 - DNA, 2943 bp, Homo sapiens
  source 1..2943: mol_type = unassigned DNA; mol_type = unassigned DNA
gttgtgccatcctgccctctattttcagggtcacgaccgctgcaagcaggctttgctgcagattgggatcaacatgatggcactgcctggaggtcgccacctggactccgtcaccctgccgggtcagcggctacacctgatgcaggtggactcagtccagcgctggatggaagatctgaagctcatgaccgagtgcgagtgcatgtgtgtcctgcaggccaagcccatcagcctggaagaggatgcacagggtgacctcatcctggcaggtggccctggccctggagaccccctgcagctgctgctcaaacggggttgggtcattagcacagagctgcgcaggatcgggcagaagctggcccaggaccgctgggcacgggtgcacagcatgagcgtgcgtctgacctgccatgcccgctccatggtcagcgagtacagtgctgtcagcaggaactccttgaaggaaatgggcgagattgagaagctgctaatggagaaatgctcggagctctcggcagtcacagagaggtgccttcaggttgagaatgagcatgtcctgaagtcaatgaaggcctgcgtgagtgagaccctgagcatgctgggccagcactttggtcagctgctggagctggccctgacacgggaggttcaggtggagtctcactctgtcaccaggctggagtgcagtggtgcaatctcggctcaatgcaacctccgcctcctgggttcaagtgattcccctgcctcagcctcccaggcactggtgagaaaaattgatgcctcagacaatatctacaccacagagtccaccacagggaacctgttcagcctgacccaggagggggctcccttgtgccgcatcatagccaaggagggtggggtcgtagcactcttcaaggtttgccggcaggacagtttccggtgcttgtacccccaggcgctccgcacgctggcctccatctgctgcgtggaagagggtgtccaccagctggagaaggtggatggcgttctgtgcttggccgacatcctgaccgacaacagccactcagaggccacacgggctgaggctgcggctgtggtggcccaggtcacctccccacacctgcccgtcacccagcacctcagtagcttcctggagagcatggaggagatcgtgacagccctcgtcaaactgtgccaagaggcctcatcaggggaagtcttcctactggcctctgcggcccttgccaacatcacgttctttgacacaatggcctgcgagatgctcctgcagttgaatgccatccgtgttctcctggaagcctgcagtgacaagcagagagtggacacgccttacactcgggaccagattgtgaccatcttggcaaacatgtctgtcctagaacagtgtgcctctgacatcattcaggaaaatggggtccagcttatcatgggcatgctgtctgaaaaaccaaggtctgggactcctgctgaagtggcagcctgtgagcgagtccagcagaaagctgcagtgaccctggctcgtctcagccgagacccagatgtggcacgggaggccgtgcggctcagctgcatgtcccgtctcatcgagctctgcagatccccatcagagaggaacagcagtgacgccgtgcttgtggcctgcctggctgctctgcgtagattggctggggtctgccctgaaggcctccaggactctgactttcagcagttggtccagcctcggctggtggactccttcttactctgcagcaacatggaggagagttttgtgtagtgagtgtgggcgaagaaatacatttggctgttctcacaccccctctgactatgcaccagtgaacacatctgagtacataccagctctcctcatcttcttatttatacttaacttatttttgtgtgaaataaatggaggacaaaatcttagagcaacatcatcaaacagtctttggtccttgagaatcttctttgtgttttattttttgatttctgtagcttttcagttgcagatgttgaaattcgtaatgacaaatatgacaaattgtcatgggtgattccacttcatcttattttttctactctcactatacaatcttgcctcattttttaaaactttggaaccagaggatttcaactgcctagcaagttttttttttaagttggatttgctcttcccaaaaatctaaaatgaatttaataattgggtagaatatattggaaagaagtttctttttctttaataaatggaatcatataaaatgtatcccggattttcttattaaattgtattttaaactaggttcttgcttcccaggtttcattccccaaaaacttttccaaccattaaaagtacacacagaattgtcttgttttcataggtgtataaataggttaagttctgagtgacttagtgagaaaccaaagtgactttcaaaaatacacccaaaggcaccagaaaccctgcttcctttggcttctttgcttttgtgtaacctcctgttcacctcctggtgaatagaatcctcagatgaggcttattgaatgattgattcctcctcaaaagtatacttgaaagcagtggtgtgctgaagccagctcatgcccactcacaagggacaactgtgagaatttcttcctaactctgcactcagtgaccttgcgttggtagccatgagctacttcatgagccctcatgttgaaattggccatagtgggagtatttacaccacagaaattcacagatgctataaagcacagctttcgctttttttttttttagagagagctggtttaccaatttcactgcttgaaagtatcacaaaaatctggggatccttttgaaaatataaatgccatcatattgtgatataatttatacaatataatataattgtgtaaaatcatgattataataatgtttcaataaacatttcttaaattccc

SEQ ID NO: 9966 - DNA, 3010 bp, Homo sapiens
  source 1..3010: mol_type = unassigned DNA; mol_type = unassigned DNA
cacgcccctgggcggtgcgcgcgggcggtgggtaggccgggcaggctcacgtgatgcgggccccgcggcccgccatataaacccgcgcgcccgccaggcgctgcggccgtcccgggccgtgactcctcctttcccccgccccgcctccgttcggagagccggcgggcgggcgcctctcggccaggaagcgcctcttggacgcgtgtgaccgatgcccagattgcacgaccacttctggagctgctcctgtgcgcacagcgcgaggcgccgaggccccccgcgagccagcgccgcggggctggcggccaaggttggggagatgatcaacgtttccgtgtccgggccctccctgctggcggcccacggtgccccggacgctgaccccgcgcccaggggccgcagtgctgcgatgagcggccccgagcccggcagcccctaccccaacacctggcatcatcgcctgttgcagaggagcctcgtgctcttctcggttggggtggtcctagccctggtgctcaacctgctgcagatccagaggaatgtcactctcttccccgaggaggtgatcgccaccatcttttcctccgcctggtgggtccctccctgctgcgggacagcagctgctgttgttggcctactgtacccctgtatcgacagtcacctcggagaaccccacaaatttaagagagaatgggccagtgtcatgcgctgcatagcagtttttgttggcattaaccacgccagtgctaaattggattttgccaataatgtccagctgtccttgactttagcagccctatctttgggcctttggtggacatttgatcgttccagaagtggccttgggctggggatcaccatagcttttctagctacgctgatcacgcagtttctcgtgtataatggtgtctatcagtatacatccccagatttcctctatattcgttcttggctcccttgtatatttttctcaggaggcgtcacggtggggaacataggacgacagttagctatgggtgttcctgaaaagccccatagtgattgagtcttcaaaaccaccgattctgagagcaaggaagattttggaagaaaatctgactgtggattatgacaaagattatcttttttcttaagtaatctatttagatcgggctgactgtacaaatgactcctggaaaaaactcttcacctagtctagaatagggaggtggagaatgatgacttaccctgaagtcttcccttgactgcccgcactggcgcctgtctgtgccctggagcattctgcccaggctacgtgggttcaggcaggtggcagcttcccaagtattcgatttcattcatgtgattaaaacaagttgccatatttcaaagccttgaactaagactcaattaccaacccgcagttttgtgtcagtgcccaaaggaggtaggttgatggtgcttaacaaacatgaagtatggtgtaataggaataatatttatccaaaagatttttaaaaatagggctgtgtttaaaaaaaaaaacaaaacaagaaaagcagcagtgattatagagaggtcacactctaagtggggtcgcggcgtggccacgcttcacggtcacgctcgtccgtcctgcagtggcgtgtttacatggtcacacgtgtgtgtatcaccagtgggtcaactgcttgtcattcctcccgtggcagtttgtgtagacaatcttactgagcaaaaggcaatgaaaagtcttggttcccacactgcgatatattggaattttcacctcagtttatgaagtttatttcgaaatccatagtcatctaagaatgaatacctgtctgccatgtatttcaatcttagtgagccaaaattgtttgtttgttactacagaatagagatgactgttttttgccacagccctatggaatttgcaatctgtgattgccttgtaaaaaggagagtgcatatggcactgcattaaacgtgtggtgtttctagtcaatgatattggtgagcacaatgtattcatttaatggcatagaccataccagacctaatttgcaagtattgggtcttaaacttcaagtgcaatgtatatgaaaaccaatctgagccttgtatctcttaaatatttattttttttaacgtgtgagatgttcgagagaaggttctccattcatttcagtgctgcctggaggaaactcggcaatgatttctttcagttgtgaagttcctttcgtgttacaccctccactgaaccctcaaccttcgaaatactccagttttgtgggtttggtcatttttacttataaatttacctttttgtattttgcaatttacatgtgtttggtttgttttaaattctgtgaaagtggcttgattaaaagactccttttaaatggaagccaccagtcagcagaatggaagcttagaggaacttgcctgtgagcgctggtctttgtgtttggttttgtgatgtaacgatctttgctggggttttttgctttgttttgagggaaatgtcttggagtaaattttaagttcctggagttaatttgttttacaggaattttgttttttaaaaaaataggatcattctgaactttggaatgacccccttatatattttctgaaaatgaaaacagttacatgaaaaaaatttccaatgaagatgtcagcattttatgaaaaaccagaagttattagatgaaagcagcgagtgaatctttaaaacagacttgatcacgcacacacaataagtctttctctccgaaaccggaagtaaatctatatctgttagaaataatgtagccaaaagaatgtaaatttgaggatttttttgccaatagtttatagaaaatatatgaaccaaagtgatttgagtttgtaaaaatgtaaaatagtatgaacaaaatttgcactctaccagatttgaacatctagtgaggttcacattcatactaagttttcaacattgtgttctttttgcattcattttttacttttattaaaggttcaaaaccaa

SEQ ID NO: 9967 - DNA, 596 bp, Homo sapiens
  source 1..596: mol_type = unassigned DNA; mol_type = unassigned DNA
atgcgggccccgcggcccgccatataaacccgcgcgcccgccaggcgctgcggccgtcccgggccgtgactcctcctttcccccgccccgcctccgttcggagagccggcgggcgggcgcctctcggccaggtacgcggccggctgggataggggtcgcgggcgggctttggtcgcgcagcagccggtcctccccggaggaagcgcctcttggacgcgtgtgaccgatgcccagattgcacgaccacttctggagctgctcctgtgcgcacagcgcgaggcgccgaggccccccgcgagccagcgccgcggggctggcggccaaggttggggagatgatcaacgtttccgtgtccgggccctccctgctggcggcccacggtgccccggacgctgaccccgcgcccaggggccgcagtgctgcgatgagcggccccgagcccggcagcccctaccccaacacctggcatcatcgcctgttgcagaggagcctcgtgctcttctcggttggggtggtcctagccctggtgctcaacctgctgcagatccagaggaatgtcactctcttccccgaggaggtgatcgccaccatctttt

SEQ ID NO: 9968 - DNA, 1127 bp, Homo sapiens
  source 1..1127: mol_type = unassigned DNA; mol_type = unassigned DNA
gggccgtgactcctcctttcccccgccccgcctccgttcggagagccggcgggcgggcgcctctcggccaggaagcgcctcttggacgcgtgtgaccgatgcccagattgcacgaccacttctggagctgctcctgtgcgcacagcgcgaggcgccgaggccccccgcgagccagcgccgcggggctggcggccaaggttggggagatgatcaacgtttccgtgtccgggccctccctgctggcggcccacggtgccccggacgctgaccccgcgcccaggggccgcagtgctgcgatgagcggccccgagcccggcagcccctaccccaacacctggcatcatcgcctgttgcagaggagcctcgtgctcttctcggttggggtggtcctagccctggtgctcaacctgctgcagatccagaggaatgtcactctcttccccgaggaggtgatcgccaccatcttttcctccgcctggtgggtccctccctgctgcgggacagcagctggtatacatccccagatttcctctatattcgttcttggctcccttgtatatttttctcaggaggcgtcacggtggggaacataggacgacagttagctatgggtgttcctgaaaagccccatagtgattgagtcttcaaaaccaccgattctgagagcaaggaagattttggaagaaaatctgactgtggattatgacaaagattatcttttttcttaagtaatctatttagatcgggctgactgtacaaatgactcctggaaaaaactcttcacctagtctagaatagggaggtggagaatgatgacttaccctgaagtcttcccttgactgcccgcactggcgcctgtctgtgccctggagcattctgcccaggctacgtgggttcaggcaggtggcagcttcccaagtattcgatttcattcatgtgattaaaacaagttgccatatttcaaagccttgaactaagactcaattaccaacccgcagttttgtgtcagtgcccaaaggaggtaggttgatggtgcttaacaaacatgaagtatggtgtaataggaataatatttatccaaaagatttttaaaaatagggctgtgtttaaaaaaaaaaacaaaacaa

SEQ ID NO: 9969 - DNA, 1320 bp, Homo sapiens
  source 1..1320: mol_type = unassigned DNA; mol_type = unassigned DNA
ctcggttggggtggtcctagccctggtgctcaacctgctgcagatccagaggaatgtcactctcttccccgaggaggtgatcgccaccatcttttcctccgcctggtgggtccctccctgctgcgggacagcagctgctgttgttggcctactgtacccctgtatcgacagtcacctcggagaaccccacaaatttaagagagaatgggccagtgtcatgcgctgcatagcagtttttgttggcattaaccacgccagtgctaaattggattttgccaataatgtccagctgtccttgactttagcagccctatctttgggcctttggtggacatttgatcgttccagaagtggccttgggctggggatcaccatagcttttctagctacgctgatcacgcagtttctcgtgtataatggtgtctatcagtatacatccccagatttcctctatattcgttcttggctcccttgtatatttttctcaggaggcgtcacggtggggaacataggacgacagttagctatgctgatacccttctgtgaggagttgaatttgaagaccacttggctgtttcacaaaaccagaagtaattacagggtgttcctgaaaagccccatagtgattgagtcttcaaaaccaccgattctgagagcaaggaagattttggaagaaaatctgactgtggattatgacaaagattatcttttttcttaagtaatctatttagatcgggctgactgtacaaatgactcctggaaaaaactcttcacctagtctagaatagggaggtggagaatgatgacttaccctgaagtcttcccttgactgcccgcactggcgcctgtctgtgccctggagcattctgcccaggctacgtgggttcaggcaggtggcagcttcccaagtattcgatttcattcatgtgattaaaacaagttgccatatttcaaagccttgaactaagactcaattaccaacccgcagttttgtgtcagtgcccaaaggaggtaggttgatggtgcttaacaaacatgaagtatggtgtaataggaataatatttatccaaaagatttttaaaaatagggctgtgtttaaaaaaaaaaacaaaacaagaaaagcagcagtgattatagagaggtcacactctaagtggggtcgcggcgtggccacgcttcacggtcacgctcgtccgtcctgcagtggcgtgtttacatggtcacacgtgtgtgtatcaccagtgggtcaactgcttgtcattcctcccgtggcagtttgtgtagacaatcttactgagcaaaaggcaatgaaaagtctt

SEQ ID NO: 9970 - DNA, 852 bp, Homo sapiens
  source 1..852: mol_type = unassigned DNA; mol_type = unassigned DNA
ggagaaccccacaaatttaagagagaatgggccagtgtcatgcgctgcatagcagtttttgttggcattaaccacgccagtgctaaattggattttgccaataatgtccagctgtccttgactttagcagccctatctttgggcctttggtggacatttgatcgttccagaagtggccttgggctggggatcaccatagcttttctagctacgctgatcacgcagtttctcgtgtataatggtgtctatcagtaagtgtgtgttttcaaatattggctttggaaagcttacttaactttcattaaaacatccactaagcttagatattttcatattttatttgttttttatatagaatgatacagatttaggcatgaaattctcaaaaatgctgctatccataacttaatgtaacgcaaaggaaaaccaagtagtagcagttacaaccaaacaaatatgaacattcgtaacattggatggttgatatgcgttctgcatatccccactacagagaatctgtgatgtagaattgagccaggtgaaattgactgctaaggtacagtttcttttctcgctccaggtatacatccccagatttcctctatattcgttcttggctcccttgtatatttttctcaggaggcgtcacggtggggaacataggacgacagttagctatggtaagtgaaatgatcatattatcttctaaaacttgcgtctctttaccttgatagaatgactttacatgatacattcaaatttgcgttcatatattctggttcagacttgagtgacaactactgagaaaagcttatatttaaaaaaataggtaatgatacccaggtaattctt

SEQ ID NO: 9971 - DNA, 2623 bp, Homo sapiens
  source 1..2623: mol_type = unassigned DNA; mol_type = unassigned DNA
cacgcccctgggcggtgcgcgcgggcggtgggtaggccgggcaggctcacgtgatgcgggccccgcggcccgccatataaacccgcgcgcccgccaggcgctgcggccgtcccgggccgtgactcctcctttcccccgccccgcctccgttcggagagccggcgggcgggcgcctctcggccaggaagcgcctcttggacgcgtgtgaccgatgcccagattgcacgaccacttctggagctgctcctgtgcgcacagcgcgaggcgccgaggccccccgcgagccagcgccaaattggattttgccaataatgtccagctgtccttgactttagcagccctatctttgggcctttggtggacatttgatcgttccagaagtggccttgggctggggatcaccatagcttttctagctacgctgatcacgcagtttctcgtgtataatggtgtctatcagtatacatccccagatttcctctatattcgttcttggctcccttgtatatttttctcaggaggcgtcacggtggggaacataggacgacagttagctatgctgatacccttctgtgaggagttgaatttgaagaccacttggctgtttcacaaaaccagaagtaattacagggtgttcctgaaaagccccatagtgattgagtcttcaaaaccaccgattctgagagcaaggaagattttggaagaaaatctgactgtggattatgacaaagattatcttttttcttaagtaatctatttagatcgggctgactgtacaaatgactcctggaaaaaactcttcacctagtctagaatagggaggtggagaatgatgacttaccctgaagtcttcccttgactgcccgcactggcgcctgtctgtgccctggagcattctgcccaggctacgtgggttcaggcaggtggcagcttcccaagtattcgatttcattcatgtgattaaaacaagttgccatatttcaaagccttgaactaagactcaattaccaacccgcagttttgtgtcagtgcccaaaggaggtaggttgatggtgcttaacaaacatgaagtatggtgtaataggaataatatttatccaaaagatttttaaaaatagggctgtgtttaaaaaaaaaaacaaaacaagaaaagcagcagtgattatagagaggtcacactctaagtggggtcgcggcgtggccacgcttcacggtcacgctcgtccgtcctgcagtggcgtgtttacatggtcacacgtgtgtgtatcaccagtgggtcaactgcttgtcattcctcccgtggcagtttgtgtagacaatcttactgagcaaaaggcaatgaaaagtcttggttcccacactgcgatatattggaattttcacctcagtttatgaagtttatttcgaaatccatagtcatctaagaatgaatacctgtctgccatgtatttcaatcttagtgagccaaaattgtttgtttgttactacagaatagagatgactgttttttgccacagccctatggaatttgcaatctgtgattgccttgtaaaaaggagagtgcatatggcactgcattaaacgtgtggtgtttctagtcaatgatattggtgagcacaatgtattcatttaatggcatagaccataccagacctaatttgcaagtattgggtcttaaacttcaagtgcaatgtatatgaaaaccaatctgagccttgtatctcttaaatatttattttttttaacgtgtgagatgttcgagagaaggttctccattcatttcagtgctgcctggaggaaactcggcaatgatttctttcagttgtgaagttcctttcgtgttacaccctccactgaaccctcaaccttcgaaatactccagttttgtgggtttggtcatttttacttataaatttacctttttgtattttgcaatttacatgtgtttggtttgttttaaattctgtgaaagtggcttgattaaaagactccttttaaatggaagccaccagtcagcagaatggaagcttagaggaacttgcctgtgagcgctggtctttgtgtttggttttgtgatgtaacgatctttgctggggttttttgctttgttttgagggaaatgtcttggagtaaattttaagttcctggagttaatttgttttacaggaattttgttttttaaaaaaataggatcattctgaactttggaatgacccccttatatattttctgaaaatgaaaacagttacatgaaaaaaatttccaatgaagatgtcagcattttatgaaaaaccagaagttattagatgaaagcagcgagtgaatctttaaaacagacttgatcacgcacacacaataagtctttctctccgaaaccggaagtaaatctatatctgttagaaataatgtagccaaaagaatgtaaatttgaggatttttttgccaatagtttatagaaaatatatgaaccaaagtgatttgagtttgtaaaaatgtaaaatagtatgaacaaaatttgcactctaccagatttgaacatctagtgaggttcacattcatactaagttttcaacattgtgttctttttgcattcattttttacttttattaaaggttcaaaacc

SEQ ID NO: 9972 - DNA, 498 bp, Homo sapiens
  source 1..498: mol_type = unassigned DNA; mol_type = unassigned DNA
tccagagaatgctatggacaagaatcaaattttaccaggagtaattgcccatggaaacattctgtttttcaaaagaagaatgtacatattccacttgactgggaagctgtgtggcccaaatcactgtttgagtggaggaatgttttctagagcagtgactggaaggacaaacgtggtgttgcagaacaaaaattccttgcctttggtatggaatggtggtgccttttccatgtgatgagaaatgcttcatagacagtggcatgtgggagagctgaaggaggaggcgtgttccatattccactcattcaaaggacagcttggtgttttcacactttatgcagtgttgctttctcaaagaaataaacatgtggctggaagtgtttaatggctgcgttttgatcgtctacaacaaggttacagtgccctctggtggcagtcatcaaaatcgcttctagacttgtttttatttttaaataaaagatctaattatattggaaa

SEQ ID NO: 9973 - DNA, 6689 bp, Homo sapiens
  source 1..6689: mol_type = unassigned DNA; mol_type = unassigned DNA
tttaagtagaatcctcaagcttggcctcagagtactatgaggcttctgaatccaggaataagactgctcttggatttactctctttgtattgcatgtcaaaggcaacagaactggaccaagaaaattcataactttttgcttttgtttctactaagatgacatcatacatggctattgatggcagtgctcttgttcccttgcgtcagaagcccaggaggaaaactcaaggttttctcacgatgagtcggaggaggatatcgtgtaaagatctgggccatgctgactgccaagggtggctgtataagaaaaaggaaaagggaagtttcctaagcaacaaatggaaaaagttctgggtgatactgaaggggtcgtcactgtactggtatagcaatcaaatggcagagaaagctgatggatttgtcaacctgcctgatttcactgtggaaagagcatctgaatgcaagaaaaagcatgcttttaagatcagccatccacagatcaagaccttttattttgcagctgagaatgtgcaggaaatgaacgtgtggttaaataaacttggatcggctgtaatccatcaggaatccactacaaaggatgaagaatgttacagtgaaagtgaacaggaagatccagaaatagctgcggagacaccaccccctcctcacgcttcccagactcagtctttgactgcacagcaggcatcttcatcctcacccagcctgagtggaacgtcgtattctttctcttccctggaaaatacagtgaagacacccagcagttttccttcctccttatctaaagagagacaatccttgcctgacacagttaacagtttgtctgctgctgaagatgagggacaaccaataacgtttgctgtgcaagttcattcacctgtaccctcagaggcaggcatccacaaggccctggaaaacagttttgtcacatcagaaagtggatttttgaactctttatctagtgatgatacttcttcattgagtagcaatcatgaccatcttactgtcccagataagcctgctggatcaaagatcatggacaaagaagagacaaaagtgtctgaagatgatgaaatggagaagctgtacaaatcattagagcaagctagtctatctcctcttggggaccgacgaccttcgactaaaaaggagttgagaaaatcctttgttaagcggtgtaaaaatccatctataaacgagaaactccacaaaatccgaacattgaatagcacattaaagtgtaaagaacatgatctggccatgattaaccagttgctggatgacccgaagctgacagccaggaaatacagagagtggaaagtcatgaacaccctgctgatccaggacatctatcagcagcagcgggcttcgcctgcccctgatgacactgatgacaccccccaggaactcaagaaatcaccttcttctccctctgttgaaaattccatttgagacaaagtcagggttttctcctcttatattttatcacaagcaactcttcaagatgttgcaaaagcttacatttttccttaaaaggaaaactgaaacccagtccttcaagcatcagcttcccatctaaagatgcacgttagatgaagataatcaccgaatacaccagggctcctcatttcagtcgtaacgcatccattgagattggaatgattgagttcagttgaaaggcgttttttgtgttcctactgggagctcacggtgatgtggggctctaggggggatgtgagaaatgtctcttctgttcattgctctccagagaatgctatggacaagaatcaaattttaccaggagtaattgcccatggaaacattctgtttttcaaaagaagaatgtacatattccacttgactgggaagctgtgtggcccaaatcactgtttgagtggaggaatgttttctagagcagtgactggaaggacaaacgtggtgttgcagaacaaaaattccttgcctttggtatggaatggtggtgccttttccatgtgatgagaaatgcttcatagacagtggcatgtgggagagctgaaggaggaggcgtgttccatattccactcattcaaaggacagcttggtgttttcacactttatgcaggttaggggatctgattaatgtttcctttccttacaacagctagagaaaacatctcatcacaattggagacctctacttcctttgagctttcctactcaatggtaggagataggaatatgttccgcaaagaatgtctactgctcttgtccttggctgtgatccctatacatagtgtgaatttatatccaggtttcccaggatcaatattgacaagacgactttggcatctgaattgttttaatatctttactcaaaaaaacaaaaaaacaaaaacccatggaagcaacaaaagagttaaacatgagggatttatttttgtatgtttatatgtcacttgtgtgctatgtgaatagctatgtttgttatttaaatatatttatagaagttcaaattactagtgtttaaaagatgatatactattatatattgtgcttagtatatatttgatgagtctatactttttgcttgagaaaaatagaaatactattgattcactggtgttatgatgttgcactgtgtctgaggaatgctcaggaaatcttgtgggaaaaaaatggggcatgcattcataatttttcattttcttccccaccccaacccccatgagctcttaaatttagatttctatctcttgtaagtcactcttttaaccagcaaaggactttcatcttagattatcctttctattaaataaactttaagctttgtgccatttatgcctgcaaaccttagaccaaaggcaacacaactaatgtcatcttttcattaaagactaatagaaatttagaaatcattgtgttaaagagagctatagagaaacaatatgaaagtcttcccttactaatcaccatgaatatttctcaccataggaataaccacaacccaccaagtacccatgttggccctgcctacccgtaacaaattgttcacacaacctattttgttttatagcttcaaagtgtggcttgacattcaaatggaaggaaccacctgaattatatctgcaaacaaaatggaaatagttgttgaatagttccccaagctttactaagaagccttaatactctgtaaacaaacaaacaaacaaaaaacaaccttagcattaagaaataaaaacaaaaaacaagaagcaagttgtactgctagaaacttctctaagataagaggccaggccagtcagtttggcccagcaaacatgtgggtacttctccacctagggaagccactgaagatgagtttgacctgtggtgacctgacagagagaacattcagatcctcagattgcaccctgatgccctggtttaggaaagcagtgctttaaccttttgcccctggaaattactgattctttctgtgattagcagataccagaagggaaattatttaggattggcaatgtaaagagtattgaaggaacaacaaataacaatagcagaaataacagtgtgacataaagtgcccttccacctatttttctttggtttgcaacaccagcctgtagacttccagtttttcttaaattgaagagctccagacacttttgagcagggtttgtgaatagctttgaatgctttcctttggcttttcgtgaagacatatttccccagcctttcaactgtaaactcctttagtaccattgaaacttaaggcaaaaaagatccctgggattacttagccaaggcttaaatttatttttcaaagtcaagaacattagcctagaagtttttgctttgctagttaaagcttactttgcagagcttcccaaagtgaaagggaaactgaacttcacaattttgcacctggctttctggagccccattgcctgctcattcgtgtttttccccctgtaaattattttgcttttgaccaggttgtgctagaaagtagggctgcttctgtgagttctcagcctaggctgtggccactaagacgtgggtggggggatagacaggagtgagagggagagtgggtgacactttccgtgacacttaatgtaggaagacatgggcttctctctcttggcctcaagccacttttctggtccaaagaatattgggaaaactggattactttcagtatatttcttgagaccgggtcatctctgaaatgcatttggggtagtttcctggggtccaagggccaattcctatacccagtcctgcagtgtctgtgagctgtggaatgagagagaaaaccatggctgctcaggaaggaagtggagaatctctcagcacacgtagatccaaatctgtggcacctgctaaagattaggatttggagaggactcctctttggggttgtgaagaggaccttttccctctgttgttagcctgtagatccagaacggagcctgatgtgatgccttcactggttgatatattgcaaatagacactctgagccctgcattgcaagggcgtcttttgctttaaagaattcttagttttgccacaacagctcaaatctcagaataggatcaaaggcctagaaagactcctaaagtataggattacaaagactccaggaagcgtaagaaagagattgtgtttggagtcagatttcaatgtgaaacccatgccttacatttacacagcactttgtagtttgcaaattggtgtgttttcagccccctcccgctgccccatgctctgagatgattgtggattattacagtgaagtgcctggcccggagcccccagtgatgaagcaggaacttgagtctcaggactcccagcggctctctgcccatttcctcctctccgccccccacctcgcttcacctgttaccttgtgaagttgctgttggcacatagcccactaggaaaccaagaagtttgactgggagcgtgtgtttcattgcactgggcttagcatacggctggccctggtggctgtttggctaaattctccatttgaaacctaaagggccctctctgtgcttgagcacagtctcctcctagtggtcctgcctcaacctgctggcgggctgtctatggattggggtttcacctaatcatgctgtgtttcctttcttttctttctgtacattagactacttgggaggtgctgtgtgatccttggatgaaaaacatatatttaaagaaatggagagtgtttattttgtttgctttttgaggcatgtgctgtcaaatgttagagaccaaacttagtgattagaggttggtcctttgaccttcttctcttaattgcttttcatgtaatcatgataatttactcaggtagcactccagtcacaaacaatgtcacagagatgaaacagattcaaagaaaaaatatttttaagtcttttgaaaagaagtgctattcaaatttaagacatgtttaaattcataggtacattatctcttagtaagaaatacttttttttttctttttttagacagagtcttgctctgttgcccaggctggagtgcagtggcacgattttagctcactgcaacctctgcctccctggttgaagtgattctcctgcctcagcctcccgagtagctgggactacgcccggctaatttttatatttttagtagagaccggggtttaccatgttgcccaggctggtttcaaactcctgacctcaggtgatctgcctgcctctgcctcccagagtgctgggattacaggtgtgagccaccacacctggccgaaagacagtattttgatatagccacatacatgatttaatgagtaatgttaagtacagaaaagctgccatatccacatagttttagggggcatttcttcttcagtctaacaagaatatgatatccaattgtggttttccaatttatttctcttccaatttcttttgtatacctcacaggagaaattgaatcctagaactgggagatgactgccctgcccagggttttgtaatacataattgaaaataaaagtccctgaaactaaatgtttgcagcctgtatgaaatggactgtggaagggggataatttctctcctcacagaaagccactcgtctccttgaatgaggcattgagcagacacacgtttctctgtgtcgtggggcaggaagcaattcccttgcctcttcagcacatctcagttctttcccacatgaccccagaaccacatagaaaacattgaaaataatggattcttcattgtatttgaattttttttttttaacctttagcccaaaagggaagtgtgcctcgtggaaagagcaaatgccgtaaaatagaaaccaggagttttaatcgccatatattttaatgtgcttgcatgatgggaatgtgacttttagcactgcatggtgtttgggggcaagatattaatgtggaaatcttagcttaagttttactgtgctctcatcctgtgtcagctacccctctaaactgaaaaagaggcatggctcatttctctcctgctttatgtttttgaggttgacttgtaagataaaaataaaaataagaaaaaaatatatctaggcaaatgacatgaaaaaaaagttgaaatatactactggtgttcatttttgtcctgcagtgttgctttctcaaagaaataaacatgtggctggaagtgtttaa

SEQ ID NO: 9974 - DNA, 3267 bp, Homo sapiens
  source 1..3267: mol_type = unassigned DNA; mol_type = unassigned DNA
acatgtagtcttctcactttcttcttgccatgagactgagagagtgctccttgggacggagtttcagagtcatcaactgggctcatgagaaccacaagaaacctacgaaggcactgggacagagcctggctgctggtcaaaggcaacagaactggaccaagaaaattcataactttttgcttttgtttctactaagatgacatcatacatggctattgatggcagtgctcttcaggttcccttgcgtcagaagcccaggaggaaaactcaaggttttctcacgatgagtcggaggaggatatcgtgtaaagatctgggccatgctgactgccaagggtggctgtataagaaaaaggaaaagggaagtttcctaagcaacaaatggaaaaagttctgggtgatactgaaggggtcgtcactgtactggtatagcaatcaaatggcagagaaagctgatggatttgtcaacctgcctgatttcactgtggaaagagcatctgaatgcaagaaaaagcatgcttttaagatcagccatccacagatcaagaccttttattttgcagctgagaatgtgcaggaaatgaacgtgtggttaaataaacttggatcggctgtaatccatcaggaatccactacaaaggatgaagaatgttacagtgaaagtgaacaggaagatccagaaatagctgcggagacaccaccccctcctcacgcttcccagactcagtctttgactgcacagcaggcatcttcatcctcacccagcctgagtggaacgtcgtattctttctcttccctggaaaatacagtgaagacacccagcagttttccttcctccttatctaaagagagacaatccttgcctgacacagttaacagtttgtctgctgctgaagatgagggacaaccaataacgtttgctgtgcaagttcattcacctgtaccctcagaggcaggcatccacaaggccctggaaaacagttttgtcacatcagaaagtggatttttgaactctttatctagtgatgatacttcttcattgagtagcaatcatgaccatcttactgtcccagataagcctgctggatcaaagatcatggacaaagaagagacaaaagtgtctgaagatgatgaaatggagaagctgtacaaatcattagagcaagctagtctatctcctcttggggaccgacgaccttcgactaaaaaggagttgagaaaatcctttgttaagcggtgtaaaaatccatctataaacgagaaactccacaaaatccgaacattgaatagcacattaaagtgtaaagaacatgatctggccatgattaaccagttgctggatgacccgaagctgacagccaggaaatacagagagtggaaagtcatgaacaccctgctgatccaggacatctatcagcagcagcgggcttcgcctgcccctgatgacactgatgacaccccccaggaactcaagaaatcaccttcttctccctctgttgaaaattccatttgagacaaagtcagggttttctcctcttatattttatcacaagcaactcttcaagatgttgcaaaagcttacatttttccttaaaaggaaaactgaaacccagtccttcaagcatcagcttcccatctaaagatgcacgttagatgaagataatcaccgaatacaccagggctcctcatttcagtcgtaacgcatccattgagattggaatgattgagttcagttgaaaggcgttttttgtgttcctactgggagctcacggtgatgtggggctctaggggggatgtgagaaatgtctcttctgttcattgctctccagagaatgctatggacaagaatcaaattttaccaggagtaattgcccatggaaacattctgtttttcaaaagaagaatgtacatattccacttgactgggaagctgtgtggcccaaatcactgtttgagtggaggaatgttttctagagcagtgactggaaggacaaacgtggtgttgcagaacaaaaattccttgcctttggtatggaatggtggtgccttttccatgtgatgagaaatgcttcatagacagtggcatgtgggagagctgaaggaggaggcgtgttccatattccactcattcaaaggacagcttggtgttttcacactttatgcaggttaggggatctgattaatgtttcctttccttacaacagctagagaaaacatctcatcacaattggagacctctacttcctttgagctttcctactcaatggtaggagataggaatatgttccgcaaagaatgtctactgctcttgtccttggctgtgatccctatacatagtgtgaatttatatccaggtttcccaggatcaatattgacaagacgactttggcatctgaattgttttaatatctttactcaaaaaaacaaaaaaacaaaaacccatggaagcaacaaaagagttaaacatgagggatttatttttgtatgtttatatgtcacttgtgtgctatgtgaatagctatgtttgttatttaaatatatttatagaagttcaaattactagtgtttaaaagatgatatactattatatattgtgcttagtatatatttgatgagtctatactttttgcttgagaaaaatagaaatactattgattcactggtgttatgatgttgcactgtgtctgaggaatgctcaggaaatcttgtgggaaaaaaatggggcatgcattcataatttttcattttcttccccaccccaacccccatgagctcttaaatttagatttctatctcttgtaagtcactcttttaaccagcaaaggactttcatcttagattatcctttctattaaataaactttaagctttgtgccatttatgcctgcaaaccttagaccaaaggcaacacaactaatgtcatcttttcattaaagactaatagaaatttagaaatcattgtgttaaagagagctatagagaaacaatatgaaagtcttcccttactaatcaccatgaatatttctcaccataggaataaccacaacccaccaagtacccatgttggccctgcctacccgtaacaaattgttcacacaacctattttgttttatagcttcaaagtgtggcttgacattcaaatggaaggaaccacctgaattatatctgcaaacaaaatggaaatagttgttgaatagttccccaagctttactaagaagccttaatactctgtaaacaaacaaacaaacaaaaaacaaccttagca

SEQ ID NO: 9975 - DNA, 2245 bp, Homo sapiens
  source 1..2245: mol_type = unassigned DNA; mol_type = unassigned DNA
ccttctagcttcgttttctgccatatcttgtaggggtctccacatacttggcccagcctgctccctcagccagagactccccttcacaagttgtgcaccactgatagtttagtgatcctgccagtttcaattcattaggattcctacaatcaaaattaatcaccactgattttgtgttctcttggtattatgactcacacctcttttgaggaattattttattttccccaagctacgatttgtcttcttcctgcatattggatgctctttgaggtcaggagccccgaattggccatttgtttctgcctcttatgtaattcctttgcaccaggtagttaccaggtagttcattagatatgaactttctgaattggattgaaattgcaatagccagatggagataaacctctgctcatgcattatggaataagcgatgacagcgttaaaacattaagcattttcatttttgttatagaatgttacagtgaaagtgaacaggaagatccagaaatagctgcggagacaccaccccctcctcacgcttcccagactcagtctttgactgcacagcaggcatcttcatcctcacccagcctgagtggaacgtcgtattctttctcttccctggaaaatacagtgaagacacccagcagttttccttcctccttatctaaagagagacaatccttgcctgacacagttaacagtttgtctgctgctgaagatgagggacaaccaataacgtttgctgtgcaagttcattcacctgtaccctcagaggcaggcatccacaaggccctggaaaacagttttgtcacatcagaaagtggatttttgaactctttatctagtgatgatacttcttcattgagtagcaatcatgaccatcttactgtcccagataagcctgctggatcaaagatcatggacaaagaagagacaaaagtgtctgaagatgatgaaatggagaagctgtacaaatcattagagcaagctagtctatctcctcttggggaccgacgaccttcgactaaaaaggagttgagaaaatcctttgttaagcggtgtaaaaatccatctataaacgagaaactccacaaaatccgaacattgaatagcacattaaagtgtaaagaacatgatctggccatgattaaccagttgctggatgacccgaagctgacagccaggaaatacagagagtggaaagtcatgaacaccctgctgatccaggacatctatcagcagcagcgggcttcgcctgcccctgatgacactgatgacaccccccaggaactcaagaaatcaccttcttctccctctgttgaaaattccatttgagacaaagtcagggttttctcctcttatattttatcacaagcaactcttcaagatgttgcaaaagcttacatttttccttaaaaggaaaactgaaacccagtccttcaagcatcagcttcccatctaaagatgcacgttagatgaagataatcaccgaatacaccagggctcctcatttcagtcgtaacgcatccattgagattggaatgattgagttcagttgaaaggcgttttttgtgttcctactgggagctcacggtgatgtggggctctaggggggatgtgagaaatgtctcttctgttcattgctctccagagaatgctatggacaagaatcaaattttaccaggagtaattgcccatggaaacattctgtttttcaaaagaagaatgtacatattccacttgactgggaagctgtgtggcccaaatcactgtttgagtggaggaatgttttctagagcagtgactggaaggacaaacgtggtgttgcagaacaaaaattccttgcctttggtatggaatggtggtgccttttccatgtgatgagaaatgcttcatagacagtggcatgtgggagagctgaaggaggaggcgtgttccatattccactcattcaaaggacagcttggtgttttcacactttatgcaggttaggggatctgattaatgtttcctttccttacaacagctagagaaaacatctcatcacaattggagacctctacttcctttgagctttcctactcaatggtaggagataggaatatgttccgcaaagaatgtctactgctcttgtccttggctgtgatccctatacatagtgtgaatttatatccaggtttcccaggatcaatattgacaagacgactttggcatctgaattgttttaatatctttactc

SEQ ID NO: 9976 - DNA, 1658 bp, Homo sapiens
  source 1..1658: mol_type = unassigned DNA; mol_type = unassigned DNA
gtactatgaggcttctgaatccaggaataagactgctcttggatttactctctttgtattgcatgtcaaaggcaacagaactggaccaagaaaattcataactttttgcttttgtttctactaagatgacatcatacatggctattgatggcagtgctcttcaggttcccttgcgtcagaagcccaggaggaaaactcaaggttttctcacgatgagtcggaggaggatatcgtgtaaagatctgggccatgctgactgccaagggtggctgtataagaaaaaggaaaagggaagtttcctaagcaacaaatggaaaaagttctgggtgatactgaaggggtcgtcactgtactggtatagcaatcaaatggcagagaaagctgatggatttgtcaacctgcctgatttcactgtggaaagagcatctgaatgcaagaaaaagcatgcttttaagatcagccatccacagatcaagaccttttattttgcagctgagaatgtgcaggaaatgaacgtgtggttaaataaacttggatcggctgtaatccatcaggaatccactacaaaggatgaagaatgttacagtgaaagtgaacaggaagatccagaaatagctgcggagacaccaccccctcctcacgcttcccagactcagtctttgactgcacagcaggcatcttcatcctcacccagcctgagtggaacgtcgtattctttctcttccctggaaaatacagtgaagacacccagcagttttccttcctccttatctaaagagagacaatccttgcctgacacagttaacagtttgtctgctgctgaagatgagggacaaccaataacgtttgctgtgcaagttcattcacctgtaccctcagaggcaggcatccacaaggccctggaaaacagttttgtcacatcagaaagtggatttttgaactctttatctagtgatgatacttcttcattgagtagcaatcatgaccatcttactgtcccagataagcctgctggatcaaagatcatggacaaagaagagacaaaagtgtctgaagatgatgaaatggagaagctgtacaaatcattagagcaagctagtctatctcctcttggggaccgacgaccttcgactaaaaaggagttgagaaaatcctttgttaagcggtgtaaaaatccatctataaacgagaaactccacaaaatccgaacattgaatagcacattaaagtgtaaagaacatgatctggccatgattaaccagttgctggatgacccgaagctgacagccaggaaatacagagagtggaaagtcatgaacaccctgctgatccaggacatctatcagcagcagcgggcttcgcctgcccctgatgacactgatgacaccccccaggaactcaagaaatcaccttcttctccctctgttgaaaattccatttgagacaaagtcagggttttctcctcttatattttatcacaagcaactcttcaagatgttgcaaaagcttacatttttccttaaaaggaaaactgaaacccagtccttcaagcatcagcttcccatctaaagatgcacgttagatgaagataatcaccgaatacaccagggctcctcatttcagtcgtaacgcatccattgagattggaatgattgagt

SEQ ID NO: 9977 - DNA, 1621 bp, Homo sapiens
  source 1..1621: mol_type = unassigned DNA; mol_type = unassigned DNA
agctcaatgtatattgattctaattagcacattttgtgcctcagctagtagctccccgttaagctctgcctggagagtttttttttagattccatcctgctcataaacactgccacctcctccctccttctctctttacaaatgttacaacacaatcagaaatttcctcttttctttccttcctgcattttcagcaggttcccttgcgtcagaagcccaggaggaaaactcaaggttttctcacgatgagtcggaggaggatatcgtgtaaagatctgggccatgctgactgccaagggtggctgtataagaaaaaggaaaagggaagtttcctaagcaacaaatggaaaaagttctgggtgatactgaaggggtcgtcactgtactggtatagcaatcaaatggcagagaaagctgatggatttgtcaacctgcctgatttcactgtggaaagagcatctgaatgcaagaaaaagcatgcttttaagatcagccatccacagatcaagaccttttattttgcagctgagaatgtgcaggaaatgaacgtgtggttaaataaacttggatcggctgtaatccatcaggaatccactacaaaggatgaagaatgttacagtgaaagtgaacaggaagatccagaaatagctgcggagacaccaccccctcctcacgcttcccagactcagtctttgactgcacagcaggcatcttcatcctcacccagcctgagtggaacgtcgtattctttctcttccctggaaaatacagtgaagacacccagcagttttccttcctccttatctaaagagagacaatccttgcctgacacagttaacagtttgtctgctgctgaagatgagggacaaccaataacgtttgctgtgcaagttcattcacctgtaccctcagaggcaggcatccacaaggccctggaaaacagttttgtcacatcagaaagtggatttttgaactctttatctagtgatgatacttcttcattgagtagcaatcatgaccatcttactgtcccagataagcctgctggatcaaagatcatggacaaagaagagacaaaagtgtctgaagatgatgaaatggagaagctgtacaaatcattagagcaagctagtctatctcctcttggggaccgacgaccttcgactaaaaaggagttgagaaaatcctttgttaagcggtgtaaaaatccatctataaacgagaaactccacaaaatccgaacattgaatagcacattaaagtgtaaagaacatgatctggccatgattaaccagttgctggatgacccgaagctgacagccaggaaatacagagagtggaaagtcatgaacaccctgctgatccaggacatctatcagcagcagcgggcttcgcctgcccctgatgacactgatgacaccccccaggaactcaagaaatcaccttcttctccctctgttgaaaattccatttgagacaaagtcagggttttctcctcttatattttatcacaagcaactcttcaagatgttgcaaaagcttacatttttccttaaaaggaaaactgaaacccagtccttcaagcatcagcttcccatctaaagatgcacgttagatgaag

SEQ ID NO: 9978 - DNA, 607 bp, Homo sapiens
  source 1..607: mol_type = unassigned DNA; mol_type = unassigned DNA
atgtttatctgaatccgttgtatttcatgcacgtttgctctgtaaatcccagatccccctcctcaccgccccagtgtttatttacatttccagtttatttatcttccaattttatgttctccctttgcagaaacctatctaatggtggttaaataaacttggatcggctgtaatccatcaggaatccactacaaaggatgaagaatgttacagtgaaagtgaacaggaagatccagaaatagctgcggagacaccaccccctcctcacgcttcccagactcagtctttgactgcacagcaggcatcttcatcctcacccagcctgagtggaacgtcgtattctttctcttccctggaaaatacagtgaagacacccagcagttttccttcctccttatctaaagagagacaatccttgcctgacacagttaacagtttgtctgctgctgaagatgagggacaaccaataacgtttgctgtgcaagttcattcacctgtaccctcagaggcaggcatccacaaggccctggaaaacagttttgtcacatcagaaagtggatttttgaactctttatctagtgatgatacttcttcattgagtagcaat

SEQ ID NO: 9979 - DNA, 394 bp, Homo sapiens
  source 1..394: mol_type = unassigned DNA; mol_type = unassigned DNA
ctctttggtcaacatttgctttctatttgaattttaggtggttaaataaacttggatcggctgtaatccatcaggaatccactacaaaggatgaagaatgttacagtgaaagtgaacaggaagatccagaaatagctgcggagacaccaccccctcctcacgcttcccagactcagtctttgactgcacagcaggcatcttcatcctcacccagcctgagtggaacgtcgtattctttctcttccctggaaaatacagtgaagacacccagcagttttccttcctccttatctaaagagagacaatccttgcctgacacagttaacagtttgtctgctgctgaagatgagggacaaccaataacgtttgctgtgcaagttcattcacctgtacc

SEQ ID NO: 9980 - DNA, 580 bp, Homo sapiens
  source 1..580: mol_type = unassigned DNA; mol_type = unassigned DNA
aaaagttgcctttcactctgtcacataaatcaggataatactttacctaccaaatcagggtaatacattatctacctcttcatgtaatcattgcaggttttctcacgatgagtcggaggaggatatcgtgtaaagatctgggccatgctgactgccaagggtggctgtataagaaaaaggaaaagggaagtttcctaagcaacaaatggaaaaagttctgggtgatactgaaggggtcgtcactgtactggtatagcaatcaaatggcagagaaagctgatggatttgtcaacctgcctgatttcactgtggaaagagcatctgaatgcaagaaaaagcatgcttttaagatcagccatccacagatcaagaccttttattttgcagctgagaatgtgcaggaaatgaacgtgtggttaaataaacttggatcggctgtaatccatcaggaatccactacaaaggatgaagaatgttacagtgaaagtgaacaggaagatccagaaatagctgcggagacaccaccccctcctcacgcttcccagactcagtctttgactgcacagcaggcatcttcatc

SEQ ID NO: 9981 - DNA, 558 bp, Homo sapiens
  source 1..558: mol_type = unassigned DNA; mol_type = unassigned DNA
agaaaaactggcagtgagtcgggaagtagctgtgtattgaggtgggcattaacccttcaacatctattgcataactacggctgttattgttgagaggagctatgttactgcactgatatgcccgccagccttacaattttaattattttcaacttattcttggttttctcacgatgagtcggaggaggatatcgtgtaaagatctgggccatgctgactgccaagggtggctgtataagaaaaaggaaaagggaagtttcctaagcaacaaatggaaaaagttctgggtgatactgaaggggtcgtcactgtactggtatagcaatcaaatggcagagaaagctgatggatttgtcaacctgcctgatttcactgtggaaagagcatctgaatgcaagaaaaagcatgcttttaagatcagccatccacagatcaagaccttttattttgcagctgagaatgtgcaggaaatgaacgtgtggttaaataaacttggatcggctgtaatccatcaggaatccactacaaaggatgaagaatgttacagtgaaagtgaac

SEQ ID NO: 9982 - DNA, 568 bp, Homo sapiens
  source 1..568: mol_type = unassigned DNA; mol_type = unassigned DNA
tctccattttgtgtacgttgagtgtggcttttctccggggtgccttccttgggatcagatttctgtctgtcttaatgctaataagaggaggtggacggcagattaatttttggttattgttgaatcgattttaagaaatgacgacatgttgttcatttggattaatccctcgtggtatgtcaaaagagcttagaaaaactggcagtgagtcgggaagtagctgtgtattgaggttttctcacgatgagtcggaggaggatatcgtgtaaagatctgggccatgctgactgccaagggtggctgtataagaaaaaggaaaagggaagtttcctaagcaacaaatggaaaaagttctgggtgatactgaaggggtcgtcactgtactggtatagcaatcaaatggcagagaaagctgatggatttgtcaacctgcctgatttcactgtggaaagagcatctgaatgcaagaaaaagcatgcttttaagatcagccatccacagatcaagaccttttattttgcagctgagaatgtgcaggaaatgaacgtgtggttaaataaacttggat

SEQ ID NO: 9983 - DNA, 585 bp, Homo sapiens
  source 1..585: mol_type = unassigned DNA; mol_type = unassigned DNA
ataaacactgccacctcctccctccttctctctttacaaatgttacaacacaatcagaaatttcctcttttctttccttcctgcattttcagcaggttcccttgcgtcagaagcccaggaggaaaactcaaggttttctcacgatgagtcggaggaggatatcgtgtaaagatctgggccatgctgactgccaagggtggctgtataagaaaaaggaaaagggaagtttcctaagcaacaaatggaaaaagttctgggtgatactgaaggggtcgtcactgtactggtatagcaatcaaatggcagagaaagctgatggatttgtcaacctgcctgatttcactgtggaaagagcatctgaatgcaagaaaaagcagtaagttgtctctcatcttccacaaaactctgagccaggatactatctcttcataatgttcaccaagggatatggtgatttagaagtgagtgaaggtaacatcggaatgtctgagaatttgaagcattatgggttggcaccctacatagaaatagaagcatttaacctctcattttctggaatttcgttttgtggagcagatggatttt

SEQ ID NO: 9984 - DNA, 485 bp, Homo sapiens
  source 1..485: mol_type = unassigned DNA; mol_type = unassigned DNA
gactgagtttccagagctgaggctgctttaagtagaatcctcaagcttggcctcagagtactatgaggcttctgaatccaggaataagactgctcttggatttactctctttgtattgcatagtcatcaactgggctcatgagaaccacaagaaacctacgaaggcactgggacagagcctggctgctggtcaaaggcaacagaactggaccaagaaaattcataactttttgcttttgtttctactaagatgacatcatacatggctattgatggcagtgctcttgttcccttgcgtcagaagcccaggaggaaaactcaaggttttctcacgatgagtcggaggaggatatcgtgtaaagatctgggccatgctgactgccaagggtggctgtataagaaaaaggaaaagggaagtttcctaagcaacaaatggaaaaagttctgggtgatactgaaggggtcgtcactgtactggtatagca

SEQ ID NO: 9985 - DNA, 9762 bp, Homo sapiens
  source 1..9762: mol_type = unassigned DNA; mol_type = unassigned DNA
agtaaccatgtggatgtgctgctgaagcgtttcctcaagctcgctggggtgggaggagaggaggaggaggaggtggtggtggaggaggaggcagggggtggagagagagaaagcgcacgccgagaggaggtgtgggtgttccgcttccatcctaacggaacgagctccctcttcgcggacatgggattacccagcggctgctaacccctctcctcgccctgctcccccaaaccggcgtggctccccgggcaccaaggagctgactacagaggagcaggatttgcacccctcgctgggcttgctttggcaacagagtgcctgacccaggtcaggattttcaagaaagacatgtctgacaaaatgtctagcttcctacatattggagacatttgttctctgtacgcggagggatcgacaaatggatttattagcaccttgggcctggttgatgatcgttgtgttgtacagccagaaaccggggaccttaacaatccacctaagaaattcagagactgcctctttaagctatgtcccatgaaccgctactctgcccaaaagcagttctggaaagccgctaagcctggggccaacagcaccacagacgcagtgctactcaacaaactgcaccacgctgcagacttggaaaagaagcagaatgagacagaaaacaggaaattgctggggaccgtaatccagtatggcaatgtgatccagctcctgcatttgaaaagtaataaatacctaacagtgaataagaggcttcctgctctgttggagaagaatgccatgagagtcacattggacgaggctggaaatgaagggtcctggttttatattcagccattctacaagctgcgatccattggagacagcgtggtcataggtgacaaggtggttctgaaccccgtcaatgctggtcagcccctacatgctagcagccatcaactggtagataacccaggctgcaatgaggtcaattccgtcaactgcaatacaagctggaaaatagtccttttcatgaaatggagtgataacaaagacgacatattaaaggggggtgacgtggtgaggctgtttcatgctgagcaggagaagtttctcacctgtgacgaacacaggaagaagcagcacgtcttcctgagaaccacgggccggcagtcggccacatctgccaccagttcaaaagccctgtgggaggtggaggtggtccagcatgacccatgtcggggcggagcagggtattggaacagccttttccgtttcaagcatctggccacggggcattacttggcagcagaggtagaccctgactttgaggaagaatgcctggagtttcagccctcagtggaccctgatcaggacgcctctcgaagtaggttgcggaatgcccaagaaaagatggtatactccctggtctctgtgcctgaaggcaatgacatctcctccattttcgagctagatcccaccactctgcgtggaggtgacagccttgtcccaaggaactcttatgttcggctcagacacctatgtactaatacctgggttcacagcacaaatattcctattgacaaggaagaagaaaagcccgtgatgctgaaaattggcacctctcctgtgaaggaggataaggaagcatttgccatagttccggtttctcctgctgaagttcgggacctggactttgccaatgatgccagcaaggtgctgggctccattgctgggaagctagagaagggcaccatcacccagaatgaaaggaggtctgtaaccaagctgctagaagatttggtttacttcgtcactggtggaactaattctggtcaagatgttctcgaagttgtcttctccaagcccaacagagaacggcagaaactgatgagagaacagaatattctcaagcagatcttcaagttgttacaagccccattcacagactgcggtgatggcccaatgcttcggctggaagagctcggggaccagcggcacgctcctttcagacacatctgccggctctgctacagggtgctgagacactcgcagcaagactacaggaagaaccaggagtatatagccaagcagtttggcttcatgcagaagcagattggctatgatgtgttggctgaagacactatcactgccctgctccacaataatcggaaactcctggaaaaacacattaccgcggcagagattgacacatttgtcagcctggtgcgaaagaacagggagcccagattcttagattacctctccgacctctgtgtctccatgaacaaatcaattccagtgacccaggaactgatatgtaaagctgtgctgaaccccaccaacgctgacatcctgattgagaccaagttggttctttctcgttttgaatttgaaggtgtctcttccactggagagaatgctctggaggcaggagaagacgaggaagaggtgtggctgttttggagggacagcaacaaagagattcgcagcaagagtgtgagggaattggctcaggatgctaaagaagggcagaaggaggaccgagacgttctcagctactacagatatcagctgaacctctttgcgaggatgtgtctggaccgccaatacctggccatcaacgaaatctcaggccagctggatgtcgatctcattctccgctgcatgtctgacgagaacctgccctatgacctcagggcgtccttctgccgcctcatgcttcacatgcatgtggaccgagatccccaggaacaagtcacccccgtgaaatatgcccgcctctggtcggagattccctcggagatcgccattgacgactatgatagtagtggagcttccaaagatgaaattaaggagagatttgctcagaccatggagtttgtggaggagtatttaagagatgtggtttgtcagaggttccctttctctgataaagagaagaataagcttacgtttgaggttgtaaatttagctaggaatctcatatactttggtttctacaacttctctgaccttctacgattaactaagatccttctggccatattggactgtgtacatgtgacaacaatcttccccattagcaagatggcgaaaggagaagagaataaaggcagtaacgtgatgagatctattcatggcgtgggagagctgatgacccaggtggtgctccggggaggaggctttttgcccatgactcccatggctgctgcccctgaaggcaatgtgaagcaggcagagcctgagaaggaggacatcatggtcatggacaccaagctgaagatcattgagatactccagtttattttgaatgtgaggttggattataggatctcctgcctcctgtgtatatttaagcgagagtttgatgaaagcaattcccagacttcagaaacatcctccggaaacagcagccaagaagggccaagtaatgtaccaggtgctcttgactttgaacacattgaagaacaagcagaaggcatctttggaggaagtgaggagaacaccccactggacttggatgaccacggcggcagaacctttctccgtgtcctgctccacttgacgatgcatgactacccacccctggtgtcaggggccctgcagctcctcttccggcacttcagccagaggcaggaggtgctccaggccttcaaacaggttcaactgctggttaccagccaagatgtggacaactacaaacagatcaaacaagacttggatcaactgaggtccatcgtggaaaagtcagagctttgggtgtacaaagggcagggccccgatgagactatggatggtgcatctggagaaaatgaacataagaaaacggaggagggaaataacaagccacaaaagcatgaaagcaccagcagctacaactacagagtggtcaaagagattttgattcggcttagcaaactctgtgttcaagagagtgcctcagtgagaaagagcaggaagcagcaacagcgtctgctccggaacatgggcgcgcacgccgtggtgctggagctgctgcagattccctatgagaaggccgaagataccaagatgcaagagataatgaggttggctcatgaatttttgcagaatttctgcgcaggcaaccagcagaatcaagctttgctacataaacacataaacctgtttctcaacccagggatcctggaggcagtaaccatgcagcacatcttcatgaacaatttccagctttgcagtgagatcaacgagagagttgttcagcacttcgttcactgcatagagactcacggtcggaatgtccagtatataaagttcttacagacaattgtcaaggcagaagggaaatttattaaaaaatgccaagacatggttatggccgagctggtcaattcgggagaggatgtcctcgtgttctacaacgacagagcctctttccagactctgatccagatgatgcggtcagaacgggatcggatggatgagaacagccctctcatgtaccacatccacttggtcgagctcctggctgtgtgcacggagggtaagaatgtctacacagagatcaagtgcaactccctgctcccgctggatgacatcgttcgcgtggtgacccacgaggactgcatccctgaggttaaaattgcatacattaacttcctgaatcactgctatgtggatacagaggtggaaatgaaggagatttataccagcaatcacatgtggaaattgtttgagaatttccttgtagacatctgcagggcctgtaacaacactagtgacaggaaacatgcagactcgattttggagaagtatgtcaccgaaatcgtcatgagtattgttactactttcttcagctctcccttctcagaccagagtacgactttgcagactcgccagcctgtctttgtgcaactgctgcaaggcgtgttcagggtttaccactgcaactggttaatgccaagccaaaaagcctccgtggagagctgtattcgggtgctgtctgatgtagccaagagccgggccattgccattcccgtggacctggacagccaagtcaacaacctctttctcaagtcccacagcattgtgcagaaaacagccatgaactggcggctctcagcccgcaatgccgcacgcagggactctgttctggcagcttccagagactaccggaatatcattgagagattgcaggacatcgtctccgcgctggaggaccgtctcaggcccctggtgcaggcagagttatctgtgctcgtggatgttctccacagacccgagctgcttttcccagagaacacagacgccagaaggaaatgtgaaagtggcggtttcatttgcaagttaataaagcatacaaaacagctgctagaagaaaatgaagagaagctctgcattaaggtcctacagaccctgagggaaatgatgaccaaagatagaggctatggagaaaagggtgaggcgctcaggcaagttctggtcaaccgttactatggaaacgtcagaccttcgggacgaagagagagccttaccagctttggcaatggcccactgtcagcaggaggacccggcaagcccgggggaggagggggaggttccggatccagctctatgagcaggggtgagatgagtctggccgaggttcagtgtcaccttgacaaggagggggcttccaatctagttatcgacctcatcatgaacgcatccagtgaccgagtgttccatgaaagcattctcctggccattgcccttctggaaggaggcaacaccaccatccagcactcctttttctgtcgcttgacagaagataagaagtcagagaaattctttaaggtgttttatgaccggatgaaggtggcccagcaagaaatcaaagcaacagtgacagtgaacaccagtgacttgggaaataaaaagaaagacgatgaggtagacagggatgccccatcacggaaaaaagctaaagagcccacaacacagataacagaagaggtccgggatcagctcctggaggcctccgctgccaccaggaaagccttcaccactttcaggagggaggctgatcccgacgaccactaccagcctggagagggcacccaggccactgccgacaaggccaaggacgacctggagatgagcgcggtcatcaccatcatgcagcccatcctccgcttccttcagctcctgtgtgaaaaccacaaccgagacctgcagaacttcctccgttgccaaaataacaagaccaactacaatttggtatgtgagaccctgcagtttctggactgtatttgtggaagcacaactggaggccttggtcttctgggcttgtatataaatgaaaagaatgtagcgcttatcaaccaaaccctggaaagtctgaccgaatactgtcaaggaccttgccatgagaaccagaactgcatagccacccatgaatccaatggcattgacatcatcacagccctgatcctcaatgatatcaatcctttgggaaagaagaggatggaccttgtgttagaactgaagaacaatgcctcgaagttgctcctggccatcatggaaagcaggcacgacagtgaaaacgcagagaggatactttataacatgaggcccaaggaactggtggaagtgatcaagaaagcctacatgcaaggtgaagtggaatttgaggatggagaaaacggtgaggatggggcggcgtcccccaggaacgtggggcacaacatctacatattagcccatcagttggctcggcataacaaagaacttcagagcatgctgaaacctggtggccaagtggacggagatgaagccctggagttttatgccaagcacacggcgcagatagagattgtcagattagaccgaacaatggaacagatagtctttcccgtgcccagcatatgtgaattcctaaccaaggagtcaaaactacgaatttactatactacagagagagacgaacaaggcagcaaaatcaatgatttctttctgcggtctgaagacctcttcaatgaaatgaattggcagaagaaactgagagcccagcccgtgttgtactggtgtgcccgcaacatgtctttctggagcagcatttcgtttaacctggccgtcctgatgaacctgctggtggcgtttttctacccgtttaagggagtccgaggaggaaccctggagccccactggtcgggactcctgtggacagccatgctcatctctctggccatcgtcattgccctccccaagccccatggcatccgggccttaattgcctccacaattctacgactgatattttcagtcgggttacaacccacgttgtttcttctgggcgctttcaatgtatgcaataaaatcatctttctaatgagctttgtgggcaactgtgggacattcacaagaggctaccgagccatggttctggatgttgagttcctctatcatttgttgtatctggtgatctgtgccatggggctctttgtccatgaattcttctacagtctgctgctttttgatttagtgtacagagaagagactttgcttaatgtcattaaaagtgtcactcgcaatggacggtccatcatcctgacagcagttctggctctgatcctcgtttacctgttctcaatagtgggctatcttttcttcaaggatgactttatcttggaagtagataggctgcccaatgaaacagctgttccagaaaccggcgagagtttggcaagcgagttcctgttctccgatgtgtgtagggtggagagtggggagaactgctcctctcctgcacccagagaagagctggtccctgcagaagagacggaacaggataaagagcacacatgtgagacgctgctgatgtgcattgtcactgtgctgagtcacgggctgcggagcgggggtggagtaggagatgtactcaggaagccgtccaaagaggaacccctgtttgctgctagagttatttatgacctcttgttcttcttcatggtcatcatcattgttcttaacctgatttttggggttatcattgacacttttgctgacctgaggagtgagaagcagaagaaggaagagatcttgaagaccacgtgctttatctgtggcttggaaagagacaagtttgacaacaagactgtcacctttgaagagcacatcaaggaagaacacaacatgtggcactatctgtgcttcatcgtcctggtgaaagtaaaggactccaccgaatatactgggcctgagagttacgtggcagaaatgatcaaggaaagaaaccttgactggttccccaggatgagagccatgtcattggtcagcagtgattctgaaggagaacagaatgagctgagaaacctgcaggagaagctggagtccaccatgaaacttgtcacgaacctttctggccagctgtcggaattaaaggatcagatgacagaacaaaggaagcagaaacaaagaattggtcttctaggacatcctcctcacatgaatgtcaacccacaacaaccagcataagcaaatgaaagaaaggaattgtatttaccttttataattattattagtgtgggtatggctaatgagttctgattcacccacgaaggttacatttatgctgaatacatttgtaaatactcagttttatactgtatgtatatgattgctactctaaaggtttggatatatgtattgtaattagaattgttggcatgatgacatttcatttgtgccaaaaatattaaaaatgccttttttggaaggactaacagaaagcacctgatttgcacttgaaccagattatagatttaaaagtatatgacatgtattttgtatttaaaactagaatagccagtatttatgttttttataaaactgtgcaatacgaattatgcaatcacaatacatttgtagctcccgagtgtcctaaagggagtgcacttctttgaagctggtgtgttaatactatgtaataaatggttaactttcaaatgatgctgctgccaaaattatattaatagtgagtttcaggcccctgggcattttgtaccatgtaattatcctctggtgatgctgtttctcgttagtggcagtagtgcctccgtctcctagtgataatgctccaagtctatgaactgttaaatcagcattcattttaagaaaagcaactttagtttcaaagatacttttaagcttctaaattgatcatttaaactatttctttaaataagagagccaaattagaggctcatactttagcttgtgaagaagataatgaattttttaaagggaactttctatgcaatgttcaggataaatgcatactgctggccaatcagtgtcatctcctgggtaaattttgatgtcgcattataaagacatgcataattgatggtttctagattatctagtccaaacaatagagtttattttttcttcatctgaaccaacatgctacagtagctaagaagtattaaaactatatacatccatataaagatgaaatatgaactatctcattagaagtcatagttgaccacagacatgttattcttctgaaagagccacattttggttttatttcttgtcacatgatttcttttcttgatggatgaaaaatatgaaaggaaacttttatatctgttgcctagttttgtacatggatctcattttacaagagaatctctctgcaaaaaaaaaaaaaacagtttaaaaatgcattgaaagcagagttctgaaatgagtaaagtttgtaaatgcatatataaaaatatttaataaatgatgcagaatatacagtga

SEQ ID NO: 9986 - DNA, 9717 bp, Homo sapiens
  source 1..9717: mol_type = unassigned DNA; mol_type = unassigned DNA
agtaaccatgtggatgtgctgctgaagcgtttcctcaagctcgctggggtgggaggagaggaggaggaggaggtggtggtggaggaggaggcagggggtggagagagagaaagcgcacgccgagaggaggtgtgggtgttccgcttccatcctaacggaacgagctccctcttcgcggacatgggattacccagcggctgctaacccctctcctcgccctgctcccccaaaccggcgtggctccccgggcaccaaggagctgactacagaggagcaggatttgcacccctcgctgggcttgctttggcaacagagtgcctgacccaggtcaggattttcaagaaagacatgtctgacaaaatgtctagcttcctacatattggagacatttgttctctgtacgcggagggatcgacaaatggatttattagcaccttgggcctggttgatgatcgttgtgttgtacagccagaaaccggggaccttaacaatccacctaagaaattcagagactgcctctttaagctatgtcccatgaaccgctactctgcccaaaagcagttctggaaagccgctaagcctggggccaacagcaccacagacgcagtgctactcaacaaactgcaccacgctgcagacttggaaaagaagcagaatgagacagaaaacaggaaattgctggggaccgtaatccagtatggcaatgtgatccagctcctgcatttgaaaagtaataaatacctaacagtgaataagaggcttcctgctctgttggagaagaatgccatgagagtcacattggacgaggctggaaatgaagggtcctggttttatattcagccattctacaagctgcgatccattggagacagcgtggtcataggtgacaaggtggttctgaaccccgtcaatgctggtcagcccctacatgctagcagccatcaactggtagataacccaggctgcaatgaggtcaattccgtcaactgcaatacaagctggaaaatagtccttttcatgaaatggagtgataacaaagacgacatattaaaggggggtgacgtggtgaggctgtttcatgctgagcaggagaagtttctcacctgtgacgaacacaggaagaagcagcacgtcttcctgagaaccacgggccggcagtcggccacatctgccaccagttcaaaagccctgtgggaggtggaggtggtccagcatgacccatgtcggggcggagcagggtattggaacagccttttccgtttcaagcatctggccacggggcattacttggcagcagaggtggaccctgatcaggacgcctctcgaagtaggttgcggaatgcccaagaaaagatggtatactccctggtctctgtgcctgaaggcaatgacatctcctccattttcgagctagatcccaccactctgcgtggaggtgacagccttgtcccaaggaactcttatgttcggctcagacacctatgtactaatacctgggttcacagcacaaatattcctattgacaaggaagaagaaaagcccgtgatgctgaaaattggcacctctcctgtgaaggaggataaggaagcatttgccatagttccggtttctcctgctgaagttcgggacctggactttgccaatgatgccagcaaggtgctgggctccattgctgggaagctagagaagggcaccatcacccagaatgaaaggaggtctgtaaccaagctgctagaagatttggtttacttcgtcactggtggaactaattctggtcaagatgttctcgaagttgtcttctccaagcccaacagagaacggcagaaactgatgagagaacagaatattctcaagcagatcttcaagttgttacaagccccattcacagactgcggtgatggcccaatgcttcggctggaagagctcggggaccagcggcacgctcctttcagacacatctgccggctctgctacagggtgctgagacactcgcagcaagactacaggaagaaccaggagtatatagccaagcagtttggcttcatgcagaagcagattggctatgatgtgttggctgaagacactatcactgccctgctccacaataatcggaaactcctggaaaaacacattaccgcggcagagattgacacatttgtcagcctggtgcgaaagaacagggagcccagattcttagattacctctccgacctctgtgtctccatgaacaaatcaattccagtgacccaggaactgatatgtaaagctgtgctgaaccccaccaacgctgacatcctgattgagaccaagttggttctttctcgttttgaatttgaaggtgtctcttccactggagagaatgctctggaggcaggagaagacgaggaagaggtgtggctgttttggagggacagcaacaaagagattcgcagcaagagtgtgagggaattggctcaggatgctaaagaagggcagaaggaggaccgagacgttctcagctactacagatatcagctgaacctctttgcgaggatgtgtctggaccgccaatacctggccatcaacgaaatctcaggccagctggatgtcgatctcattctccgctgcatgtctgacgagaacctgccctatgacctcagggcgtccttctgccgcctcatgcttcacatgcatgtggaccgagatccccaggaacaagtcacccccgtgaaatatgcccgcctctggtcggagattccctcggagatcgccattgacgactatgatagtagtggagcttccaaagatgaaattaaggagagatttgctcagaccatggagtttgtggaggagtatttaagagatgtggtttgtcagaggttccctttctctgataaagagaagaataagcttacgtttgaggttgtaaatttagctaggaatctcatatactttggtttctacaacttctctgaccttctacgattaactaagatccttctggccatattggactgtgtacatgtgacaacaatcttccccattagcaagatggcgaaaggagaagagaataaaggcagtaacgtgatgagatctattcatggcgtgggagagctgatgacccaggtggtgctccggggaggaggctttttgcccatgactcccatggctgctgcccctgaaggcaatgtgaagcaggcagagcctgagaaggaggacatcatggtcatggacaccaagctgaagatcattgagatactccagtttattttgaatgtgaggttggattataggatctcctgcctcctgtgtatatttaagcgagagtttgatgaaagcaattcccagacttcagaaacatcctccggaaacagcagccaagaagggccaagtaatgtaccaggtgctcttgactttgaacacattgaagaacaagcagaaggcatctttggaggaagtgaggagaacaccccactggacttggatgaccacggcggcagaacctttctccgtgtcctgctccacttgacgatgcatgactacccacccctggtgtcaggggccctgcagctcctcttccggcacttcagccagaggcaggaggtgctccaggccttcaaacaggttcaactgctggttaccagccaagatgtggacaactacaaacagatcaaacaagacttggatcaactgaggtccatcgtggaaaagtcagagctttgggtgtacaaagggcagggccccgatgagactatggatggtgcatctggagaaaatgaacataagaaaacggaggagggaaataacaagccacaaaagcatgaaagcaccagcagctacaactacagagtggtcaaagagattttgattcggcttagcaaactctgtgttcaagagagtgcctcagtgagaaagagcaggaagcagcaacagcgtctgctccggaacatgggcgcgcacgccgtggtgctggagctgctgcagattccctatgagaaggccgaagataccaagatgcaagagataatgaggttggctcatgaatttttgcagaatttctgcgcaggcaaccagcagaatcaagctttgctacataaacacataaacctgtttctcaacccagggatcctggaggcagtaaccatgcagcacatcttcatgaacaatttccagctttgcagtgagatcaacgagagagttgttcagcacttcgttcactgcatagagactcacggtcggaatgtccagtatataaagttcttacagacaattgtcaaggcagaagggaaatttattaaaaaatgccaagacatggttatggccgagctggtcaattcgggagaggatgtcctcgtgttctacaacgacagagcctctttccagactctgatccagatgatgcggtcagaacgggatcggatggatgagaacagccctctcatgtaccacatccacttggtcgagctcctggctgtgtgcacggagggtaagaatgtctacacagagatcaagtgcaactccctgctcccgctggatgacatcgttcgcgtggtgacccacgaggactgcatccctgaggttaaaattgcatacattaacttcctgaatcactgctatgtggatacagaggtggaaatgaaggagatttataccagcaatcacatgtggaaattgtttgagaatttccttgtagacatctgcagggcctgtaacaacactagtgacaggaaacatgcagactcgattttggagaagtatgtcaccgaaatcgtcatgagtattgttactactttcttcagctctcccttctcagaccagagtacgactttgcagactcgccagcctgtctttgtgcaactgctgcaaggcgtgttcagggtttaccactgcaactggttaatgccaagccaaaaagcctccgtggagagctgtattcgggtgctgtctgatgtagccaagagccgggccattgccattcccgtggacctggacagccaagtcaacaacctctttctcaagtcccacagcattgtgcagaaaacagccatgaactggcggctctcagcccgcaatgccgcacgcagggactctgttctggcagcttccagagactaccggaatatcattgagagattgcaggacatcgtctccgcgctggaggaccgtctcaggcccctggtgcaggcagagttatctgtgctcgtggatgttctccacagacccgagctgcttttcccagagaacacagacgccagaaggaaatgtgaaagtggcggtttcatttgcaagttaataaagcatacaaaacagctgctagaagaaaatgaagagaagctctgcattaaggtcctacagaccctgagggaaatgatgaccaaagatagaggctatggagaaaagggtgaggcgctcaggcaagttctggtcaaccgttactatggaaacgtcagaccttcgggacgaagagagagccttaccagctttggcaatggcccactgtcagcaggaggacccggcaagcccgggggaggagggggaggttccggatccagctctatgagcaggggtgagatgagtctggccgaggttcagtgtcaccttgacaaggagggggcttccaatctagttatcgacctcatcatgaacgcatccagtgaccgagtgttccatgaaagcattctcctggccattgcccttctggaaggaggcaacaccaccatccagcactcctttttctgtcgcttgacagaagataagaagtcagagaaattctttaaggtgttttatgaccggatgaaggtggcccagcaagaaatcaaagcaacagtgacagtgaacaccagtgacttgggaaataaaaagaaagacgatgaggtagacagggatgccccatcacggaaaaaagctaaagagcccacaacacagataacagaagaggtccgggatcagctcctggaggcctccgctgccaccaggaaagccttcaccactttcaggagggaggctgatcccgacgaccactaccagcctggagagggcacccaggccactgccgacaaggccaaggacgacctggagatgagcgcggtcatcaccatcatgcagcccatcctccgcttccttcagctcctgtgtgaaaaccacaaccgagacctgcagaacttcctccgttgccaaaataacaagaccaactacaatttggtatgtgagaccctgcagtttctggactgtatttgtggaagcacaactggaggccttggtcttctgggcttgtatataaatgaaaagaatgtagcgcttatcaaccaaaccctggaaagtctgaccgaatactgtcaaggaccttgccatgagaaccagaactgcatagccacccatgaatccaatggcattgacatcatcacagccctgatcctcaatgatatcaatcctttgggaaagaagaggatggaccttgtgttagaactgaagaacaatgcctcgaagttgctcctggccatcatggaaagcaggcacgacagtgaaaacgcagagaggatactttataacatgaggcccaaggaactggtggaagtgatcaagaaagcctacatgcaaggtgaagtggaatttgaggatggagaaaacggtgaggatggggcggcgtcccccaggaacgtggggcacaacatctacatattagcccatcagttggctcggcataacaaagaacttcagagcatgctgaaacctggtggccaagtggacggagatgaagccctggagttttatgccaagcacacggcgcagatagagattgtcagattagaccgaacaatggaacagatagtctttcccgtgcccagcatatgtgaattcctaaccaaggagtcaaaactacgaatttactatactacagagagagacgaacaaggcagcaaaatcaatgatttctttctgcggtctgaagacctcttcaatgaaatgaattggcagaagaaactgagagcccagcccgtgttgtactggtgtgcccgcaacatgtctttctggagcagcatttcgtttaacctggccgtcctgatgaacctgctggtggcgtttttctacccgtttaagggagtccgaggaggaaccctggagccccactggtcgggactcctgtggacagccatgctcatctctctggccatcgtcattgccctccccaagccccatggcatccgggccttaattgcctccacaattctacgactgatattttcagtcgggttacaacccacgttgtttcttctgggcgctttcaatgtatgcaataaaatcatctttctaatgagctttgtgggcaactgtgggacattcacaagaggctaccgagccatggttctggatgttgagttcctctatcatttgttgtatctggtgatctgtgccatggggctctttgtccatgaattcttctacagtctgctgctttttgatttagtgtacagagaagagactttgcttaatgtcattaaaagtgtcactcgcaatggacggtccatcatcctgacagcagttctggctctgatcctcgtttacctgttctcaatagtgggctatcttttcttcaaggatgactttatcttggaagtagataggctgcccaatgaaacagctgttccagaaaccggcgagagtttggcaagcgagttcctgttctccgatgtgtgtagggtggagagtggggagaactgctcctctcctgcacccagagaagagctggtccctgcagaagagacggaacaggataaagagcacacatgtgagacgctgctgatgtgcattgtcactgtgctgagtcacgggctgcggagcgggggtggagtaggagatgtactcaggaagccgtccaaagaggaacccctgtttgctgctagagttatttatgacctcttgttcttcttcatggtcatcatcattgttcttaacctgatttttggggttatcattgacacttttgctgacctgaggagtgagaagcagaagaaggaagagatcttgaagaccacgtgctttatctgtggcttggaaagagacaagtttgacaacaagactgtcacctttgaagagcacatcaaggaagaacacaacatgtggcactatctgtgcttcatcgtcctggtgaaagtaaaggactccaccgaatatactgggcctgagagttacgtggcagaaatgatcaaggaaagaaaccttgactggttccccaggatgagagccatgtcattggtcagcagtgattctgaaggagaacagaatgagctgagaaacctgcaggagaagctggagtccaccatgaaacttgtcacgaacctttctggccagctgtcggaattaaaggatcagatgacagaacaaaggaagcagaaacaaagaattggtcttctaggacatcctcctcacatgaatgtcaacccacaacaaccagcataagcaaatgaaagaaaggaattgtatttaccttttataattattattagtgtgggtatggctaatgagttctgattcacccacgaaggttacatttatgctgaatacatttgtaaatactcagttttatactgtatgtatatgattgctactctaaaggtttggatatatgtattgtaattagaattgttggcatgatgacatttcatttgtgccaaaaatattaaaaatgccttttttggaaggactaacagaaagcacctgatttgcacttgaaccagattatagatttaaaagtatatgacatgtattttgtatttaaaactagaatagccagtatttatgttttttataaaactgtgcaatacgaattatgcaatcacaatacatttgtagctcccgagtgtcctaaagggagtgcacttctttgaagctggtgtgttaatactatgtaataaatggttaactttcaaatgatgctgctgccaaaattatattaatagtgagtttcaggcccctgggcattttgtaccatgtaattatcctctggtgatgctgtttctcgttagtggcagtagtgcctccgtctcctagtgataatgctccaagtctatgaactgttaaatcagcattcattttaagaaaagcaactttagtttcaaagatacttttaagcttctaaattgatcatttaaactatttctttaaataagagagccaaattagaggctcatactttagcttgtgaagaagataatgaattttttaaagggaactttctatgcaatgttcaggataaatgcatactgctggccaatcagtgtcatctcctgggtaaattttgatgtcgcattataaagacatgcataattgatggtttctagattatctagtccaaacaatagagtttattttttcttcatctgaaccaacatgctacagtagctaagaagtattaaaactatatacatccatataaagatgaaatatgaactatctcattagaagtcatagttgaccacagacatgttattcttctgaaagagccacattttggttttatttcttgtcacatgatttcttttcttgatggatgaaaaatatgaaaggaaacttttatatctgttgcctagttttgtacatggatctcattttacaagagaatctctctgcaaaaaaaaaaaaaacagtttaaaaatgcattgaaagcagagttctgaaatgagtaaagtttgtaaatgcatatataaaaatatttaataaatgatgcagaatatacagtga

SEQ ID NO: 9987 - DNA, 9513 bp, Homo sapiens
  source 1..9513: mol_type = unassigned DNA; mol_type = unassigned DNA
atgtctgacaaaatgtctagcttcctacatattggagacatttgttctctgtacgcggagggatcgacaaatggatttattagcaccttgggcctggttgatgatcgttgtgttgtacagccagaaaccggggaccttaacaatccacctaagaaattcagagactgcctctttaagctatgtcccatgaaccgctactctgcccaaaagcagttctggaaagccgctaagcctggggccaacagcaccacagacgcagtgctactcaacaaactgcaccacgctgcagacttggaaaagaagcagaatgagacagaaaacaggaaattgctggggaccgtaatccagtatggcaatgtgatccagctcctgcatttgaaaagtaataaatacctaacagtgaataagaggcttcctgctctgttggagaagaatgccatgagagtcacattggacgaggctggaaatgaagggtcctggttttatattcagccattctacaagctgcgatccattggagacagcgtggtcataggtgacaaggtggttctgaaccccgtcaatgctggtcagcccctacatgctagcagccatcaactggtagataacccaggctgcaatgaggtcaattccgtcaactgcaatacaagctggaaaatagtccttttcatgaaatggagtgataacaaagacgacatattaaaggggggtgacgtggtgaggctgtttcatgctgagcaggagaagtttctcacctgtgacgaacacaggaagaagcagcacgtcttcctgagaaccacgggccggcagtcggccacatctgccaccagttcaaaagccctgtgggaggtggaggtggtccagcatgacccatgtcggggcggagcagggtattggaacagccttttccgtttcaagcatctggccacggggcattacttggcagcagaggtggaccctgatcaggacgcctctcgaagtaggttgcggaatgcccaagaaaagatggtatactccctggtctctgtgcctgaaggcaatgacatctcctccattttcgagctagatcccaccactctgcgtggaggtgacagccttgtcccaaggaactcttatgttcggctcagacacctatgtactaatacctgggttcacagcacaaatattcctattgacaaggaagaagaaaagcccgtgatgctgaaaattggcacctctcctgtgaaggaggataaggaagcatttgccatagttccggtttctcctgctgaagttcgggacctggactttgccaatgatgccagcaaggtgctgggctccattgctgggaagctagagaagggcaccatcacccagaatgaaaggaggtctgtaaccaagctgctagaagatttggtttacttcgtcactggtggaactaattctggtcaagatgttctcgaagttgtcttctccaagcccaacagagaacggcagaaactgatgagagaacagaatattctcaagcagatcttcaagttgttacaagccccattcacagactgcggtgatggcccaatgcttcggctggaagagctcggggaccagcggcacgctcctttcagacacatctgccggctctgctacagggtgctgagacactcgcagcaagactacaggaagaaccaggagtatatagccaagcagtttggcttcatgcagaagcagattggctatgatgtgttggctgaagacactatcactgccctgctccacaataatcggaaactcctggaaaaacacattaccgcggcagagattgacacatttgtcagcctggtgcgaaagaacagggagcccagattcttagattacctctccgacctctgtgtctccatgaacaaatcaattccagtgacccaggaactgatatgtaaagctgtgctgaaccccaccaacgctgacatcctgattgagaccaagttggttctttctcgttttgaatttgaaggtgtctcttccactggagagaatgctctggaggcaggagaagacgaggaagaggtgtggctgttttggagggacagcaacaaagagattcgcagcaagagtgtgagggaattggctcaggatgctaaagaagggcagaaggaggaccgagacgttctcagctactacagatatcagctgaacctctttgcgaggatgtgtctggaccgccaatacctggccatcaacgaaatctcaggccagctggatgtcgatctcattctccgctgcatgtctgacgagaacctgccctatgacctcagggcgtccttctgccgcctcatgcttcacatgcatgtggaccgagatccccaggaacaagtcacccccgtgaaatatgcccgcctctggtcggagattccctcggagatcgccattgacgactatgatagtagtggagcttccaaagatgaaattaaggagagatttgctcagaccatggagtttgtggaggagtatttaagagatgtggtttgtcagaggttccctttctctgataaagagaagaataagcttacgtttgaggttgtaaatttagctaggaatctcatatactttggtttctacaacttctctgaccttctacgattaactaagatccttctggccatattggactgtgtacatgtgacaacaatcttccccattagcaagatggcgaaaggagaagagaataaaggtaacaatgatgtggagaagctgaagagcagtaacgtgatgagatctattcatggcgtgggagagctgatgacccaggtggtgctccggggaggaggctttttgcccatgactcccatggctgctgcccctgaaggcaatgtgaagcaggcagagcctgagaaggaggacatcatggtcatggacaccaagctgaagatcattgagatactccagtttattttgaatgtgaggttggattataggatctcctgcctcctgtgtatatttaagcgagagtttgatgaaagcaattcccagacttcagaaacatcctccggaaacagcagccaagaagggccaagtaatgtaccaggtgctcttgactttgaacacattgaagaacaagcagaaggcatctttggaggaagtgaggagaacaccccactggacttggatgaccacggcggcagaacctttctccgtgtcctgctccacttgacgatgcatgactacccacccctggtgtcaggggccctgcagctcctcttccggcacttcagccagaggcaggaggtgctccaggccttcaaacaggttcaactgctggttaccagccaagatgtggacaactacaaacagatcaaacaagacttggatcaactgaggtccatcgtggaaaagtcagagctttgggtgtacaaagggcagggccccgatgagactatggatggtgcatctggagaaaatgaacataagaaaacggaggagggaaataacaagccacaaaagcatgaaagcaccagcagctacaactacagagtggtcaaagagattttgattcggcttagcaaactctgtgttcaagagagtgcctcagtgagaaagagcaggaagcagcaacagcgtctgctccggaacatgggcgcgcacgccgtggtgctggagctgctgcagattccctatgagaaggccgaagataccaagatgcaagagataatgaggttggctcatgaatttttgcagaatttctgcgcaggcaaccagcagaatcaagctttgctacataaacacataaacctgtttctcaacccagggatcctggaggcagtaaccatgcagcacatcttcatgaacaatttccagctttgcagtgagatcaacgagagagttgttcagcacttcgttcactgcatagagactcacggtcggaatgtccagtatataaagttcttacagacaattgtcaaggcagaagggaaatttattaaaaaatgccaagacatggttatggccgagctggtcaattcgggagaggatgtcctcgtgttctacaacgacagagcctctttccagactctgatccagatgatgcggtcagaacgggatcggatggatgagaacagccctctcatgtaccacatccacttggtcgagctcctggctgtgtgcacggagggtaagaatgtctacacagagatcaagtgcaactccctgctcccgctggatgacatcgttcgcgtggtgacccacgaggactgcatccctgaggttaaaattgcatacattaacttcctgaatcactgctatgtggatacagaggtggaaatgaaggagatttataccagcaatcacatgtggaaattgtttgagaatttccttgtagacatctgcagggcctgtaacaacactagtgacaggaaacatgcagactcgattttggagaagtatgtcaccgaaatcgtcatgagtattgttactactttcttcagctctcccttctcagaccagagtacgactttgcagactcgccagcctgtctttgtgcaactgctgcaaggcgtgttcagggtttaccactgcaactggttaatgccaagccaaaaagcctccgtggagagctgtattcgggtgctgtctgatgtagccaagagccgggccattgccattcccgtggacctggacagccaagtcaacaacctctttctcaagtcccacagcattgtgcagaaaacagccatgaactggcggctctcagcccgcaatgccgcacgcagggactctgttctggcagcttccagagactaccggaatatcattgagagattgcaggacatcgtctccgcgctggaggaccgtctcaggcccctggtgcaggcagagttatctgtgctcgtggatgttctccacagacccgagctgcttttcccagagaacacagacgccagaaggaaatgtgaaagtggcggtttcatttgcaagttaataaagcatacaaaacagctgctagaagaaaatgaagagaagctctgcattaaggtcctacagaccctgagggaaatgatgaccaaagatagaggctatggagaaaagctaatttccattgatgaattggataatgctgagcttcctccagctccggattctgagaacgccactgaggagcttgaaccaagtccacccctgcggcagctggaagaccataaaaggggtgaggcgctcaggcaagttctggtcaaccgttactatggaaacgtcagaccttcgggacgaagagagagccttaccagctttggcaatggcccactgtcagcaggaggacccggcaagcccgggggaggagggggaggttccggatccagctctatgagcaggggtgagatgagtctggccgaggttcagtgtcaccttgacaaggagggggcttccaatctagttatcgacctcatcatgaacgcatccagtgaccgagtgttccatgaaagcattctcctggccattgcccttctggaaggaggcaacaccaccatccagcactcctttttctgtcgcttgacagaagataagaagtcagagaaattctttaaggtgttttatgaccggatgaaggtggcccagcaagaaatcaaagcaacagtgacagtgaacaccagtgacttgggaaataaaaagaaagacgatgaggtagacagggatgccccatcacggaaaaaagctaaagagcccacaacacagataacagaagaggtccgggatcagctcctggaggcctccgctgccaccaggaaagccttcaccactttcaggagggaggctgatcccgacgaccactaccagcctggagagggcacccaggccactgccgacaaggccaaggacgacctggagatgagcgcggtcatcaccatcatgcagcccatcctccgcttccttcagctcctgtgtgaaaaccacaaccgagacctgcagaacttcctccgttgccaaaataacaagaccaactacaatttggtatgtgagaccctgcagtttctggactgtatttgtggaagcacaactggaggccttggtcttctgggcttgtatataaatgaaaagaatgtagcgcttatcaaccaaaccctggaaagtctgaccgaatactgtcaaggaccttgccatgagaaccagaactgcatagccacccatgaatccaatggcattgacatcatcacagccctgatcctcaatgatatcaatcctttgggaaagaagaggatggaccttgtgttagaactgaagaacaatgcctcgaagttgctcctggccatcatggaaagcaggcacgacagtgaaaacgcagagaggatactttataacatgaggcccaaggaactggtggaagtgatcaagaaagcctacatgcaaggtgaagtggaatttgaggatggagaaaacggtgaggatggggcggcgtcccccaggaacgtggggcacaacatctacatattagcccatcagttggctcggcataacaaagaacttcagagcatgctgaaacctggtggccaagtggacggagatgaagccctggagttttatgccaagcacacggcgcagatagagattgtcagattagaccgaacaatggaacagatagtctttcccgtgcccagcatatgtgaattcctaaccaaggagtcaaaactacgaatttactatactacagagagagacgaacaaggcagcaaaatcaatgatttctttctgcggtctgaagacctcttcaatgaaatgaattggcagaagaaactgagagcccagcccgtgttgtactggtgtgcccgcaacatgtctttctggagcagcatttcgtttaacctggccgtcctgatgaacctgctggtggcgtttttctacccgtttaagggagtccgaggaggaaccctggagccccactggtcgggactcctgtggacagccatgctcatctctctggccatcgtcattgccctccccaagccccatggcatccgggccttaattgcctccacaattctacgactgatattttcagtcgggttacaacccacgttgtttcttctgggcgctttcaatgtatgcaataaaatcatctttctaatgagctttgtgggcaactgtgggacattcacaagaggctaccgagccatggttctggatgttgagttcctctatcatttgttgtatctggtgatctgtgccatggggctctttgtccatgaattcttctacagtctgctgctttttgatttagtgtacagagaagagactttgcttaatgtcattaaaagtgtcactcgcaatggacggtccatcatcctgacagcagttctggctctgatcctcgtttacctgttctcaatagtgggctatcttttcttcaaggatgactttatcttggaagtagataggctgcccaatgaaacagctgttccagaaaccggcgagagtttggcaagcgagttcctgttctccgatgtgtgtagggtggagagtggggagaactgctcctctcctgcacccagagaagagctggtccctgcagaagagacggaacaggataaagagcacacatgtgagacgctgctgatgtgcattgtcactgtgctgagtcacgggctgcggagcgggggtggagtaggagatgtactcaggaagccgtccaaagaggaacccctgtttgctgctagagttatttatgacctcttgttcttcttcatggtcatcatcattgttcttaacctgatttttggggttatcattgacacttttgctgacctgaggagtgagaagcagaagaaggaagagatcttgaagaccacgtgctttatctgtggcttggaaagagacaagtttgacaacaagactgtcacctttgaagagcacatcaaggaagaacacaacatgtggcactatctgtgcttcatcgtcctggtgaaagtaaaggactccaccgaatatactgggcctgagagttacgtggcagaaatgatcaaggaaagaaaccttgactggttccccaggatgagagccatgtcattggtcagcagtgattctgaaggagaacagaatgagctgagaaacctgcaggagaagctggagtccaccatgaaacttgtcacgaacctttctggccagctgtcggaattaaaggatcagatgacagaacaaaggaagcagaaacaaagaattggtcttctaggacatcctcctcacatgaatgtcaacccacaacaaccagcataagcaaatgaaagaaaggaattgtatttaccttttataattattattagtgtgggtatggctaatgagttctgattcacccacgaaggttacatttatgctgaatacatttgtaaatactcagttttatactgtatgtatatgattgctactctaaaggtttggatatatgtattgtaattagaattgttggcatgatgacatttcatttgtgccaaaaatattaaaaatgccttttttggaaggactaacagaaagcacctgatttgcacttgaaccagattatagatttaaaagtatatgacatgtattttgtatttaaaactagaatagccagtatttatgttttttataaaactgtgcaatacgaattatgcaatcacaatacatttgtagctcccgagtgtcctaaagggagtgcacttctttgaagctggtgtgttaatactatgtaataaatggttaactttcaaatgatgctgctgccaaaattatattaatagtgagtttcaggcccctgggcattttgtaccatgtaattatcctctggtgatgctgtttctcgttagtggcagtagtgcctccgtctcctagtgataatgctccaagtctatgaactgttaaatcagcattcattttaagaaaagcaactttagtttcaaagatacttttaagcttctaaattgatcatttaaactatttctttaaataagagagccaaattagaggctcatactttagcttgtgaagaagataatgaattttttaaagggaactttctatgcaatgttcaggataaatgcatactgctggccaatcagtgtcatctcctgggtaaattttgatgtcgcattataaagacatgcataattgatggtttctagattatctagtccaaacaatagagtttattttttcttcatctgaaccaacatgctacagtagctaagaagtattaaaactatatacatccatataaagatgaaatatgaactatctcattagaagtcatagttgaccacagacatgttattcttctgaaagagccacattttggttttatttcttgtcacatgatttcttttcttgatggatgaaaaatatgaaaggaaacttttatatctgttgcctagttttgtacatggatctcattttacaagagaatctctctgcaaaaaaaaaaaaaacagtttaaaaatgcattgaaagcagagttctgaaatgagtaaagtttgtaaatgcatatataaaaatatttaataaatgatgcagaatatacagtga

SEQ ID NO: 9988 - DNA, 264 bp, Homo sapiens
  source 1..264: mol_type = unassigned DNA; mol_type = unassigned DNA
gcggttacagaattgtgacacgtccaaattacagacaaatgctcttctcaaaacttctctgcactttggaaagctctgcatttcaccgagcttaagttgctatctatgtatctatacttcagactgcctctttaagctatgtcccatgaaccgctactctgcccaaaagcagttctggaaagccgctaagcctggggccaacagcaccacagacgcagtgctactcaacaaactgcaccacgctgcagacttggaaaagaagca

SEQ ID NO: 9989 - DNA, 2151 bp, Homo sapiens
  source 1..2151: mol_type = unassigned DNA; mol_type = unassigned DNA
aatgcacagcacgctgcagacttggaaaagaagcagaatgagacagaaaacaggaaattgctggggaccgtaatccagtatggcaatgtgatccagctcctgcatttgaaaagtaataaatacctaacagtgaataagaggcttcctgctctgttggagaagaatgccatgagagtcacattggacgaggctggaaatgaagggtcctggttttatattcagccattctacaagctgcgatccattggagacagcgtggtcataggtgacaaggtggttctgaaccccgtcaatgctggtcagcccctacatgctagcagccatcaactggtagataacccaggctgcaatgaggtcaattccgtcaactgcaatacaagctggaaaatagtccttttcatgaaatggagtgataacaaagacgacatattaaaggggggtgacgtggtgaggctgtttcatgctgagcaggagaagtttctcacctgtgacgaacacaggaagaagcagcacgtcttcctgagaaccacgggccggcagtcggccacatctgccaccagttcaaaagccctgtgggaggtggaggtggtccagcatgacccatgtcggggcggagcagggtattggaacagccttttccgtttcaagcatctggccacggggcattacttggcagcagaggtggaccctgatcaggacgcctctcgaagtaggttgcggaatgcccaagaaaagatggtatactccctggtctctgtgcctgaaggcaatgacatctcctccattttcgagctagatcccaccactctgcgtggaggtgacagccttgtcccaaggaactcttatgttcggctcagacacctatgtactaatacctgggttcacagcacaaatattcctattgacaaggaagaagaaaagcccgtgatgctgaaaattggcacctctcctgtgaaggaggataaggaagcatttgccatagttccggtttctcctgctgaagttcgggacctggactttgccaatgatgccagcaaggtgctgggctccattgctgggaagctagagaagggcaccatcacccagaatgaaaggaggtctgtaaccaagctgctagaagatttggtttacttcgtcactggtggaactaattctggtcaagatgttctcgaagttgtcttctccaagcccaacagagaacggcagaaactgatgagagaacagaatattctcaagcagatcttcaagttgttacaagccccattcacagactgcggtgatggcccaatgcttcggctggaagagctcggggaccagcggcacgctcctttcagacacatctgccggctctgctacagggtgctgagacactcgcagcaagactacaggaagaaccaggagtatatagccaagcagtttggcttcatgcagaagcagattggctatgatgtgttggctgaagacactatcactgccctgctccacaataatcggaaactcctggaaaaacacattaccgcggcagagattgacacatttgtcagcctggtgcgaaagaacagggagcccagattcttagattacctctccgacctctgtgtctccatgaacaaatcaattccagtgacccaggaactgatatgtaaagctgtgctgaaccccaccaacgctgacatcctgattgagaccaagttggttctttctcgttttgaatttgaaggtgtctcttccactggagagaatgctctggaggcaggagaagacgaggaagaggtgtggctgttttggagggacagcaacaaagagattcgcagcaagagtgtgagggaattggctcaggatgctaaagaagggcagaaggaggaccgagacgttctcagctactacagctgccacgattccctgtatgtttacccatctgcccgtttccctgtgtgtacctgtctcacctctgccacccacctccacggtccccagtgtctccttggctccagctgtaagacctgccagtcctgccacctgaagggaagggaaggggaagaaagaaaggaagtgaaccaattaatacttttaaaagaaaaggaaagggaagataaagcaaggcttttattattttttaataaaataaataaaactgcagataaaatgcct

SEQ ID NO: 9990 - DNA, 580 bp, Homo sapiens
  source 1..580: mol_type = unassigned DNA; mol_type = unassigned DNA
agttgctaactggctgttctcagtgcagggaatgccctgaagtatctttaacctgagagctcttaataaatatttgttcattaacggactagttaaaataaattgcttgtgaagtctttttaatttaaaattagcttcaaggaagtaatccgtggttttccccccattcaggttaataaagcatacaaaacagctgctagaagaaaatgaagagaagctctgcattaaggtcctacagaccctgagggaaatgatgaccaaagatagaggctatggagaaaagctaatttccattgatgaattggataatgctgagcttcctccagctccggattctgagaacgccactgaggagcttgaaccaagtccacccctgcggcagctggaagaccataaaaggggtgaggcgctcaggcaagttctggtcaaccgttactatggaaacgtcagaccttcgggacgaagagagagccttaccagctttggcaatggcccactgtcagcaggaggacccggcaagcccgggggaggagggggaggttccggatccagctctatgagcaggggtgagatgagtctg

SEQ ID NO: 9991 - DNA, 697 bp, Homo sapiens
  source 1..697: mol_type = unassigned DNA; mol_type = unassigned DNA
ttgagctggacgaagacaccaccagatttcgtagtgtcactcatctcatgctttcaacaccagccctggcctgccacctgacagccaccttctggccctgagggtgaggcgctcaggcaagttctggtcaaccgttactatggaaacgtcagaccttcgggacgaagagagagccttaccagctttggcaatggcccactgtcagcaggaggacccggcaagcccgggggaggagggggaggttccggatccagctctatgagcaggggtgagatgagtctggccgaggttcagtgtcaccttgacaaggagggggcttccaatctagttatcgacctcatcatgaacgcatccagtgaccgagtgttccatgaaagcattctcctggccattgcccttctggaaggaggcaacaccaccatccaggtaggaaggcagcttggctactggtatggcatccctgctgagcaggaggagagtctgttctgggagccagatgtctgggtggtaccaagccttgtttgagagacagctcattctgagggcacaaaattctgttttgaaaaatgagttctgctagtatcctgctgtgatcatttggtcataaatcagacttggttccagaacatgagttacatttgaaaactgataaaacactgagaatacgcaaaggaaactggcctaagatctggcacat

SEQ ID NO: 9992 - DNA, 591 bp, Homo sapiens
  source 1..591: mol_type = unassigned DNA
ttttcctctgaaacacactgtacacgtaggtgaaatggtagatccacaagtaaggtggcagggcctggctcggttttaatcctgtctgaggactgagagcagattgtgacttctttgagtgttttgccaactttgaacgtctctaggagataaaggaatgtaggtttctgagtgtcacctttggagtggtgaatagggcccatgaggactctgcagcctttcatgccttatgcttgctttctagctaaagagcccacaacacagataacagaagaggtccgggatcagctcctggaggcctccgctgccaccaggaaagccttcaccactttcaggagggaggctgatcccgacgaccactaccagcctggagagggcacccaggccactgccgacaaggccaaggacgacctggagatgagcgcggtcatcaccatcatgcagcccatcctccgcttccttcagctcctgtgtgaaaaccacaaccgagacctgcagaacttcctccgttgccaaaataacaagaccaactacaatttggtatgtgagaccctgcagtttctggactgtatttgtggaagcacaactgga

SEQ ID NO: 9993 - DNA, 552 bp, Homo sapiens
  source 1..552: mol_type = unassigned DNA
attgctgccttctaaagaaggacattaaccagccacagcatgtctcttggtctaagtagagtgaatgagtttcatttctcacgacaggagaggtggattggtattgatggcctgtgccagtgtcatgaaggattctgaggctgtgtccaagcccgataggagagagtgcggaacagccttttccctgggaggggagacagccagtgtgcatgctgtccatccagtcctgtgtgggtcttccttgaaacaggatttttgttcccttggctcttcttgcaggtggaagtgatcaagaaagcctacatgcaaggtgaagtggaatttgaggatggagaaaacggtgaggatggggcggcgtcccccaggaacgtggggcacaacatctacatattagcccatcagttggctcggcataacaaagaacttcagagcatgctgaaacctggtggccaagtggacggagatgaagccctggagttttatgccaagcacacggcgcagatagagattgtcagattagaccgaacaatggaacagatagtctttcccgtg

SEQ ID NO: 9994 - DNA, 571 bp, Homo sapiens
  source 1..571: mol_type = unassigned DNA
attgcattcctggcgttccggcttggggtctccagcctcacgcggctttgcctttgtctctgcagcccagcccgtgttgtactggtgtgcccgcaacatgtctttctggagcagcatttcgtttaacctggccgtcctgatgaacctgctggtggcgtttttctacccgtttaagggagtccgaggaggaaccctggagccccactggtcgggactcctgtggacagccatgctcatctctctggccatcgtcattgccctccccaagccccatggcatccgggccttaattgcctccacaattctacgactgatattttcagtcgggttacaacccacgttgtttcttctgggcgctttcaatgtatgcaataaaatcatctttctaatgagctttgtgggcaactgtgggacattcacaagaggctaccgagccatggttctggatgttgagttcctctatcatttgttgtatctggtgatctgtgccatggggctctttgtccatgaattcttctacagtctgctgctttttgatttagtgtacagagaagagactttgcttaatgtc

SEQ ID NO: 9995 - DNA, 1793 bp, Homo sapiens
  source 1..1793: mol_type = unassigned DNA
aattgtagcatgatgctcatgacacggaagttgcctttctccttcccttggagaaatctgattcaggcaggggacctgcagttttcctttgcatacttttaatagaaattaagtttaggcttccacgtcgccttctttgagtgaagtgtgacacatgcatgagttttatttctcgaacgagcttttcgtgagtacctgccaggcaccaggaaccctggagccccactggtcgggactcctgtggacagccatgctcatctctctggccatcgtcattgccctccccaagccccatggcatccgggccttaattgcctccacaattctacgactgatattttcagtcgggttacaacccacgttgtttcttctgggcgctttcaatgtatgcaataaaatcatctttctaatgagctttgtgggcaactgtgggacattcacaagaggctaccgagccatggttctggatgttgagttcctctatcatttgttgtatctggtgatctgtgccatggggctctttgtccatgaattcttctacagtctgctgctttttgatttagtgtacagagaagagactttgcttaatgtcattaaaagtgtcactcgcaatggacggtccatcatcctgacagcagttctggctctgatcctcgtttacctgttctcaatagtgggctatcttttcttcaaggatgactttatcttggaagtagataggctgcccaatgaaacagctgttccagaaaccggcgagagtttggcaagcgagttcctgttctccgatgtgtgtagggtggagagtggggagaactgctcctctcctgcacccagagaagagctggtccctgcagaagagacggaacaggataaagagcacacatgtgagacgctgctgatgtgcattgtcactgtgctgagtcacgggctgcggagcgggggtggagtaggagatgtactcaggaagccgtccaaagaggaacccctgtttgctgctagagttatttatgacctcttgttcttcttcatggtcatcatcattgttcttaacctgatttttggggttatcattgacacttttgctgacctgaggagtgagaagcagaagaaggaagagatcttgaagaccacgtgctttatctgtggcttggaaagagacaagtttgacaacaagactgtcacctttgaagagcacatcaaggaagaacacaacatgtggcactatctgtgcttcatcgtcctggtgaaagtaaaggactccaccgaatatactgggcctgagagttacgtggcagaaatgatcaaggaaagaaaccttgactggttccccaggatgagagccatgtcattggtcagcagtgattctgaaggagaacagaatgagctgagaaacctgcaggagaagctggagtccaccatgaaacttgtcacgaacctttctggccagctgtcggaattaaaggatcagatgacagaacaaaggaagcagaaacaaagaattggtcttctaggacatcctcctcacatgaatgtcaacccacaacaaccagcataagcaaatgaaagaaaggaattgtatttaccttttataattattattagtgtgggtatggctaatgagttctgattcacccacgaaggttacatttatgctgaatacatttgtaaatactcagttttatactgtatgtatatgattgctactctaaaggtttggatatatgtattgtaattagaattgttggcatgatgacatttcatttgtgccaaaaatattaaaaatgccttttttg

SEQ ID NO: 9996 - DNA, 2215 bp, Homo sapiens
  source 1..2215: mol_type = unassigned DNA
gtagcatgatgctcatgacacggaagttgcctttctccttcccttggagaaatctgattcaggcaggggacctgcagttttcctttgcatacttttaatagaaattaagtttaggcttccacgtcgccttctttgagtgaagtgtgacacatgcatgagttttatttctcgaacgagcttttcgtgagtacctgccaggcaccaggtacttcccctggggaatgtgcaatctggaaccctggagccccactggtcgggactcctgtggacagccatgctcatctctctggccatcgtcattgccctccccaagccccatggcatccgggccttaattgcctccacaattctacgactgatattttcagtcgggttacaacccacgttgtttcttctgggcgctttcaatgtatgcaataaaatcatctttctaatgagctttgtgggcaactgtgggacattcacaagaggctaccgagccatggttctggatgttgagttcctctatcatttgttgtatctggtgatctgtgccatggggctctttgtccatgaattcttctacagtctgctgctttttgatttagtgtacagagaagagactttgcttaatgtcattaaaagtgtcactcgcaatggacggtccatcatcctgacagcagttctggctctgatcctcgtttacctgttctcaatagtgggctatcttttcttcaaggatgactttatcttggaagtagataggctgcccaatgaaacagctgttccagaaaccggcgagagtttggcaagcgagttcctgttctccgatgtgtgtagggtggagagtggggagaactgctcctctcctgcacccagagaagagctggtccctgcagaagagacggaacaggataaagagcacacatgtgagacgctgctgatgtgcattgtcactgtgctgagtcacgggctgcggagcgggggtggagtaggagatgtactcaggaagccgtccaaagaggaacccctgtttgctgctagagttatttatgacctcttgttcttcttcatggtcatcatcattgttcttaacctgatttttggggttatcattgacacttttgctgacctgaggagtgagaagcagaagaaggaagagatcttgaagaccacgtgctttatctgtggcttggaaagagacaagtttgacaacaagactgtcacctttgaagagcacatcaaggaagaacacaacatgtggcactatctgtgcttcatcgtcctggtgaaagtaaaggactccaccgaatatactgggcctgagagttacgtggcagaaatgatcaaggaaagaaaccttgactggttccccaggatgagagccatgtcattggtcagcagtgattctgaaggagaacagaatgagctgagaaacctgcaggagaagctggagtccaccatgaaacttgtcacgaacctttctggccagctgtcggaattaaaggatcagatgacagaacaaaggaagcagaaacaaagaattggtcttctaggacatcctcctcacatgaatgtcaacccacaacaaccagcataagcaaatgaaagaaaggaattgtatttaccttttataattattattagtgtgggtatggctaatgagttctgattcacccacgaaggttacatttatgctgaatacatttgtaaatactcagttttatactgtatgtatatgattgctactctaaaggtttggatatatgtattgtaattagaattgttggcatgatgacatttcatttgtgccaaaaatattaaaaatgccttttttggaaggactaacagaaagcacctgatttgcacttgaaccagattatagatttaaaagtatatgacatgtattttgtatttaaaactagaatagccagtatttatgttttttataaaactgtgcaatacgaattatgcaatcacaatacatttgtagctcccgagtgtcctaaagggagtgcacttctttgaagctggtgtgttaatactatgtaataaatggttaactttcaaatgatgctgctgccaaaattatattaatagtgagtttcaggcccctgggcattttgtaccatgtaattatcctctggtgatgctgtttctcgttagtggcagtagtgcctccgtctcctagtgataatgctccaagtctatgaactgttaaatcagcattcatttt

SEQ ID NO: 9997 - DNA, 632 bp, Homo sapiens
  source 1..632: mol_type = unassigned DNA
aagggaagaacttcccagcagaaggagcatgtgtggaggcttggaggtcaaaaaatgctgatgggactggttatggatggggcagagaatttgaggaaccctggagccccactggtcgggactcctgtggacagccatgctcatctctctggccatcgtcattgccctccccaagccccatggcatccgggccttaattgcctccacaattctacgactgatattttcagtcgggttacaacccacgttgtttcttctgggcgctttcaatgtatgcaataaaatcatctttctaatgagctttgtgggcaactgtgggacattcacaagaggctaccgagccatggttctggatgttgagttcctctatcatttgttgtatctggtgatctgtgccatggggctctttgtccatgaattcttctacagtctgctgctttttgatttagtgtacagagaagagactttgcttaatgtcattaaaagtgtcactcgcaatggacggtccatcatcctgacagcagttctggctctgatcctcgtttacctgttctcaatagtgggctatcttttcttcaaggatgactttatcttggaagtagataggctgcccaatgaaacagctgttccag

SEQ ID NO: 9998 - DNA, 652 bp, Homo sapiens
  source 1..652: mol_type = unassigned DNA; mol_type = unassigned DNA
aaagaattgtttaatcagccgtgaattggggacttcaaacattttaaccatatgctgccagattgttcatcataaaatttccttctctctcccagaaaccggcgagagtttggcaagcgagttcctgttctccgatgtgtgtagggtggagagtggggagaactgctcctctcctgcacccagagaagagctggtccctgcagaagagacggaacaggataaagagcacacatgtgagacgctgctgatgtgcattgtcactgtgctgagtcacgggctgcggagcgggggtggagtaggagatgtactcaggaagccgtccaaagaggaacccctgtttgctgctagagttatttatgacctcttgttcttcttcatggtcatcatcattgttcttaacctgatttttggggttatcattgacacttttgctgacctgaggagtgagaagcagaagaaggaagagatcttgaagaccacgtgctttatctgtggcttggaaagagacaagtttgacaacaagactgtcacctttgaagagcacatcaaggaagaacacaacatgtggcactatctgtgcttcatcgtcctggtgaaagtaaaggactccaccgaatatactgggcctgagagttacgtggcagaaatgatc

SEQ ID NO: 9999 - DNA, 910 bp, Homo sapiens
  source 1..910: mol_type = unassigned DNA; mol_type = unassigned DNA
aaactgaagacgcagaggaagagctgggagtagggctgagtagctgcggaactagctcatcaggctcctttcctctctatcacgtgaggtggtgccgcaaagtcagctgcgtggaaagggttggctttggctctctgttcagtagacttagggactgtttccatcagggttaggcctgatccacctgaacgcacagtgaatatccctcctggctgtgtcacaccacacttggagaagtcgcaattgagacaggggacatgaaaagagatgcagttttcagtttaaaagttgaatgcccaatttaatttctacccaagtagatgaggtctcacttgagctgtgccccaggctccgcagaccaaagggtcgcaagggacccagactgatccagacacctctcttttccaggaacccctgtttgctgctagagttatttatgacctcttgttcttcttcatggtcatcatcattgttcttaacctgatttttggggttatcattgacacttttgctgacctgaggagtgagaagcagaagaaggaagagatcttgaagaccacgtgctttatctgtggcttggaaagagacaagtttgacaacaagactgtcacctttgaagagcacatcaaggaagaacacaacatgtggcactatctgtgcttcatcgtcctggtgaaagtaaaggactccaccgaatatactgggcctgagagttacgtggcagaaatgatcaaggaaagaaaccttgactggttccccaggatgagagccatgtcattggtcagcagtgattctgaaggagaacagaatgagctgagaaacctgcaggagaagctggagtccaccatgaaacttgtcacgaacctttctggccagctgtcggaattaaaggatcaggtaaagaaagaaa

SEQ ID NO: 10000 - DNA, 10197 bp, Homo sapiens
  source 1..10197: mol_type = unassigned DNA; mol_type = unassigned DNA
gcagtaaccatgtggatgtgctgctgaagcgtttcctcaagctcgctggggtgggaggagaggaggaggaggaggtggtggtggaggaggaggcagggggtggagagagagaaagcgcacgccgagaggaggtgtgggtgttccgcttccatcctaacggaacgagctccctcttcgcggacatgggattacccagcggctgctaacccctctcctcgccctgctcccccaaaccggcgtggctccccgggcaccaaggagctgactacagaggagcaggatttgcacccctcgctgggcttgctttggcaacagagtgcctgacccaggtcaggattttcaagaaagacatgtctgacaaaatgtctagcttcctacatattggagacatttgttctctgtacgcggagggatcgacaaatggatttattagcaccttgggcctggttgatgatcgttgtgttgtacagccagaaaccggggaccttaacaatccacctaagaaattcagagactgcctctttaagctatgtcccatgaaccgctactctgcccaaaagcagttctggaaagccgctaagcctggggccaacagcaccacagacgcagtgctactcaacaaactgcaccacgctgcagacttggaaaagaagcagaatgagacagaaaacaggaaattgctggggaccgtaatccagtatggcaatgtgatccagctcctgcatttgaaaagtaataaatacctaacagtgaataagaggcttcctgctctgttggagaagaatgccatgagagtcacattggacgaggctggaaatgaagggtcctggttttatattcagccattctacaagctgcgatccattggagacagcgtggtcataggtgacaaggtggttctgaaccccgtcaatgctggtcagcccctacatgctagcagccatcaactggtagataacccaggctgcaatgaggtcaattccgtcaactgcaatacaagctggaaaatagtccttttcatgaaatggagtgataacaaagacgacatattaaaggggggtgacgtggtgaggctgtttcatgctgagcaggagaagtttctcacctgtgacgaacacaggaagaagcagcacgtcttcctgagaaccacgggccggcagtcggccacatctgccaccagttcaaaagccctgtgggaggtggaggtggtccagcatgacccatgtcggggcggagcagggtattggaacagccttttccgtttcaagcatctggccacggggcattacttggcagcagaggtggaccctgatcaggacgcctctcgaagtaggttgcggaatgcccaagaaaagatggtatactccctggtctctgtgcctgaaggcaatgacatctcctccattttcgagctagatcccaccactctgcgtggaggtgacagccttgtcccaaggaactcttatgttcggctcagacacctatgtactaatacctgggttcacagcacaaatattcctattgacaaggaagaagaaaagcccgtgatgctgaaaattggcacctctcctgtgaaggaggataaggaagcatttgccatagttccggtttctcctgctgaagttcgggacctggactttgccaatgatgccagcaaggtgctgggctccattgctgggaagctagagaagggcaccatcacccagaatgaaaggaggtctgtaaccaagctgctagaagatttggtttacttcgtcactggtggaactaattctggtcaagatgttctcgaagttgtcttctccaagcccaacagagaacggcagaaactgatgagagaacagaatattctcaagcagatcttcaagttgttacaagccccattcacagactgcggtgatggcccaatgcttcggctggaagagctcggggaccagcggcacgctcctttcagacacatctgccggctctgctacagggtgctgagacactcgcagcaagactacaggaagaaccaggagtatatagccaagcagtttggcttcatgcagaagcagattggctatgatgtgttggctgaagacactatcactgccctgctccacaataatcggaaactcctggaaaaacacattaccgcggcagagattgacacatttgtcagcctggtgcgaaagaacagggagcccagattcttagattacctctccgacctctgtgtctccatgaacaaatcaattccagtgacccaggaactgatatgtaaagctgtgctgaaccccaccaacgctgacatcctgattgagaccaagttggttctttctcgttttgaatttgaaggtgtctcttccactggagagaatgctctggaggcaggagaagacgaggaagaggtgtggctgttttggagggacagcaacaaagagattcgcagcaagagtgtgagggaattggctcaggatgctaaagaagggcagaaggaggaccgagacgttctcagctactacagatatcagctgaacctctttgcgaggatgtgtctggaccgccaatacctggccatcaacgaaatctcaggccagctggatgtcgatctcattctccgctgcatgtctgacgagaacctgccctatgacctcagggcgtccttctgccgcctcatgcttcacatgcatgtggaccgagatccccaggaacaagtcacccccgtgaaatatgcccgcctctggtcggagattccctcggagatcgccattgacgactatgatagtagtggagcttccaaagatgaaattaaggagagatttgctcagaccatggagtttgtggaggagtatttaagagatgtggtttgtcagaggttccctttctctgataaagagaagaataagcttacgtttgaggttgtaaatttagctaggaatctcatatactttggtttctacaacttctctgaccttctacgattaactaagatccttctggccatattggactgtgtacatgtgacaacaatcttccccattagcaagatggcgaaaggagaagagaataaaggtaacaatgatgtggagaagctgaagagcagtaacgtgatgagatctattcatggcgtgggagagctgatgacccaggtggtgctccggggaggaggctttttgcccatgactcccatggctgctgcccctgaaggcaatgtgaagcaggcagagcctgagaaggaggacatcatggtcatggacaccaagctgaagatcattgagatactccagtttattttgaatgtgaggttggattataggatctcctgcctcctgtgtatatttaagcgagagtttgatgaaagcaattcccagacttcagaaacatcctccggaaacagcagccaagaagggccaagtaatgtaccaggtgctcttgactttgaacacattgaagaacaagcagaaggcatctttggaggaagtgaggagaacaccccactggacttggatgaccacggcggcagaacctttctccgtgtcctgctccacttgacgatgcatgactacccacccctggtgtcaggggccctgcagctcctcttccggcacttcagccagaggcaggaggtgctccaggccttcaaacaggttcaactgctggttaccagccaagatgtggacaactacaaacagatcaaacaagacttggatcaactgaggtccatcgtggaaaagtcagagctttgggtgtacaaagggcagggccccgatgagactatggatggtgcatctggagaaaatgaacataagaaaacggaggagggaaataacaagccacaaaagcatgaaagcaccagcagctacaactacagagtggtcaaagagattttgattcggcttagcaaactctgtgttcaagagagtgcctcagtgagaaagagcaggaagcagcaacagcgtctgctccggaacatgggcgcgcacgccgtggtgctggagctgctgcagattccctatgagaaggccgaagataccaagatgcaagagataatgaggttggctcatgaatttttgcagaatttctgcgcaggcaaccagcagaatcaagctttgctacataaacacataaacctgtttctcaacccagggatcctggaggcagtaaccatgcagcacatcttcatgaacaatttccagctttgcagtgagatcaacgagagagttgttcagcacttcgttcactgcatagagactcacggtcggaatgtccagtatataaagttcttacagacaattgtcaaggcagaagggaaatttattaaaaaatgccaagacatggttatggccgagctggtcaattcgggagaggatgtcctcgtgttctacaacgacagagcctctttccagactctgatccagatgatgcggtcagaacgggatcggatggatgagaacagccctctcatgtaccacatccacttggtcgagctcctggctgtgtgcacggagggtaagaatgtctacacagagatcaagtgcaactccctgctcccgctggatgacatcgttcgcgtggtgacccacgaggactgcatccctgaggttaaaattgcatacattaacttcctgaatcactgctatgtggatacagaggtggaaatgaaggagatttataccagcaatcacatgtggaaattgtttgagaatttccttgtagacatctgcagggcctgtaacaacactagtgacaggaaacatgcagactcgattttggagaagtatgtcaccgaaatcgtcatgagtattgttactactttcttcagctctcccttctcagaccagagtacgactttgcagactcgccagcctgtctttgtgcaactgctgcaaggcgtgttcagggtttaccactgcaactggttaatgccaagccaaaaagcctccgtggagagctgtattcgggtgctgtctgatgtagccaagagccgggccattgccattcccgtggacctggacagccaagtcaacaacctctttctcaagtcccacagcattgtgcagaaaacagccatgaactggcggctctcagcccgcaatgccgcacgcagggactctgttctggcagcttccagagactaccggaatatcattgagagattgcaggacatcgtctccgcgctggaggaccgtctcaggcccctggtgcaggcagagttatctgtgctcgtggatgttctccacagacccgagctgcttttcccagagaacacagacgccagaaggaaatgtgaaagtggcggtttcatttgcaagttaataaagcatacaaaacagctgctagaagaaaatgaagagaagctctgcattaaggtcctacagaccctgagggaaatgatgaccaaagatagaggctatggagaaaagctaatttccattgatgaattggataatgctgagcttcctccagctccggattctgagaacgccactgaggagcttgaaccaagtccacccctgcggcagctggaagaccataaaaggggtgaggcgctcaggcaagttctggtcaaccgttactatggaaacgtcagaccttcgggacgaagagagagccttaccagctttggcaatggcccactgtcagcaggaggacccggcaagcccgggggaggagggggaggttccggatccagctctatgagcaggggtgagatgagtctggccgaggttcagtgtcaccttgacaaggagggggcttccaatctagttatcgacctcatcatgaacgcatccagtgaccgagtgttccatgaaagcattctcctggccattgcccttctggaaggaggcaacaccaccatccagcactcctttttctgtcgcttgacagaagataagaagtcagagaaattctttaaggtgttttatgaccggatgaaggtggcccagcaagaaatcaaagcaacagtgacagtgaacaccagtgacttgggaaataaaaagaaagacgatgaggtagacagggatgccccatcacggaaaaaagctaaagagcccacaacacagataacagaagaggtccgggatcagctcctggaggcctccgctgccaccaggaaagccttcaccactttcaggagggaggctgatcccgacgaccactaccagcctggagagggcacccaggccactgccgacaaggccaaggacgacctggagatgagcgcggtcatcaccatcatgcagcccatcctccgcttccttcagctcctgtgtgaaaaccacaaccgagacctgcagaacttcctccgttgccaaaataacaagaccaactacaatttggtatgtgagaccctgcagtttctggactgtatttgtggaagcacaactggaggccttggtcttctgggcttgtatataaatgaaaagaatgtagcgcttatcaaccaaaccctggaaagtctgaccgaatactgtcaaggaccttgccatgagaaccagaactgcatagccacccatgaatccaatggcattgacatcatcacagccctgatcctcaatgatatcaatcctttgggaaagaagaggatggaccttgtgttagaactgaagaacaatgcctcgaagttgctcctggccatcatggaaagcaggcacgacagtgaaaacgcagagaggatactttataacatgaggcccaaggaactggtggaagtgatcaagaaagcctacatgcaaggtgaagtggaatttgaggatggagaaaacggtgaggatggggcggcgtcccccaggaacgtggggcacaacatctacatattagcccatcagttggctcggcataacaaagaacttcagagcatgctgaaacctggtggccaagtggacggagatgaagccctggagttttatgccaagcacacggcgcagatagagattgtcagattagaccgaacaatggaacagatagtctttcccgtgcccagcatatgtgaattcctaaccaaggagtcaaaactacgaatttactatactacagagagagacgaacaaggcagcaaaatcaatgatttctttctgcggtctgaagacctcttcaatgaaatgaattggcagaagaaactgagagcccagcccgtgttgtactggtgtgcccgcaacatgtctttctggagcagcatttcgtttaacctggccgtcctgatgaacctgctggtggcgtttttctacccgtttaagggagtccgaggaggaaccctggagccccactggtcgggactcctgtggacagccatgctcatctctctggccatcgtcattgccctccccaagccccatggcatccgggccttaattgcctccacaattctacgactgatattttcagtcgggttacaacccacgttgtttcttctgggcgctttcaatgtatgcaataaaatcatctttctaatgagctttgtgggcaactgtgggacattcacaagaggctaccgagccatggttctggatgttgagttcctctatcatttgttgtatctggtgatctgtgccatggggctctttgtccatgaattcttctacagtctgctgctttttgatttagtgtacagagaagagactttgcttaatgtcattaaaagtgtcactcgcaatggacggtccatcatcctgacagcagttctggctctgatcctcgtttacctgttctcaatagtgggctatcttttcttcaaggatgactttatcttggaagtagataggctgcccaatgaaacagctgttccagaaaccggcgagagtttggcaagcgagttcctgttctccgatgtgtgtagggtggagagtggggagaactgctcctctcctgcacccagagaagagctggtccctgcagaagagacggaacaggataaagagcacacatgtgagacgctgctgatgtgcattgtcactgtgctgagtcacgggctgcggagcgggggtggagtaggagatgtactcaggaagccgtccaaagaggaacccctgtttgctgctagagttatttatgacctcttgttcttcttcatggtcatcatcattgttcttaacctgatttttggggttatcattgacacttttgctgacctgaggagtgagaagcagaagaaggaagagatcttgaagaccacgtgctttatctgtggcttggaaagagacaagtttgacaacaagactgtcacctttgaagagcacatcaaggaagaacacaacatgtggcactatctgtgcttcatcgtcctggtgaaagtaaaggactccaccgaatatactgggcctgagagttacgtggcagaaatgatcaaggaaagaaaccttgactggttccccaggatgagagccatgtcattggtcagcagtgattctgaaggagaacagaatgagctgagaaacctgcaggagaagctggagtccaccatgaaacttgtcacgaacctttctggccagctgtcggaattaaaggatcagatgacagaacaaaggaagcagaaacaaagaattggtcttctaggacatcctcctcacatgaatgtcaacccacaacaaccagcataagcaaatgaaagaaaggaattgtatttaccttttataattattattagtgtgggtatggctaatgagttctgattcacccacgaaggttacatttatgctgaatacatttgtaaatactcagttttatactgtatgtatatgattgctactctaaaggtttggatatatgtattgtaattagaattgttggcatgatgacatttcatttgtgccaaaaatattaaaaatgccttttttggaaggactaacagaaagcacctgatttgcacttgaaccagattatagatttaaaagtatatgacatgtattttgtatttaaaactagaatagccagtatttatgttttttataaaactgtgcaatacgaattatgcaatcacaatacatttgtagctcccgagtgtcctaaagggagtgcacttctttgaagctggtgtgttaatactatgtaataaatggttaactttcaaatgatgctgctgccaaaattatattaatagtgagtttcaggcccctgggcattttgtaccatgtaattatcctctggtgatgctgtttctcgttagtggcagtagtgcctccgtctcctagtgataatgctccaagtctatgaactgttaaatcagcattcattttaagaaaagcaactttagtttcaaagatacttttaagcttctaaattgatcatttaaactatttctttaaataagagagccaaattagaggctcatactttagcttgtgaagaagataatgaattttttaaagggaactttctatgcaatgttcaggataaatgcatactgctggccaatcagtgtcatctcctgggtaaattttgatgtcgcattataaagacatgcataattgatggtttctagattatctagtccaaacaatagagtttattttttcttcatctgaaccaacatgctacagtagctaagaagtattaaaactatatacatccatataaagatgaaatatgaactatctcattagaagtcatagttgaccacagacatgttattcttctgaaagagccacattttggttttatttcttgtcacatgatttcttttcttgatggatgaaaaatatgaaaggaaacttttatatctgttgcctagttttgtacatggatctcattttacaagagaatctctctgcaaaaaaaaaaaaaacagtttaaaaatgcattgaaagcagagttctgaaatgagtaaagtttgtaaatgcatatataaaaatatttaataaatgatgcagaatatacagtgactggttggtggctttcatttggcatttgtgacttaactgctattccatttatgtactttctttaggatcagtttgaagtacagtcggtttgattaccaggttaattcagaaaatgtttacctgattatttaaaaaaacacttgctgttgttatgacagctctgaggagaattattagaacaaacattggggagtatttagtacaacattcattcattcttctggattagtgactgccagccaggctgtcgggagcgccctactaaatctcctgtctcttctgcttttactgggggatctttaatttgctgtgtgccatgtggaagtatcgggaa

SEQ ID NO: 10001 - DNA, 10242 bp, Homo sapiens
  source 1..10242: mol_type = unassigned DNA
gcagtaaccatgtggatgtgctgctgaagcgtttcctcaagctcgctggggtgggaggagaggaggaggaggaggtggtggtggaggaggaggcagggggtggagagagagaaagcgcacgccgagaggaggtgtgggtgttccgcttccatcctaacggaacgagctccctcttcgcggacatgggattacccagcggctgctaacccctctcctcgccctgctcccccaaaccggcgtggctccccgggcaccaaggagctgactacagaggagcaggatttgcacccctcgctgggcttgctttggcaacagagtgcctgacccaggtcaggattttcaagaaagacatgtctgacaaaatgtctagcttcctacatattggagacatttgttctctgtacgcggagggatcgacaaatggatttattagcaccttgggcctggttgatgatcgttgtgttgtacagccagaaaccggggaccttaacaatccacctaagaaattcagagactgcctctttaagctatgtcccatgaaccgctactctgcccaaaagcagttctggaaagccgctaagcctggggccaacagcaccacagacgcagtgctactcaacaaactgcaccacgctgcagacttggaaaagaagcagaatgagacagaaaacaggaaattgctggggaccgtaatccagtatggcaatgtgatccagctcctgcatttgaaaagtaataaatacctaacagtgaataagaggcttcctgctctgttggagaagaatgccatgagagtcacattggacgaggctggaaatgaagggtcctggttttatattcagccattctacaagctgcgatccattggagacagcgtggtcataggtgacaaggtggttctgaaccccgtcaatgctggtcagcccctacatgctagcagccatcaactggtagataacccaggctgcaatgaggtcaattccgtcaactgcaatacaagctggaaaatagtccttttcatgaaatggagtgataacaaagacgacatattaaaggggggtgacgtggtgaggctgtttcatgctgagcaggagaagtttctcacctgtgacgaacacaggaagaagcagcacgtcttcctgagaaccacgggccggcagtcggccacatctgccaccagttcaaaagccctgtgggaggtggaggtggtccagcatgacccatgtcggggcggagcagggtattggaacagccttttccgtttcaagcatctggccacggggcattacttggcagcagaggtagaccctgactttgaggaagaatgcctggagtttcagccctcagtggaccctgatcaggacgcctctcgaagtaggttgcggaatgcccaagaaaagatggtatactccctggtctctgtgcctgaaggcaatgacatctcctccattttcgagctagatcccaccactctgcgtggaggtgacagccttgtcccaaggaactcttatgttcggctcagacacctatgtactaatacctgggttcacagcacaaatattcctattgacaaggaagaagaaaagcccgtgatgctgaaaattggcacctctcctgtgaaggaggataaggaagcatttgccatagttccggtttctcctgctgaagttcgggacctggactttgccaatgatgccagcaaggtgctgggctccattgctgggaagctagagaagggcaccatcacccagaatgaaaggaggtctgtaaccaagctgctagaagatttggtttacttcgtcactggtggaactaattctggtcaagatgttctcgaagttgtcttctccaagcccaacagagaacggcagaaactgatgagagaacagaatattctcaagcagatcttcaagttgttacaagccccattcacagactgcggtgatggcccaatgcttcggctggaagagctcggggaccagcggcacgctcctttcagacacatctgccggctctgctacagggtgctgagacactcgcagcaagactacaggaagaaccaggagtatatagccaagcagtttggcttcatgcagaagcagattggctatgatgtgttggctgaagacactatcactgccctgctccacaataatcggaaactcctggaaaaacacattaccgcggcagagattgacacatttgtcagcctggtgcgaaagaacagggagcccagattcttagattacctctccgacctctgtgtctccatgaacaaatcaattccagtgacccaggaactgatatgtaaagctgtgctgaaccccaccaacgctgacatcctgattgagaccaagttggttctttctcgttttgaatttgaaggtgtctcttccactggagagaatgctctggaggcaggagaagacgaggaagaggtgtggctgttttggagggacagcaacaaagagattcgcagcaagagtgtgagggaattggctcaggatgctaaagaagggcagaaggaggaccgagacgttctcagctactacagatatcagctgaacctctttgcgaggatgtgtctggaccgccaatacctggccatcaacgaaatctcaggccagctggatgtcgatctcattctccgctgcatgtctgacgagaacctgccctatgacctcagggcgtccttctgccgcctcatgcttcacatgcatgtggaccgagatccccaggaacaagtcacccccgtgaaatatgcccgcctctggtcggagattccctcggagatcgccattgacgactatgatagtagtggagcttccaaagatgaaattaaggagagatttgctcagaccatggagtttgtggaggagtatttaagagatgtggtttgtcagaggttccctttctctgataaagagaagaataagcttacgtttgaggttgtaaatttagctaggaatctcatatactttggtttctacaacttctctgaccttctacgattaactaagatccttctggccatattggactgtgtacatgtgacaacaatcttccccattagcaagatggcgaaaggagaagagaataaaggtaacaatgatgtggagaagctgaagagcagtaacgtgatgagatctattcatggcgtgggagagctgatgacccaggtggtgctccggggaggaggctttttgcccatgactcccatggctgctgcccctgaaggcaatgtgaagcaggcagagcctgagaaggaggacatcatggtcatggacaccaagctgaagatcattgagatactccagtttattttgaatgtgaggttggattataggatctcctgcctcctgtgtatatttaagcgagagtttgatgaaagcaattcccagacttcagaaacatcctccggaaacagcagccaagaagggccaagtaatgtaccaggtgctcttgactttgaacacattgaagaacaagcagaaggcatctttggaggaagtgaggagaacaccccactggacttggatgaccacggcggcagaacctttctccgtgtcctgctccacttgacgatgcatgactacccacccctggtgtcaggggccctgcagctcctcttccggcacttcagccagaggcaggaggtgctccaggccttcaaacaggttcaactgctggttaccagccaagatgtggacaactacaaacagatcaaacaagacttggatcaactgaggtccatcgtggaaaagtcagagctttgggtgtacaaagggcagggccccgatgagactatggatggtgcatctggagaaaatgaacataagaaaacggaggagggaaataacaagccacaaaagcatgaaagcaccagcagctacaactacagagtggtcaaagagattttgattcggcttagcaaactctgtgttcaagagagtgcctcagtgagaaagagcaggaagcagcaacagcgtctgctccggaacatgggcgcgcacgccgtggtgctggagctgctgcagattccctatgagaaggccgaagataccaagatgcaagagataatgaggttggctcatgaatttttgcagaatttctgcgcaggcaaccagcagaatcaagctttgctacataaacacataaacctgtttctcaacccagggatcctggaggcagtaaccatgcagcacatcttcatgaacaatttccagctttgcagtgagatcaacgagagagttgttcagcacttcgttcactgcatagagactcacggtcggaatgtccagtatataaagttcttacagacaattgtcaaggcagaagggaaatttattaaaaaatgccaagacatggttatggccgagctggtcaattcgggagaggatgtcctcgtgttctacaacgacagagcctctttccagactctgatccagatgatgcggtcagaacgggatcggatggatgagaacagccctctcatgtaccacatccacttggtcgagctcctggctgtgtgcacggagggtaagaatgtctacacagagatcaagtgcaactccctgctcccgctggatgacatcgttcgcgtggtgacccacgaggactgcatccctgaggttaaaattgcatacattaacttcctgaatcactgctatgtggatacagaggtggaaatgaaggagatttataccagcaatcacatgtggaaattgtttgagaatttccttgtagacatctgcagggcctgtaacaacactagtgacaggaaacatgcagactcgattttggagaagtatgtcaccgaaatcgtcatgagtattgttactactttcttcagctctcccttctcagaccagagtacgactttgcagactcgccagcctgtctttgtgcaactgctgcaaggcgtgttcagggtttaccactgcaactggttaatgccaagccaaaaagcctccgtggagagctgtattcgggtgctgtctgatgtagccaagagccgggccattgccattcccgtggacctggacagccaagtcaacaacctctttctcaagtcccacagcattgtgcagaaaacagccatgaactggcggctctcagcccgcaatgccgcacgcagggactctgttctggcagcttccagagactaccggaatatcattgagagattgcaggacatcgtctccgcgctggaggaccgtctcaggcccctggtgcaggcagagttatctgtgctcgtggatgttctccacagacccgagctgcttttcccagagaacacagacgccagaaggaaatgtgaaagtggcggtttcatttgcaagttaataaagcatacaaaacagctgctagaagaaaatgaagagaagctctgcattaaggtcctacagaccctgagggaaatgatgaccaaagatagaggctatggagaaaagctaatttccattgatgaattggataatgctgagcttcctccagctccggattctgagaacgccactgaggagcttgaaccaagtccacccctgcggcagctggaagaccataaaaggggtgaggcgctcaggcaagttctggtcaaccgttactatggaaacgtcagaccttcgggacgaagagagagccttaccagctttggcaatggcccactgtcagcaggaggacccggcaagcccgggggaggagggggaggttccggatccagctctatgagcaggggtgagatgagtctggccgaggttcagtgtcaccttgacaaggagggggcttccaatctagttatcgacctcatcatgaacgcatccagtgaccgagtgttccatgaaagcattctcctggccattgcccttctggaaggaggcaacaccaccatccagcactcctttttctgtcgcttgacagaagataagaagtcagagaaattctttaaggtgttttatgaccggatgaaggtggcccagcaagaaatcaaagcaacagtgacagtgaacaccagtgacttgggaaataaaaagaaagacgatgaggtagacagggatgccccatcacggaaaaaagctaaagagcccacaacacagataacagaagaggtccgggatcagctcctggaggcctccgctgccaccaggaaagccttcaccactttcaggagggaggctgatcccgacgaccactaccagcctggagagggcacccaggccactgccgacaaggccaaggacgacctggagatgagcgcggtcatcaccatcatgcagcccatcctccgcttccttcagctcctgtgtgaaaaccacaaccgagacctgcagaacttcctccgttgccaaaataacaagaccaactacaatttggtatgtgagaccctgcagtttctggactgtatttgtggaagcacaactggaggccttggtcttctgggcttgtatataaatgaaaagaatgtagcgcttatcaaccaaaccctggaaagtctgaccgaatactgtcaaggaccttgccatgagaaccagaactgcatagccacccatgaatccaatggcattgacatcatcacagccctgatcctcaatgatatcaatcctttgggaaagaagaggatggaccttgtgttagaactgaagaacaatgcctcgaagttgctcctggccatcatggaaagcaggcacgacagtgaaaacgcagagaggatactttataacatgaggcccaaggaactggtggaagtgatcaagaaagcctacatgcaaggtgaagtggaatttgaggatggagaaaacggtgaggatggggcggcgtcccccaggaacgtggggcacaacatctacatattagcccatcagttggctcggcataacaaagaacttcagagcatgctgaaacctggtggccaagtggacggagatgaagccctggagttttatgccaagcacacggcgcagatagagattgtcagattagaccgaacaatggaacagatagtctttcccgtgcccagcatatgtgaattcctaaccaaggagtcaaaactacgaatttactatactacagagagagacgaacaaggcagcaaaatcaatgatttctttctgcggtctgaagacctcttcaatgaaatgaattggcagaagaaactgagagcccagcccgtgttgtactggtgtgcccgcaacatgtctttctggagcagcatttcgtttaacctggccgtcctgatgaacctgctggtggcgtttttctacccgtttaagggagtccgaggaggaaccctggagccccactggtcgggactcctgtggacagccatgctcatctctctggccatcgtcattgccctccccaagccccatggcatccgggccttaattgcctccacaattctacgactgatattttcagtcgggttacaacccacgttgtttcttctgggcgctttcaatgtatgcaataaaatcatctttctaatgagctttgtgggcaactgtgggacattcacaagaggctaccgagccatggttctggatgttgagttcctctatcatttgttgtatctggtgatctgtgccatggggctctttgtccatgaattcttctacagtctgctgctttttgatttagtgtacagagaagagactttgcttaatgtcattaaaagtgtcactcgcaatggacggtccatcatcctgacagcagttctggctctgatcctcgtttacctgttctcaatagtgggctatcttttcttcaaggatgactttatcttggaagtagataggctgcccaatgaaacagctgttccagaaaccggcgagagtttggcaagcgagttcctgttctccgatgtgtgtagggtggagagtggggagaactgctcctctcctgcacccagagaagagctggtccctgcagaagagacggaacaggataaagagcacacatgtgagacgctgctgatgtgcattgtcactgtgctgagtcacgggctgcggagcgggggtggagtaggagatgtactcaggaagccgtccaaagaggaacccctgtttgctgctagagttatttatgacctcttgttcttcttcatggtcatcatcattgttcttaacctgatttttggggttatcattgacacttttgctgacctgaggagtgagaagcagaagaaggaagagatcttgaagaccacgtgctttatctgtggcttggaaagagacaagtttgacaacaagactgtcacctttgaagagcacatcaaggaagaacacaacatgtggcactatctgtgcttcatcgtcctggtgaaagtaaaggactccaccgaatatactgggcctgagagttacgtggcagaaatgatcaaggaaagaaaccttgactggttccccaggatgagagccatgtcattggtcagcagtgattctgaaggagaacagaatgagctgagaaacctgcaggagaagctggagtccaccatgaaacttgtcacgaacctttctggccagctgtcggaattaaaggatcagatgacagaacaaaggaagcagaaacaaagaattggtcttctaggacatcctcctcacatgaatgtcaacccacaacaaccagcataagcaaatgaaagaaaggaattgtatttaccttttataattattattagtgtgggtatggctaatgagttctgattcacccacgaaggttacatttatgctgaatacatttgtaaatactcagttttatactgtatgtatatgattgctactctaaaggtttggatatatgtattgtaattagaattgttggcatgatgacatttcatttgtgccaaaaatattaaaaatgccttttttggaaggactaacagaaagcacctgatttgcacttgaaccagattatagatttaaaagtatatgacatgtattttgtatttaaaactagaatagccagtatttatgttttttataaaactgtgcaatacgaattatgcaatcacaatacatttgtagctcccgagtgtcctaaagggagtgcacttctttgaagctggtgtgttaatactatgtaataaatggttaactttcaaatgatgctgctgccaaaattatattaatagtgagtttcaggcccctgggcattttgtaccatgtaattatcctctggtgatgctgtttctcgttagtggcagtagtgcctccgtctcctagtgataatgctccaagtctatgaactgttaaatcagcattcattttaagaaaagcaactttagtttcaaagatacttttaagcttctaaattgatcatttaaactatttctttaaataagagagccaaattagaggctcatactttagcttgtgaagaagataatgaattttttaaagggaactttctatgcaatgttcaggataaatgcatactgctggccaatcagtgtcatctcctgggtaaattttgatgtcgcattataaagacatgcataattgatggtttctagattatctagtccaaacaatagagtttattttttcttcatctgaaccaacatgctacagtagctaagaagtattaaaactatatacatccatataaagatgaaatatgaactatctcattagaagtcatagttgaccacagacatgttattcttctgaaagagccacattttggttttatttcttgtcacatgatttcttttcttgatggatgaaaaatatgaaaggaaacttttatatctgttgcctagttttgtacatggatctcattttacaagagaatctctctgcaaaaaaaaaaaaaacagtttaaaaatgcattgaaagcagagttctgaaatgagtaaagtttgtaaatgcatatataaaaatatttaataaatgatgcagaatatacagtgactggttggtggctttcatttggcatttgtgacttaactgctattccatttatgtactttctttaggatcagtttgaagtacagtcggtttgattaccaggttaattcagaaaatgtttacctgattatttaaaaaaacacttgctgttgttatgacagctctgaggagaattattagaacaaacattggggagtatttagtacaacattcattcattcttctggattagtgactgccagccaggctgtcgggagcgccctactaaatctcctgtctcttctgcttttactgggggatctttaatttgctgtgtgccatgtggaagtatcgggaa

SEQ ID NO: 10002 - DNA, 4131 bp, Homo sapiens
  source 1..4131: mol_type = unassigned DNA
gcagtaaccatgtggatgtgctgctgaagcgtttcctcaagctcgctggggtgggaggagaggaggaggaggaggtggtggtggaggaggaggcagggggtggagagagagaaagcgcacgccgagaggaggtgtgggtgttccgcttccatcctaacggaacgagctccctcttcgcggacatgggattacccagcggctgctaacccctctcctcgccctgctcccccaaaccggcgtggctccccgggcaccaaggagctgactacagaggagcaggatttgcacccctcgctgggcttgctttggcaacagagtgcctgacccaggtcaggattttcaagaaagacatgtctgacaaaatgtctagcttcctacatattggagacatttgttctctgtacgcggagggatcgacaaatggatttattagcaccttgggcctggttgatgatcgttgtgttgtacagccagaaaccggggaccttaacaatccacctaagaaattcagagactgcctctttaagctatgtcccatgaaccgctactctgcccaaaagcagttctggaaagccgctaagcctggggccaacagcaccacagacgcagtgctactcaacaaactgcaccacgctgcagacttggaaaagaagcagaatgagacagaaaacaggaaattgctggggaccgtaatccagtatggcaatgtgatccagctcctgcatttgaaaagtaataaatacctaacagtgaataagaggcttcctgctctgttggagaagaatgccatgagagtcacattggacgaggctggaaatgaagggtcctggttttatattcagccattctacaagctgcgatccattggagacagcgtggtcataggtgacaaggtggttctgaaccccgtcaatgctggtcagcccctacatgctagcagccatcaactggtagataacccaggctgcaatgaggtcaattccgtcaactgcaatacaagctggaaaatagtccttttcatgaaatggagtgataacaaagacgacatattaaaggggggtgacgtggtgaggctgtttcatgctgagcaggagaagtttctcacctgtgacgaacacaggaagaagcagcacgtcttcctgagaaccacgggccggcagtcggccacatctgccaccagttcaaaagccctgtgggaggtggaggtggtccagcatgacccatgtcggggcggagcagggtattggaacagccttttccgtttcaagcatctggccacggggcattacttggcagcagaggtagaccctgactttgaggaagaatgcctggagtttcagccctcagtatgcaataaaatcatctttctaatgagctttgtgggcaactgtgggacattcacaagaggctaccgagccatggttctggatgttgagttcctctatcatttgttgtatctggtgatctgtgccatggggctctttgtccatgaattcttctacagtctgctgctttttgatttagtgtacagagaagagactttgcttaatgtcattaaaagtgtcactcgcaatggacggtccatcatcctgacagcagttctggctctgatcctcgtttacctgttctcaatagtgggctatcttttcttcaaggatgactttatcttggaagtagataggctgcccaatgaaacagctgttccagaaaccggcgagagtttggcaagcgagttcctgttctccgatgtgtgtagggtggagagtggggagaactgctcctctcctgcacccagagaagagctggtccctgcagaagagacggaacaggataaagagcacacatgtgagacgctgctgatgtgcattgtcactgtgctgagtcacgggctgcggagcgggggtggagtaggagatgtactcaggaagccgtccaaagaggaacccctgtttgctgctagagttatttatgacctcttgttcttcttcatggtcatcatcattgttcttaacctgatttttggggttatcattgacacttttgctgacctgaggagtgagaagcagaagaaggaagagatcttgaagaccacgtgctttatctgtggcttggaaagagacaagtttgacaacaagactgtcacctttgaagagcacatcaaggaagaacacaacatgtggcactatctgtgcttcatcgtcctggtgaaagtaaaggactccaccgaatatactgggcctgagagttacgtggcagaaatgatcaaggaaagaaaccttgactggttccccaggatgagagccatgtcattggtcagcagtgattctgaaggagaacagaatgagctgagaaacctgcaggagaagctggagtccaccatgaaacttgtcacgaacctttctggccagctgtcggaattaaaggatcagatgacagaacaaaggaagcagaaacaaagaattggtcttctaggacatcctcctcacatgaatgtcaacccacaacaaccagcataagcaaatgaaagaaaggaattgtatttaccttttataattattattagtgtgggtatggctaatgagttctgattcacccacgaaggttacatttatgctgaatacatttgtaaatactcagttttatactgtatgtatatgattgctactctaaaggtttggatatatgtattgtaattagaattgttggcatgatgacatttcatttgtgccaaaaatattaaaaatgccttttttggaaggactaacagaaagcacctgatttgcacttgaaccagattatagatttaaaagtatatgacatgtattttgtatttaaaactagaatagccagtatttatgttttttataaaactgtgcaatacgaattatgcaatcacaatacatttgtagctcccgagtgtcctaaagggagtgcacttctttgaagctggtgtgttaatactatgtaataaatggttaactttcaaatgatgctgctgccaaaattatattaatagtgagtttcaggcccctgggcattttgtaccatgtaattatcctctggtgatgctgtttctcgttagtggcagtagtgcctccgtctcctagtgataatgctccaagtctatgaactgttaaatcagcattcattttaagaaaagcaactttagtttcaaagatacttttaagcttctaaattgatcatttaaactatttctttaaataagagagccaaattagaggctcatactttagcttgtgaagaagataatgaattttttaaagggaactttctatgcaatgttcaggataaatgcatactgctggccaatcagtgtcatctcctgggtaaattttgatgtcgcattataaagacatgcataattgatggtttctagattatctagtccaaacaatagagtttattttttcttcatctgaaccaacatgctacagtagctaagaagtattaaaactatatacatccatataaagatgaaatatgaactatctcattagaagtcatagttgaccacagacatgttattcttctgaaagagccacattttggttttatttcttgtcacatgatttcttttcttgatggatgaaaaatatgaaaggaaacttttatatctgttgcctagttttgtacatggatctcattttacaagagaatctctctgcaaaaaaaaaaaaaacagtttaaaaatgcattgaaagcagagttctgaaatgagtaaagtttgtaaatgcatatataaaaatatttaataaatgatgcagaatatacagtgactggttggtggctttcatttggcatttgtgacttaactgctattccatttatgtactttctttaggatcagtttgaagtacagtcggtttgattaccaggttaattcagaaaatgtttacctgattatttaaaaaaacacttgctgttgttatgacagctctgaggagaattattagaacaaacattggggagtatttagtacaacattcattcattcttctggattagtgactgccagccaggctgtcgggagcgccctactaaatctcctgtctcttctgcttttactgggggatctttaatttgctgtgtgccatgtggaagtatcgggaa

SEQ ID NO: 10003 - DNA, 1483 bp, Homo sapiens
  source 1..1483: mol_type = unassigned DNA
agtaaccatgtggatgtgctgctgaagcgtttcctcaagctcgctggggtgggaggagaggaggaggaggaggtggtggtggaggaggaggcagggggtggagagagagaaagcgcacgccgagaggaggtgtgggtgttccgcttccatcctaacggaacgagctccctcttcgcggacatgggattacccagcggctgctaacccctctcctcgccctgctcccccaaaccggcgtggctccccgggcaccaaggagctgactacagaggagcaggatttgcacccctcgctgggcttgctttggcaacagagtgcctgacccaggtcaggattttcaagaaagacatgtctgacaaaatgtctagcttcctacatattggagacatttgttctctgtacgcggagggatcgacaaatggatttattagcaccttgggcctggttgatgatcgttgtgttgtacagccagaaaccggggaccttaacaatccacctaagaaattcagagactgcctctttaagctatgtcccatgaaccgctactctgcccaaaagcagttctggaaagccgctaagcctggggccaacagcaccacagacgcagtgctactcaacaaactgcaccacgctgcagacttggaaaagaagcagaatgagacagaaaacaggaaattgctggggaccgtaatccagtatggcaatgtgatccagctcctgcatttgaaaagtaataaatacctaacagtgaataagaggcttcctgctctgttggagaagaatgccatgagagtcacattggacgaggctggaaatgaagggtcctggttttatattcagccattctacaagctgcgatccattggagacagcgtggtcataggtgacaaggtggttctgaaccccgtcaatgctggtcagcccctacatgctagcagccatcaactggtagataacccaggctgcaatgaggtcaattccgtcaactgcaatacaagctggaaaatagtccttttcatgaaatggagtgataacaaagacgacatattaaaggggggtgacgtggtgaggctgtttcatgctgagcaggagaagtttctcacctgtgacgaacacaggaagaagcagcacgtcttcctgagaaccacgggccggcagtcggccacatctgccaccagttcaaaagccctgtgggaggtggaggtaagggtagggtggagaaagggctcctgggtttagaggatatcagcctgtatataggctctctctctctctatcctacaaatattcatacatacatatacctatatgtgtctatacacccacatacacacacctacacacacacacagaatacatgtgtgtgtatatatataagtcacaaacaagtacttatacccaccttattccaaaaatgggttggggatggcatagtgaagtaagtgcatcatggcatatcatggtgctgcatatttgtgcagaa

SEQ ID NO: 10004 - DNA, 9762 bp, Homo sapiens; identical to SEQ ID NO: 9985
  source 1..9762: mol_type = unassigned DNA

SEQ ID NO: 10005 - DNA, 9717 bp, Homo sapiens; identical to SEQ ID NO: 9986
  source 1..9717: mol_type = unassigned DNA

SEQ ID NO: 10006 - DNA, 9513 bp, Homo sapiens; identical to SEQ ID NO: 9987
  source 1..9513: mol_type = unassigned DNA

SEQ ID NO: 10007 - DNA, 264 bp, Homo sapiens; identical to SEQ ID NO: 9988
  source 1..264: mol_type = unassigned DNA

SEQ ID NO: 10008 - DNA, 2151 bp, Homo sapiens; identical to SEQ ID NO: 9989
  source 1..2151: mol_type = unassigned DNA

SEQ ID NO: 10009 - DNA, 580 bp, Homo sapiens; identical to SEQ ID NO: 9990
  source 1..580: mol_type = unassigned DNA

SEQ ID NO: 10010 - DNA, 697 bp, Homo sapiens; identical to SEQ ID NO: 9991
  source 1..697: mol_type = unassigned DNA

SEQ ID NO: 10011 - DNA, 591 bp, Homo sapiens; identical to SEQ ID NO: 9992
  source 1..591: mol_type = unassigned DNA

SEQ ID NO: 10012 - DNA, 552 bp, Homo sapiens; identical to SEQ ID NO: 9993
  source 1..552: mol_type = unassigned DNA

SEQ ID NO: 10013 - DNA, 571 bp, Homo sapiens; identical to SEQ ID NO: 9994
  source 1..571: mol_type = unassigned DNA

SEQ ID NO: 10014 - DNA, 1793 bp, Homo sapiens; identical to SEQ ID NO: 9995
  source 1..1793: mol_type = unassigned DNA

SEQ ID NO: 10015 - DNA, 2215 bp, Homo sapiens; identical to SEQ ID NO: 9996
  source 1..2215: mol_type = unassigned DNA

SEQ ID NO: 10016 - DNA, 632 bp, Homo sapiens; identical to SEQ ID NO: 9997
  source 1..632: mol_type = unassigned DNA

SEQ ID NO: 10017 - DNA, 652 bp, Homo sapiens; identical to SEQ ID NO: 9998
  source 1..652: mol_type = unassigned DNA

SEQ ID NO: 10018 - DNA, 910 bp, Homo sapiens; identical to SEQ ID NO: 9999
  source 1..910: mol_type = unassigned DNA

SEQ ID NO: 10019 - DNA, 10197 bp, Homo sapiens; identical to SEQ ID NO: 10000
  source 1..10197: mol_type = unassigned DNA

SEQ ID NO: 10020 - DNA, 10242 bp, Homo sapiens; identical to SEQ ID NO: 10001
  source 1..10242: mol_type = unassigned DNA

SEQ ID NO: 10021 - DNA, 4131 bp, Homo sapiens; identical to SEQ ID NO: 10002
  source 1..4131: mol_type = unassigned DNA

SEQ ID NO: 10022 - DNA, 1483 bp, Homo sapiens; identical to SEQ ID NO: 10003
  source 1..1483: mol_type = unassigned DNA

SEQ ID NO: 10023 - DNA, 1000 bp, Homo sapiens
  source 1..1000: mol_type = unassigned DNA
cgcgcgcggtgttgccatggggacgagcggctccggctgaaggtttccgtgcttggaaaccgcgcctccgcggaggtagccgttccctgacctagccatggcacagaacactgaaaaccacgaccctgtcggatccatcttaatccagatccatgaagacctttatcagttaaaggagaaattaacaaaattctcacctgaggaaaaaggagagactctagacattcagagtcttgaaacagcaatcaaaaggactgaagtggggttaagaattcacattgagaagtatttaaatgttgtaaaccagaatgtattaacgacttctgttaatgatgagagcttatatactccccaggcttccaaatggttacttccaactgtaattgatcagaaatcatttattttccctcaggaatctgagggtacattttggcaaccccaaagacagcacagttcatctctgcctgtctttccaagagcaaagcgaaagatagggttgaatgtaaaaatcttgcaggatcctgaaaacatccaccacagagctgctgtaaatgcgaactatggaatcagtttgccatatattaatcagagaaaagcatgttaggtcctcaaaggtatgtggaaacaagaagaaatccctggtactgttcatgttccctcactgacatccagttccagttagactttataatacaacacattaagaaatctacagaaaatttgactttgatttattccttttaaataaaaagtgtttcttaaaaggcttgaaacatgtatctgttaacatgaattttaaaagaacaattatgaatgcataacaaaatagccaaaccaaacattgctttgaattgctgcacaaataactgattataactgttatgacctagaaaaaaatcataaaaacatttttctttttggcaagatgtgagttgctgtagaattataccagttctttggttctactttccaaataaatatatatataatgcaatgtaaa

SEQ ID NO: 10024 - DNA, 3675 bp, Homo sapiens
  source 1..3675: mol_type = unassigned DNA
gcgcgcggtgttgccatggggacgagcggctccggctgaaggtttccgtgcttggaaaccgcgcctccgcggaggtagccgttccctgacctagccatggcacagaacactgaaaaccacgaccctgtcggatccatcttaatccagatccatgaagacctttatcagttaaaggagaaattaacaaaattctcacctgaggaaaaaggagagactctagacattcagagtcttgaaacagcaatcaaaaggactgaagtggggttaagaggattttaagtatgatagaacgagggctgattccaccaacagcaaggattacctttcagaatccacccattacacccagagcagctcctctgcatagttttgatgaagcacgtaagattccaactgtagccactttcactatacctcgggaaccacctccatctccagcagaagtgaagttctttcccaagaaacaaagatcaaaggggaaaagcagaaggtcaagaggacatcatgataggaagatttgtgatcctaatccacctgggacagccccagatatgttcctaagaagaaaccagacttaagaataaaagaacacgtgtcaagagaaacctaagaatgacaaaggccatgaaagtcaaaacacctttgagagccctgaaatcactgtgggattatgactttttaatttatgatggtgtcatagacaatacagccccagacttcttagcattcaaggaacattttagcttagcttggggaggtattttttctctcttggaacacgtcgagaagtttctcaggaactatgctataccagaagtcaaaataaaagggaataatttggtggccctccttccagagtttgagctgacgaataaacttaccagatatgaccttctctcagtgttagaggacccagctcatgtccaaatgctgataaatcttccagggcaaaggtacaagggccaagatggaaattcggaggccgccatgaagatccaagccacatggaaatgctacaaagcaagaaaattcttcctcttttatcgccagcagaagtgggcatcaggtgtgattgccattgcttggctgttatattgccataagactcgactaaagaagatactaaaggaatcacgtcagagacacctggagaattttcgcattcgagccaagcatctggcagccaactggaatcgcatcaggacctccaggaggactattatccatatcccatcattagggtattcccagcctgtgagagaacatattgccgatttcaacacacagcagaacatgcagctggggaggctgtgtgacatcttagatgccaatgtgaatgtcatctacatctgctcccatcatatgaatgacgagttagtgctgtattacaaaaaaatcctaagtctacatgcagccgtcaaatctgggaaccttgaggacagaagtgacctgcaggacaggttcaaaattatcacacctgaagctgtaaacatcttccctatgatagagcagctgagtcagctgataactgatcacctgcaaatacagcgttggctctttaaaatggactctgagttccgaggaaatgggactgcattttgtgatattccttcctacctaaagtgctacaaatgggtgctaaaggagagtagcagatatggccttgaagactggagaaagaaatgggcacaagagccagctttggtgaagatctctgaggagctggcgggcattttagcacagcacgcacagccagtcaatgagaaacggttcccgacgtggaggaaattcctccaaacatttctcagtcaagggggtgtgatcgaagcattcccacctgcagacaatgtcaccaacctcacagtggacatgctgatagagcccaacgggaaaatcagcgtgctgtcgacaggggaccagcttcatgctgaaagccccttcatctcctctggtaccaccgtgcctcagacctcagtggatccccaagttctcacttatttgtgcctccaaattggaaaagcctgcagaatgagagatgtggttggttacttttcgatagatctggtgacttttatagatccaagcaccttggaacaacaggtgtgggcaaccggccttaacctcgcatatagtgaccagctggccctgactcaactcaccttatacctgacaaacggccatctggattgcagtttgagcaccctggaagtgccccgctttgttccaaaggaaaggaagaaaaccaaatgcatgagtgcgctgtcaatgccgatgctggcaaccagtcgctatgcagtgatgaccacccagctaagacacagcaatctctcactggttttccactatgtttttctccagatctgtagggcccatggcattggctatgatgttgagaacaatcggcgaggatctccagggggtcctcatgacctttgctcgccatctcttcatcatccatcaagaaatatcagcacctaatatgcaaggcgagaccaattttaagaccaccattgctgatattgaaactattctaagagtaacaaaggaaaacaaaatgagatttgaagaggagcaacagtccaaagatgataaaaacctctctaaacccaagaaatgatcctggaatacagtacataacaatttggatcccagtctggaataaaaagggcaatttttttttctgttagaaataaaagccaggggaaattggtttgctttgtgtgctaggaggtgaatcagaacagattataatgaaatgctctttttaaaacattgtttattaagtgatcttattttatttattaaaccaaaacttatttgtgttttcatttgagagtgttgaacaatcccttcttcttctcaaactcagaaaaaagtaatctgataaaagaagaaagttaaaagtcttactgatatcacctccgcatttacttcctcataggcctcaggattatgtagcttttattttttatgttttataaagttttctcctatttctaatagtccatcgatcttctgcatttataggtttgaataaaggcttaagaattgctatttgtcaaaacacaaatgcctttttttcaaagcttcaaattatattgaaattatatttatatgaatttttaagtgactatcattcatcgtgtttttgttataccaagccactattgtctgctattgttgccatttttcaaaaagtaggataagccagcatctagttaaccaaagcatcagaatgtatctaggtggcagtatctgctcttagtttaagatggagtgtagctcgagctctgtagcttgaataaacatttgtattctctagttctccatttaatacagcagtaggattttttcaagtttagttcaacattatactacctttaaaaaggcagactgttaagattgtagtagtgctgactctaactttcagcattcacttcataattgtccaaaaatatttccacatcagtgagctttactgaagggtgaaataaaagcaaattacaacaccaaaaccattattgttttaaagaatgacctttatgtctataaaaatattttagtgtattggggaaaggaataggatttttacctgtggaatttcaataatttgttaactgtgattcagccacaggctaagagtttctgtaataaaattaacatttgtgtgtgtca

SEQ ID NO: 10025 - DNA, 4208 bp, Homo sapiens
  source 1..4208: mol_type = unassigned DNA
tccggctgaaggtttccgtgcttggaaaccgcgcctccgcggaggtagccgttccctgacctagccatggcacagaacactgaaaaccacgaccctgtcggatccatcttaatccagatccatgaagacctttatcagttaaaggagaaattaacaaaattctcacctgaggaaaaaggagagactctagacattcagagtcttgaaacagcaatcaaaaggactgaagtggggttaagaattcacattgagaagtatttaaatgttgtaaaccagaatgtattaacgacttctgttaatgatgagagcttatatactccccaggcttccaaatggttacttccaactgtaattgatcagaaatcatttattttccctcaggaatctgagggtacattttggcaaccccaaagacagcacagttcatctctgcctgtctttccaagagcaaagataaaggtttcgaagttaatcaaagggtctaacatatccagcctcacggttctgccatcttctcattgcacagatccctatttcactcctataccagtcttacaagcagatgcccacaaagggattttaagtatgatagaacgagggctgattccaccaacagcaaggattacctttcagaatccacccattacacccagagcagctcctctgcatagttttgatgaagcacgtaagattccaactgtagccactttcactatacctcgggaaccacctccatctccagcagaagtgaagttctttcccaagaaacaaagatcaaaggggaaaagcagaaggtcaagaggacatcatgataggaaggccatgaaagtcaaaacacctttgagagccctgaaatcactgtgggattatgactttttaatttatgatggtgtcatagacaatacagccccagacttcttagcattcaaggaacattttagcttagcttggggaggtattttttctctcttggaacacgtcgagaagtttctcaggaactatgctataccagaagtcaaaataaaagggaataatttggtggccctccttccagagtttgagctgacgaataaacttaccagatatgaccttctctcagtgttagaggacccagctcatgtccaaatgctgataaatcttccagggcaaaggtacaagggccaagatggaaattcggaggccgccatgaagatccaagccacatggaaatgctacaaagcaagaaaattcttcctcttttatcgccagcagaagtgggcatcaggtgtgattgccattgcttggctgttatattgccataagactcgactaaagaagatactaaaggaatcacgtcagagacacctggagaattttcgcattcgagccaagcatctggcagccaactggaatcgcatcaggacctccaggaggactattatccatatcccatcattagggtattcccagcctgtgagagaacatattgccgatttcaacacacagcagaacatgcagctggggaggctgtgtgacatcttagatgccaatgtgaatgtcatctacatctgctcccatcatatgaatgacgagttagtgctgtattacaaaaaaatcctaagtctacatgcagccgtcaaatctgggaaccttgaggacagaagtgacctgcaggacaggttcaaaattatcacacctgaagctgtaaacatcttccctaagcatcatatgtgcctggccactcacctgatgtacagtcccaaggcaatcaaaagaataaaaaatctcatccgaggaacagaggcctacatcgtcagcgggctcctccacagagatgatttagctgtggccgatatgttagacatacccatcctgggctctgagcctgaactagctcatctttatagtaccaaatctggaggcaaacgtgtctttgacagtgccaatgtggcagttcctcctggaatatatgatatttatagtcagcaacagatgatagagcagctgagtcagctgataactgatcacctgcaaatacagcgttggctctttaaaatggactctgagttccgaggaaatgggactgcattttgtgatattccttcctacctaaagtgctacaaatgggtgctaaaggagagtagcagatatggccttgaagactggagaaagaaatgggcacaagagccagctttggtgaagatctctgaggagctggcgggcattttagcacagcacgcacagccagtcaatgagaaacggttcccgacgtggaggaaattcctccaaacatttctcagtcaagggggtgtgatcgaagcattcccacctgcagacaatgtcaccaacctcacagtggacatgctgatagagcccaacgggaaaatcagcgtgctgtcgacaggggaccagcttcatgctgaaagccccttcatctcctctggtaccaccgtgcctcagacctcagtggatccccaagttctcacttatttgtgcctccaaattggaaaagcctgcagaatgagagatgtggttggttacttttcgatagatctggtgacttttatagatccaagcaccttggaacaacaggtgtgggcaaccggccttaacctcgcatatagtgaccagctggccctgactcaactcaccttatacctgacaaacggccatctggattgcagtttgagcaccctggaagtgccccgctttgttccaaaggaaaggaagaaaaccaaatgcatgagtgcgctgtcaatgccgatgctggcaaccagtcgctatgcagtgatgaccacccagctaagacacagcaatctctcactggttttccactatgtttttctccagatctgtagggcccatggcattggctatgatgttgaggaaaggcaaggaactgtttttatattatatgagcacctgaagagacacaagttgggaatgttaacaatcggcgaggatctccagggggtcctcatgacctttgctcgccatctcttcatcatccatcaagaaatatcagcacctaatatgcaaggcgagaccaattttaagaccaccattgctgatattgaaactattctaagagtaacaaaggaaaacaaaatgagatttgaagaggagcaacagtccaaagatgataaaaacctctctaaacccaagaaatgatcctggaatacagtacataacaatttggatcccagtctggaataaaaagggcaatttttttttctgttagaaataaaagccaggggaaattggtttgctttgtgtgctaggaggtgaatcagaacagattataatgaaatgctctttttaaaacattgtttattaagtgatcttattttatttattaaaccaaaacttatttgtgttttcatttgagagtgttgaacaatcccttcttcttctcaaactcagaaaaaagtaatctgataaaagaagaaagttaaaagtcttactgatatcacctccgcatttacttcctcataggcctcaggattatgtagcttttattttttatgttttataaagttttctcctatttctaatagtccatcgatcttctgcatttataggtttgaataaaggcttaagaattgctatttgtcaaaacacaaatgcctttttttcaaagcttcaaattatattgaaattatatttatatgaatttttaagtgactatcattcatcgtgtttttgttataccaagccactattgtctgctattgttgccatttttcaaaaagtaggataagccagcatctagttaaccaaagcatcagaatgtatctaggtggcagtatctgctcttagtttaagatggagtgtagctcgagctctgtagcttgaataaacatttgtattctctagttctccatttaatacagcagtaggattttttcaagtttagttcaacattatactacctttaaaaaggcagactgttaagattgtagtagtgctgactctaactttcagcattcacttcataattgtccaaaaatatttccacatcagtgagctttactgaagggtgaaataaaagcaaattacaacaccaaaaccattattgttttaaagaatgacctttatgtctataaaaatattttagtgtattggggaaaggaataggatttttacctgtggaatttcaataatttgttaactgtgattcagccacaggctaagagtttctgtaataaaattaacatttgtgtgtgtca

SEQ ID NO: 10026 - DNA, 819 bp, Homo sapiens
  source 1..819: mol_type = unassigned DNA
gtgcttggaaaccgcgcctccgcggaggtagccgttccctgacctagccatggcacagaacactgaaaaccacgaccctgtcggatccatcttaatccagatccatgaagacctttatcagttaaaggagaaattaacaaaattctcacctgaggaaaaaggagagactctagacattcagagtcttgaaacagcaatcaaaaggactgaagtggggttaagaattcacattgagaagtatttaaatgttgtaaaccagaatgtattaacgacttctgttaatgatgagagcttatatactccccaggcttccaaatggttacttccaactgtaattgatcagaaatcatttattttccctcaggaatctgagggtacattttggcaaccccaaagacagcacagttcatctctgcctgtctttccaagagcaaagcgaaagatagggttgaatgtaaaaatcttgcaggatcctgaaaacatccaccacagagctgctgtaaatgcgaactatggaatcagtttgccatatattaatcagagaaaagcatgtggattttaagtatgatagaacgagggctgattccaccaacagcaaggattacctttcagaatccacccattacacccagagcagctcctctgcatagttttgatgaagcacgtaagattccaactgtagccactttcactatacctcgggaaccacctccatctccagcagaagtgaagttctttcccaagaaacaaagatcaaaggccatgaaagtcaaaacacctttgagagccctgaaatcactgtgggattatgacttttta

SEQ ID NO: 10027 - DNA, 1699 bp, Homo sapiens
  source 1..1699: mol_type = unassigned DNA
gtgcttggaaaccgcgcctccgcggaggtagccgttccctgacctagccatggcacagaacactgaaaaccacgaccctgtcggatccatcttaatccagggattttaagtatgatagaacgagggctgattccaccaacagcaaggattacctttcagaatccacccattacacccagagcagctcctctgcatagttttgatgaagcacgtaagattccaactgtagccactttcactatacctcgggaaccacctccatctccagcagaagtgaagttctttcccaagaaacaaagatcaaaggggaaaagcagaaggtcaagaggacatcatgataggaaggccatgaaagtcaaaacacctttgagagccctgaaatcactgtgggattatgactttttaatttatgatggtgtcatagacaatacagccccagacttcttagcattcaaggaacattttagcttagcttggggaggtattttttctctcttggaacacgtcgagaagtttctcaggaactatgctataccagaagtcaaaataaaagggaataatttggtggccctccttccagagtttgagctgacgaataaacttaccagatatgaccttctctcagtgttagaggacccagctcatgtccaaatgctgataaatcttccagggcaaaggtacaagggccaagatggaaattcggaggccgccatgaagatccaagccacatggaaatgctacaaagcaagaaaattcttcctcttttatcgccagcagaagtgggcatcaggtgtgattgccattgcttggctgttatattgccataagactcgactaaagaagatactaaaggaatcacgtcagagacacctggagaattttcgcattcgagccaagcatctggcagccaactggaatcgcatcaggacctccaggaggactattatccatatcccatcattaggtataacacttttgcctgcaaatctatcagcaacctctattacccaccacattatggctccttgattgagttcaaggaaggccccttgttttattcaaattggtctcggcaggaaaatgttctcgacatgatgagagtaataacacaggaccctcgcttgaaacggcgtttaatttggggattaagcaaataaagtcattatgtgggggctgctattcagtggagaggtgatttgctgtaattcgctttcatctgtatgaaatgaactaaaaagttgtatttttccccgaaataacagataatgttttcgatcttctttaatgatagaagaacacaggcttgtatgtgttgttgctgttacgccaataagccaggatattgcttgtacactgtttttaatcaaatgtgcagtcaaaatgataagctacattctctgaaattatttagttctaattacgagcagatgggatgctttatttgcacctagggcgcctgagcaaaaggaaatgctgtgtgaacaagaataattaagaagttgaatagtgttttttgcacttaaataatctgcagtttcatgttaattagcactaatgtaattatttaattacatttatgaattggggaacttaaaagctgttgtctgaaacacactggtaaaaaaggtatgccaaaatgacattgggaatttcagaaatttgcattggagtttcttttaagacatgagctactgtcaac

SEQ ID NO: 10028 - DNA, 560 bp, Homo sapiens
  source 1..560: mol_type = unassigned DNA
tttggtgcgccgcccctagactccctccaactcgcgagaggctcccaaaaatgcccacccagaccttcccccacggcccagcacactcccggtgacttaccctgtaggttacgccccagaagcaggactttctgcctctgggaaaactctaaaaccgttcacccggaacctttacttcagaaaaattaacctcacgctgaggcatcatttttaaatgttatattctgaaaaatttgaacccatgacgtcgggagtggaggagagacaaatcggacactctaggagatccatgaagacctttatcagttaaaggagaaattaacaaaattctcacctgaggaaaaaggagagactctagacattcagagtcttgaaacagcaatcaaaaggactgaagtggggttaagaattcacattgagaagtatttaaatgttgtaaaccagaatgtattaacgacttctgttaatgatgagagcttatatactccccaggcttccaaatggttacttccaactgtaattgatcagaaatcatttattttccctcaggaatctgaggg

SEQ ID NO: 10029 - DNA, 543 bp, Homo sapiens
  source 1..543: mol_type = unassigned DNA
aaattaacaaaattctcacctgaggaaaaaggagagactctagacattcagagtcttgaaacagcaatcaaaaggactgaagtggggttaagaccactttcactatacctcgggaaccacctccatctccagcagaagtgaagttctttcccaagaaacaaagatcaaaggggaaaagcagaaggtcaagaggacatcatgataggaaggccatgaaagtcaaaacacctttgagagccctgaaatcactgtgggattatgactttttaatttatgatggtgtcatagacaatacagccccagacttcttagcattcaaggaacattttagcttagcttggggaggtattttttctctcttggaacacgtcgagaagtttctcaggaactatgctataccagaagtcaaaataaaagggaataatttggtggccctccttccagagtttgagctgacgaataaacttaccagatatgaccttctctcagtgttagaggacccagctcatgtccaaatgctgataaatcttccagggcaaaggt

SEQ ID NO: 10030 - DNA, 680 bp, Homo sapiens
  source 1..680: mol_type = unassigned DNA
ttcatctctgcctgtctttccaagagcaaagtcgtttaaaggtatcagactcaatctctcccagatccaggaaatgactggaaaggggaggccttggcagcattggtggagattctctacagaagcaaaatttccccacaaaagacagctttgcaagaccacttctgtttgctggccctgtggcaactatttcaaaatatgtcaaagtacatattttggggtaaaatatttttatttccttcacagaggattctgcataaatgtttgttgaatggataaacaaaaccaccacagtgatctctaagagtgtgctcatctgcatgtaaaatatcagttcaggctcctgtgaactcccaaagcagccctctcctatctctgtccttgcacttgttacattgggtctgtcagccactctctgaggagtgcttactgtgtgcccaggattattagaggcacgctgggctgaataagacagatcagatccctgacatcagagagcttatattctagtggggaaagacagaccatcaataagataccaccagataatgataaaagctctgataaaaataaaacagaatgctgtgataaagggagcttaaacttctcatcttccttactgttaaatcacttcttcagtcatttttttacctgtttgccaagaatctcagaaggtccat

SEQ ID NO: 10031 - DNA, 326 bp, Homo sapiens
  source 1..326: mol_type = unassigned DNA
ccactttcactatacctcgggaaccacctccatctccagcagaagtgaagttctttcccaagaaacaaagatcaaaggggaaaagcagaaggtcaagaggacatcatgataggaaggtctgtaatttgtgtgactagttgaaatttagggtctgtcacctgatgtcccttccttttgctgcagggcaagagtatgggtgactgcttgacagctggagatggcaacaaaagttcgtgcttcctttgtaaaagaaattagatcatggtttcaggaaaaaaaaaaaaacatggttcatttaaagtgaaaacccttttttgcctcctttt

SEQ ID NO: 10032 - DNA, 583 bp, Homo sapiens
  source 1..583: mol_type = unassigned DNA
tcttcctcttttatcgccagcagaagtgggcatcaggtgtgattgccattgcttggctgttatattgccataagactcgactaaagaagatactaaaggaatcacgtcagagacacctggagaattttcgcattcgagccaagcatctggcagccaactggaatcgcatcaggacctccaggaggactattatccatatcccatcattagggtattcccagcctgtgagagaacatattgccgatttcaacacacagcagaacatgcagctggggaggctgtgtgacatcttagatgccaatgtgaatgtcatctacatctgctcccatcatatgaatgacgagttagtgctgtattacaaaaaaatcctaagtctacatgcagccgtcaaatctgggaaccttgaggacagaagtgacctgcaggacaggttcaaaattatcacacctgaagctgtaaacatcttccctatgatagagcagctgagtcagctgataactgatcacctgcaaatacagcgttggctctttaaaatggactctgagttccgaggaaatgggactgcattttgtgatattccttc

SEQ ID NO: 10033 - DNA, 653 bp, Homo sapiens
  source 1..653: mol_type = unassigned DNA
actgtttttatattatatgagcacctgaagagacacaagttgggaatgttaacaatcggcgaggatctccagggggtcctcatgacctttgctcgccatctcttcatcatccatcaagaaatatcagcacctaatatgcaaggcgagaccaattttaagaccaccattgctgatattgaaactattctaagagtaacaaaggaaaacaaaatgagatttgaagaggagcaacagtccaaagatgataaaaacctctctaaacccaagaaatgatcctggaatacaatctctctaatccattcgaggggcccattgttcagacacttgacagataggaagtcctacatgcccattagagccgcgcctcgactgaagccagagcaacataaggtccaagagactcattagttcactggcacaatcgtgtcctgagagtaaatgaaaccctctgtctccttatggctctcatctgctctggactttaaaagaaaactgtctccgttttgttcggcacagtagtggatcattcacatggtgagagcccctgcttaacagtacaaaactgttaaatctatcggaaagttttgcatgtgaattttgattagcactcccgaagctcaagctgctggcaatagcgaaacgatttcgccatc

SEQ ID NO: 10034 - DNA, 3112 bp, Homo sapiens
  source 1..3112: mol_type = unassigned DNA
atgaaagtcaaaacacctttgagagccctgaaatcactgtgggattatgactttttaatttatgatggtgtcatagacaatacagccccagacttcttagcattcaaggaacattttagcttagcttggggaggtattttttctctcttggaacacgtcgagaagtttctcaggaactatgctataccagaagtcaaaataaaagggaataatttggtggccctccttccagagtttgagctgacgaataaacttaccagatatgaccttctctcagtgttagaggacccagctcatgtccaaatgctgataaatcttccagggcaaaggtacaagggccaagatggaaattcggaggccgccatgaagatccaagccacatggaaatgctacaaagcaagaaaattcttcctcttttatcgccagcagaagtgggcatcaggtgtgattgccattgcttggctgttatattgccataagactcgactaaagaagatactaaaggaatcacgtcagagacacctggagaattttcgcattcgagccaagcatctggcagccaactggaatcgcatcaggacctccaggaggactattatccatatcccatcattagggtattcccagcctgtgagagaacatattgccgatttcaacacacagcagaacatgcagctggggaggctgtgtgacatcttagatgccaatgtgaatgtcatctacatctgctcccatcatatgaatgacgagttagtgctgtattacaaaaaaatcctaagtctacatgcagccgtcaaatctgggaaccttgaggacagaagtgacctgcaggacaggttcaaaattatcacacctgaagctgtaaacatcttccctatgatagagcagctgagtcagctgataactgatcacctgcaaatacagcgttggctctttaaaatggactctgagttccgaggaaatgggactgcattttgtgatattccttcctacctaaagtgctacaaatgggtgctaaaggagagtagcagatatggccttgaagactggagaaagaaatgggcacaagagccagctttggtgaagatctctgaggagctggcgggcattttagcacagcacgcacagccagtcaatgagaaacggttcccgacgtggaggaaattcctccaaacatttctcagtcaagggggtgtgatcgaagcattcccacctgcagacaatgtcaccaacctcacagtggacatgctgatagagcccaacgggaaaatcagcgtgctgtcgacaggggaccagcttcatgctgaaagccccttcatctcctctggtaccaccgtgcctcagacctcagtggatccccaagttctcacttatttgtgcctccaaattggaaaagcctgcagaatgagagatgtggttggttacttttcgatagatctggtgacttttatagatccaagcaccttggaacaacaggtgtgggcaaccggccttaacctcgcatatagtgaccagctggccctgactcaactcaccttatacctgacaaacggccatctggattgcagtttgagcaccctggaagtgccccgctttgttccaaaggaaaggaagaaaaccaaatgcatgagtgcgctgtcaatgccgatgctggcaaccagtcgctatgcagtgatgaccacccagctaagacacagcaatctctcactggttttccactatgtttttctccagatctgtagggcccatggcattggctatgatgttgaggaaaggcaaggaactgtttttatattatatgagcacctgaagagacacaagttgggaatgttaacaatcggcgaggatctccagggggtcctcatgacctttgctcgccatctcttcatcatccatcaagaaatatcagcacctaatatgcaaggcgagaccaattttaagaccaccattgctgatattgaaactattctaagagtaacaaaggaaaacaaaatgagatttgaagaggagcaacagtccaaagatgataaaaacctctctaaacccaagaaatgatcctggaatacagtacataacaatttggatcccagtctggaataaaaagggcaatttttttttctgttagaaataaaagccaggggaaattggtttgctttgtgtgctaggaggtgaatcagaacagattataatgaaatgctctttttaaaacattgtttattaagtgatcttattttatttattaaaccaaaacttatttgtgttttcatttgagagtgttgaacaatcccttcttcttctcaaactcagaaaaaagtaatctgataaaagaagaaagttaaaagtcttactgatatcacctccgcatttacttcctcataggcctcaggattatgtagcttttattttttatgttttataaagttttctcctatttctaatagtccatcgatcttctgcatttataggtttgaataaaggcttaagaattgctatttgtcaaaacacaaatgcctttttttcaaagcttcaaattatattgaaattatatttatatgaatttttaagtgactatcattcatcgtgtttttgttataccaagccactattgtctgctattgttgccatttttcaaaaagtaggataagccagcatctagttaaccaaagcatcagaatgtatctaggtggcagtatctgctcttagtttaagatggagtgtagctcgagctctgtagcttgaataaacatttgtattctctagttctccatttaatacagcagtaggattttttcaagtttagttcaacattatactacctttaaaaaggcagactgttaagattgtagtagtgctgactctaactttcagcattcacttcataattgtccaaaaatatttccacatcagtgagctttactgaagggtgaaataaaagcaaattacaacaccaaaaccattattgttttaaagaatgacctttatgtctataaaaatattttagtgtattggggaaaggaataggatttttacctgtggaatttcaataatttgttaactgtgattcagccacaggctaagagtttctgtaataaaattaacatttgtgtgtgtc

SEQ ID NO: 10035 - DNA, 3062 bp, Homo sapiens
  source 1..3062: mol_type = unassigned DNA
atgacaaaggccatgaaagtcaaaacacctttgagagccctgaaatcactgtgggattatgactttttaatttatgatggtgtcatagacaatacagccccagacttcttagcattcaaggaacattttagcttagcttggggaggtattttttctctcttggaacacgtcgagaagtttctcaggaactatgctataccagaagtcaaaataaaagggaataatttggtggccctccttccagagtttgagctgacgaataaacttaccagatatgaccttctctcagtgttagaggacccagctcatgtccaaatgctgataaatcttccagggcaaaggtacaagggccaagatggaaattcggaggccgccatgaagatccaagccacatggaaatgctacaaagcaagaaaattcttcctcttttatcgccagcagaagtgggcatcaggtgtgattgccattgcttggctgttatattgccataagactcgactaaagaagatactaaaggaatcacgtcagagacacctggagaattttcgcattcgagccaagcatctggcagccaactggaatcgcatcaggacctccaggaggactattatccatatcccatcattagggtattcccagcctgtgagagaacatattgccgatttcaacacacagcagaacatgcagctggggaggctgtgtgacatcttagatgccaatgtgaatgtcatctacatctgctcccatcatatgaatgacgagttagtgctgtattacaaaaaaatcctaagtctacatgcagccgtcaaatctgggaaccttgaggacagaagtgacctgcaggacaggttcaaaattatcacacctgaagctgtaaacatcttccctatgatagagcagctgagtcagctgataactgatcacctgcaaatacagcgttggctctttaaaatggactctgagttccgaggaaatgggactgcattttgtgatattccttcctacctaaagtgctacaaatgggtgctaaaggagagtagcagatatggccttgaagactggagaaagaaatgggcacaagagccagctttggtgaagatctctgaggagctggcgggcattttagcacagcacgcacagccagtcaatgagaaacggttcccgacgtggaggaaattcctccaaacatttctcagtcaagggggtgtgatcgaagcattcccacctgcagacaatgtcaccaacctcacagtggacatgctgatagagcccaacgggaaaatcagcgtgctgtcgacaggggaccagcttcatgctgaaagccccttcatctcctctggtaccaccgtgcctcagacctcagtggatccccaagttctcacttatttgtgcctccaaattggaaaagcctgcagaatgagagatgtggttggttacttttcgatagatctggtgacttttatagatccaagcaccttggaacaacaggtgtgggcaaccggccttaacctcgcatatagtgaccagctggccctgactcaactcaccttatacctgacaaacggccatctggattgcagtttgagcaccctggaagtgccccgctttgttccaaaggaaaggaagaaaaccaaatgcatgagtgcgctgtcaatgccgatgctggcaaccagtcgctatgcagtgatgaccacccagctaagacacagcaatctctcactggttttccactatgtttttctccagatctgtagggcccatggcattggctatgatgttgagaacaatcggcgaggatctccagggggtcctcatgacctttgctcgccatctcttcatcatccatcaagaaatatcagcacctaatatgcaaggcgagaccaattttaagaccaccattgctgatattgaaactattctaagagtaacaaaggaaaacaaaatgagatttgaagaggagcaacagtccaaagatgataaaaacctctctaaacccaagaaatgatcctggaatacagtacataacaatttggatcccagtctggaataaaaagggcaatttttttttctgttagaaataaaagccaggggaaattggtttgctttgtgtgctaggaggtgaatcagaacagattataatgaaatgctctttttaaaacattgtttattaagtgatcttattttatttattaaaccaaaacttatttgtgttttcatttgagagtgttgaacaatcccttcttcttctcaaactcagaaaaaagtaatctgataaaagaagaaagttaaaagtcttactgatatcacctccgcatttacttcctcataggcctcaggattatgtagcttttattttttatgttttataaagttttctcctatttctaatagtccatcgatcttctgcatttataggtttgaataaaggcttaagaattgctatttgtcaaaacacaaatgcctttttttcaaagcttcaaattatattgaaattatatttatatgaatttttaagtgactatcattcatcgtgtttttgttataccaagccactattgtctgctattgttgccatttttcaaaaagtaggataagccagcatctagttaaccaaagcatcagaatgtatctaggtggcagtatctgctcttagtttaagatggagtgtagctcgagctctgtagcttgaataaacatttgtattctctagttctccatttaatacagcagtaggattttttcaagtttagttcaacattatactacctttaaaaaggcagactgttaagattgtagtagtgctgactctaactttcagcattcacttcataattgtccaaaaatatttccacatcagtgagctttactgaagggtgaaataaaagcaaattacaacaccaaaaccattattgttttaaagaatgacctttatgtctataaaaatattttagtgtattggggaaaggaataggatttttacctgtggaatttcaataatttgttaactgtgattcagccacaggctaagagtttctgtaataaaattaacatttgtgtgtgtc

SEQ ID NO: 10036 - DNA, 1822 bp, Homo sapiens
  source 1..1822: mol_type = unassigned DNA
gtgcttggaaaccgcgcctccgcggaggtagccgttccctgacctagccatggcacagaacactgaaaaccacgaccctgtcggatccatcttaatccagatccatgaagacctttatcagttaaaggagaaattaacaaaattctcacctgaggaaaaaggagagactctagacattcagagtcttgaaacagcaatcaaaaggactgaagtggggttaagaggattttaagtatgatagaacgagggctgattccaccaacagcaaggattacctttcagaatccacccattacacccagagcagctcctctgcatagttttgatgaagcacgtaagattccaactgtagccactttcactatacctcgggaaccacctccatctccagcagaagtgaagttctttcccaagaaacaaagatcaaaggggaaaagcagaaggtcaagaggacatcatgataggaaggccatgaaagtcaaaacacctttgagagccctgaaatcactgtgggattatgactttttaatttatgatggtgtcatagacaatacagccccagacttcttagcattcaaggaacattttagcttagcttggggaggtattttttctctcttggaacacgtcgagaagtttctcaggaactatgctataccagaagtcaaaataaaagggaataatttggtggccctccttccagagtttgagctgacgaataaacttaccagatatgaccttctctcagtgttagaggacccagctcatgtccaaatgctgataaatcttccagggcaaaggtacaagggccaagatggaaattcggaggccgccatgaagatccaagccacatggaaatgctacaaagcaagaaaattcttcctcttttatcgccagcagaagtgggcatcaggtgtgattgccattgcttggctgttatattgccataagactcgactaaagaagatactaaaggaatcacgtcagagacacctggagaattttcgcattcgagccaagcatctggcagccaactggaatcgcatcaggacctccaggaggactattatccatatcccatcattaggtataacacttttgcctgcaaatctatcagcaacctctattacccaccacattatggctccttgattgagttcaaggaaggccccttgttttattcaaattggtctcggcaggaaaatgttctcgacatgatgagagtaataacacaggaccctcgcttgaaacggcgtttaatttggggattaagcaaataaagtcattatgtgggggctgctattcagtggagaggtgatttgctgtaattcgctttcatctgtatgaaatgaactaaaaagttgtatttttccccgaaataacagataatgttttcgatcttctttaatgatagaagaacacaggcttgtatgtgttgttgctgttacgccaataagccaggatattgcttgtacactgtttttaatcaaatgtgcagtcaaaatgataagctacattctctgaaattatttagttctaattacgagcagatgggatgctttatttgcacctagggcgcctgagcaaaaggaaatgctgtgtgaacaagaataattaagaagttgaatagtgttttttgcacttaaataatctgcagtttcatgttaattagcactaatgtaattatttaattacatttatgaattggggaacttaaaagctgttgtctgaaacacactggtaaaaaaggtatgccaaaatgacattgggaatttcagaaatttgcattggagtttcttttaagacatgagctactgtcaac

SEQ ID NO: 10037 - DNA, 7233 bp, Homo sapiens
  source 1..7233: mol_type = unassigned DNA
gacggcacggggcggggcctcggggaccccggcaagcccgcgcacttggcaggagctgtagctaccgccgtccgcgcctccaaggtttcacggcttcctcagcagagactcgggctcgtccgccatgtccgccgcagacgaggttgacgggctgggcgtggcccggccgcactatggctctgtcctggataatgaaagacttactgcagaggagatggatgaaaggagacgtcagaacgtggcttatgagtacctttgtcatttggaagaagcgaagaggtggatggaagcatgcctaggggaagatctgcctcccaccacagaactggaggaggggcttaggaatggggtctaccttgccaaactggggaacttcttctctcccaaagtagtgtccctgaaaaaaatctatgatcgagaacagaccagatacaaggcgactggcctccactttagacacactgataatgtgattcagtggttgaatgccatggatgagattggattgcctaagattttttacccagaaactacagatatctatgatcgaaagaacatgccaagatgtatctactgtatccatgcactcagtttgtacctgttcaagctaggcctggcccctcagattcaagacctatatggaaaggttgacttcacagaagaagaaatcaacaacatgaagactgagttggagaagtatggcatccagatgcctgcctttagcaagattgggggcatcttggctaatgaactgtcagtggatgaagccgcattacatgctgctgttattgctattaatgaagctattgaccgtagaattccagccgacacatttgcagctttgaaaaatccgaatgccatgcttgtaaatcttgaagagcccttggcatccacttaccaggatatactttaccaggctaagcaggacaaaatgacaaatgctaaaaacaggacagaaaactcagagagagaaagagatgtttatgaggagctgctcacgcaagctgaaattcaaggcaatataaacaaagtcaatacattttctgcattagcaaatatcgacctggctttagaacaaggagatgcactggccttgttcagggctctgcagtcaccagccctggggcttcgaggactgcagcaacagaatagcgactggtacttgaagcagctcctgagtgataaacagcagaagagacagagtggtcagactgaccccctgcagaaggaggagctgcagtctggagtggatgctgcaaacagtgctgcccagcaatatcagagaagattggcagcagtagcactgattaatgctgcaatccagaagggtgttgctgagaagactgttttggaactgatgaatcccgaagcccagctgccccaggtgtatccatttgccgccgatctctatcagaaggagctggctaccctgcagcgacaaagtcctgaacataatctcacccacccagagctctctgtcgcagtggagatgttgtcatcggtggccctgatcaacagggcattggaatcaggagatgtgaatacagtgtggaagcaattgagcagttcagttactggtcttaccaatattgaggaagaaaactgtcagaggtatctcgatgagttgatgaaactgaaggctcaggcacatgcagagaataatgaattcattacatggaatgatatccaagcttgcgtggaccatgtgaacctggtggtgcaagaggaacatgagaggattttagccattggtttaattaatgaagccctggatgaaggtgatgcccaaaagactctgcaggccctacagattcctgcagctaaacttgagggagtccttgcagaagtggcccagcattaccaagacacgctgattagagcgaagagagagaaagcccaggaaatccaggatgagtcagctgtgttatggttggatgaaattcaaggtggaatctggcagtccaacaaagacacccaagaagcacagaagtttgccttaggaatctttgccattaatgaggcagtagaaagtggtgatgttggcaaaacactgagtgcccttcgctcccctgatgttggcttgtatggagtcatccctgagtgtggtgaaacttaccacagtgatcttgctgaagccaagaagaaaaaactggcagtaggagataataacagcaagtgggtgaagcactgggtaaaaggtggatattattattaccacaatctggagacccaggaaggaggatgggatgaacctccaaattttgtgcaaaattctatgcagctttctcgggaggagatccagagttctatctctggggtgactgccgcatataaccgagaacagctgtggctggccaatgaaggcctgatcaccaggctgcaggctcgctgccgtggatacttagttcgacaggaattccgatccaggatgaatttcctgaagaaacaaatccctgccatcacctgcattcagtcacagtggagaggatacaagcagaagaaggcatatcaagatcggttagcttacctgcgctcccacaaagatgaagttgtaaagattcagtccctggcaaggatgcaccaagctcgaaagcgctatcgagatcgcctgcagtacttccgggaccatataaatgacattatcaaaatccaggcttttattcgggcaaacaaagctcgggatgactacaagactctcatcaatgctgaggatcctcctatggttgtggtccgaaaatttgtccacctgctggaccaaagtgaccaggattttcaggaggagcttgaccttatgaagatgcgggaagaggttatcaccctcattcgttctaaccagcagctggagaatgacctcaatctcatggatatcaaaattggactgctagtgaaaaataagattacgttgcaggatgtggtttcccacagtaaaaaacttaccaaaaaaaataaggaacagttgtctgatatgatgatgataaataaacagaagggaggtctcaaggctttgagcaaggagaagagagagaagttggaagcttaccagcacctgttttatttattgcaaaccaatcccacctatctggccaagctcatttttcagatgccccagaacaagtccaccaagttcatggactctgtaatcttcacactctacaactacgcgtccaaccagcgagaggagtacctgctcctgcggctctttaagacagcactccaagaggaaatcaagtcgaaggtagatcagattcaagagattgtgacaggaaatcctacggttattaaaatggttgtaagtttcaaccgtggtgcccgtggccagaatgccctgagacagatcttggccccagtcgtgaaggaaattatggatgacaaatctctcaacatcaaaactgaccctgtggatatttacaaatcttgggttaatcagatggagtctcagacaggagaggcaagcaaactgccctatgatgtgacccctgagcaggcgctagctcatgaagaagtgaagacacggctagacagctccatcaggaacatgcgggctgtgacagacaagtttctctcagccattgtcagctctgtggacaaaatcccttatgggatgcgcttcattgccaaagtgctgaaggactcgttgcatgagaagttccctgatgctggtgaggatgagctgctgaagattattggtaacttgctttattatcgatacatgaatccagccattgttgctcctgatgcctttgacatcattgacctgtcagcaggaggccagcttaccacagaccaacgccgaaatctgggctccattgcaaaaatgcttcagcatgctgcttccaataagatgtttctgggagataatgcccacttaagcatcattaatgaatatctttcccagtcctaccagaaattcagacggtttttccaaactgcttgtgatgtcccagagcttcaggataaatttaatgtggatgagtactctgatttagtaaccctcaccaaaccagtaatctacatttccattggtgaaatcatcaacacccacactctcctgttggatcaccaggatgccattgctccggagcacaatgatccaatccacgaactgctggacgacctcggcgaggtgcccaccatcgagtccctgataggggaaagctctggcaatttaaatgacccaaataaggaggcactggctaagacggaagtgtctctcaccctgaccaacaagttcgacgtgcctggagatgagaatgcagaaatggatgctcgaaccatcttactgaatacaaaacgtttaattgtggatgtcatccggttccagccaggagagaccttgactgaaatcctagaaacaccagccaccagtgaacaggaagcagaacatcagagagccatgcagagacgtgctatccgtgatgccaaaacacctgacaagatgaaaaagtcaaaatctgtaaaggaagacagcaacctcactcttcaagagaagaaagagaagatccagacaggtttaaagaagctaacagagcttggaaccgtggacccaaagaacaaataccaggaactgatcaacgacattgccagggatattcggaatcagcggaggtaccgacagaggagaaaggccgaactagtgaaactgcaacagacatacgctgctctgaactctaaggccaccttttatggggagcaggtggattactataaaagctatatcaaaacctgcttggataacttagccagcaagggcaaagtctccaaaaagcctagggaaatgaaaggaaagaaaagcaaaaagatttctctgaaatatacagcagcaagactacatgaaaaaggagttcttctggaaattgaggacctgcaagtgaatcagtttaaaaatgttatatttgaaatcagtccaacagaagaagttggagacttcgaagtgaaagccaaattcatgggagttcaaatggagacttttatgttacattatcaggacctgctgcagctacagtatgaaggagttgcagtcatgaaattatttgatagagctaaagtaaatgtcaacctcctgatcttccttctcaacaaaaagttctacgggaagtaattgatcgtttgctgccagcccagaaggatgaaggaaagaagcacctcacagctcctttctaggtccttctttcctcattggaagcaaagacctagccaacaacagcacctcaatctgatacactcccgatgccacatttttaactcctctcgctctgatgggacatttgttacccttttttcatagtgaaattgtgtttcaggcttagtctgacctttctggtttcttcattttcttccattacttaggaaagagtggaaactccactaaaatttctctgtgttgttacagtcttagaggttgcagtactatattgtaagctttggtgtttgtttaattagcaatagggatggtaggattcaaatgtgtgtcatttagaagtggaagctattagcaccaatgacataaatacatacaagacacacaactaaaatgtcatgttattaacagttattaggttgtcatttaaaaataaagttcctttatatttctgtcccatcaggaaaactgaaggatatggggaatcattggttatcttccattgtgtttttctttatggacaggagctaatggaagtgacagtcatgttcaaaggaagcatttctagaaaaaaggagataatgtttttaaatttcattatcaaacttgggcaattctgtttgtgtaactccccgactagtggatgggagagtcccattgctaaaattcagctactcagataaattcagaatgggtcaaggcacctgcctgtttttgttggtgcacagagattgacttgattcagagagacaattcactccatccctatggcagaggaatgggttagccctaatgtagaatgtcattgtttttaaaactgttttatatcttaagagtgccttattaaagtatagatgtatgtcttaaaatgtgggtgataggaattttaaagatttatataatgcatcaaaagccttagaataagaaaagctttttttaaattgctttatctgtatatctgaactcttgaaacttatagctaaaacactaggatttatctgcagtgttcagggagataattctgcctttaattgtctaaaacaaaaacaaaaccagccaacctatgttacacgtgagattaaaaccaattttttccccattttttctccttttttctcttgctgcccacattgtgcctttattttatgagccccagttttctgggcttagtttaaaaaaaaaatcaagtctaaacattgcatttagaaagcttttgttcttggataaaaagtcatacactttaaaaaaaaaaaaaactttttccaggaaaatatattgaaatcatgctgctgagcctctattttctttctttgatgttttgattcagtattcttttatcataaatttttagcatttaaaaattcactgatgtacattaagccaataaactgctttaatgaataacaaactatgtagtgtgtccctattataaatgcattggagaagtatttttatgagactctttactcaggtgcatggttacagcccacagggaggcatggagtgccatggaaggattcgccactacccagaccttgttttttgttgtattttggaagacaggttttttaaagaaacattttcctcagattaaaagatgatgctattacaactagcattgcctcaaaaactgggaccaaccaaagtgtgtcaaccctgtttccttaaaagaggctatgaatcccaaaggccacatccaagacaggcaataatgagcagagtttacagctcctttaataaaatgtgtcagtaattttaaggtttatagttccctcaacacaattgctaatgcagaatagtgtaaaatgcgcttcaagaatgttgatgatgatgatatagaattgtggctttagtagcacagaggatgccccaacaaactcatggcgttgaaaccacacagttctcattactgttatttattagctgtagcattctctgtctcctctctctcctcctttgaccttctcctcgaccagccatcatgacatttaccatgaatttacttcctcccaagagtttggactgcccgtcagattgttgctgcacatagttgcctttgtatctctgtatgaaataaaaggtcatttgttcatgtt

SEQ ID NO: 10038 - DNA, 5863 bp, Homo sapiens
  source 1..5863: mol_type = unassigned DNA
cggcaagcccgcgcacttggcaggagctgtagctaccgccgtccgcgcctccaaggtttcacggcttcctcagcagagactcgggctcgtccgccatgtccgccgcagacgaggttgacgggctgggcgtggcccggccgcactatggctctgtcctggataatgaaagacttactgcagaggagatggatgaaaggagacgtcagaacgtggcttatgagtacctttgtcatttggaagaagcgaagaggtggatggaagcatgcctaggggaagatctgcctcccaccacagaactggaggaggggcttaggaatggggtctaccttgccaaactggggaacttcttctctcccaaagtagtgtccctgaaaaaaatctatgatcgagaacagaccagatacaaggcgactggcctccactttagacacactgataatgtgattcagtggttgaatgccatggatgagattggattgcctaagattttttacccagaaactacagatatctatgatcgaaagaacatgccaagatgtatctactgtatccatgcactcagtttgtacctgttcaagctaggcctggcccctcagattcaagacctatatggaaaggttgacttcacagaagaagaaatcaacaacatgaagactgagttggagaagtatggcatccagatgcctgcctttagcaagattgggggcatcttggctaatgaactgtcagtggatgaagccgcattacatgctgctgttattgctattaatgaagctattgaccgtagaattccagccgacacatttgcagctttgaaaaatccgaatgccatgcttgtaaatcttgaagagcccttggcatccacttaccaggatatactttaccaggctaagcaggacaaaatgacaaatgctaaaaacaggacagaaaactcagagagagaaagagatgtttatgaggagctgctcacgcaagctgaaattcaaggcaatataaacaaagtcaatacattttctgcattagcaaatatcgacctggctttagaacaaggagatgcactggccttgttcagggctctgcagtcaccagccctggggcttcgaggactgcagcaacagaatagcgactggtacttgaagcagctcctgagtgataaacagcagaagagacagagtggtcagactgaccccctgcagaaggaggagctgcagtctggagtggatgctgcaaacagtgctgcccagcaatatcagagaagattggcagcagtagcactgattaatgctgcaatccagaagggtgttgctgagaagactgttttggaactgatgaatcccgaagcccagctgccccaggtgtatccatttgccgccgatctctatcagaaggagctggctaccctgcagcgacaaagtcctgaacataatctcacccacccagagctctctgtcgcagtggagatgttgtcatcggtggccctgatcaacagggcattggaatcaggagatgtgaatacagtgtggaagcaattgagcagttcagttactggtcttaccaatattgaggaagaaaactgtcagaggtatctcgatgagttgatgaaactgaaggctcaggcacatgcagagaataatgaattcattacatggaatgatatccaagcttgcgtggaccatgtgaacctggtggtgcaagaggaacatgagaggattttagccattggtttaattaatgaagccctggatgaaggtgatgcccaaaagactctgcaggccctacagattcctgcagctaaacttgagggagtccttgcagaagtggcccagcattaccaagacacgctgattagagcgaagagagagaaagcccaggaaatccaggatgagtcagctgtgttatggttggatgaaattcaaggtggaatctggcagtccaacaaagacacccaagaagcacagaagtttgccttaggaatctttgccattaatgaggcagtagaaagtggtgatgttggcaaaacactgagtgcccttcgctcccctgatgttggcttgtatggagtcatccctgagtgtggtgaaacttaccacagtgatcttgctgaagccaagaagaaaaaactggcagtaggagataataacagcaagtgggtgaagcactgggtaaaaggtggatattattattaccacaatctggagacccaggaaggaggatgggatgaacctccaaattttgtgcaaaattctatgcagctttctcgggaggagatccagagttctatctctggggtgactgccgcatataaccgagaacagctgtggctggccaatgaaggcctgatcaccaggctgcaggctcgctgccgtggatacttagttcgacaggaattccgatccaggatgaatttcctgaagaaacaaatccctgccatcacctgcattcagtcacagtggagaggatacaagcagaagaaggcatatcaagatcggttagcttacctgcgctcccacaaagatgaagttgtaaagattcagtccctggcaaggatgcaccaagctcgaaagcgctatcgagatcgcctgcagtacttccgggaccatataaatgacattatcaaaatccaggcttttattcgggcaaacaaagctcgggatgactacaagactctcatcaatgctgaggatcctcctatggttgtggtccgaaaatttgtccacctgctggaccaaagtgaccaggattttcaggaggagcttgaccttatgaagatgcgggaagaggttatcaccctcattcgttctaaccagcagctggagaatgacctcaatctcatggatatcaaaattggactgctagtgaaaaataagattacgttgcaggatgtggtttcccacagtaaaaaacttaccaaaaaaaataaggaacagttgtctgatatgatgatgataaataaacagaagggaggtctcaaggctttgagcaaggagaagagagagaagttggaagcttaccagcacctgttttatttattgcaaaccaatcccacctatctggccaagctcatttttcagatgccccagaacaagtccaccaagttcatggactctgtaatcttcacactctacaactacgcgtccaaccagcgagaggagtacctgctcctgcggctctttaagacagcactccaagaggaaatcaagtcgaaggtagatcagattcaagagattgtgacaggaaatcctacggttattaaaatggttgtaagtttcaaccgtggtgcccgtggccagaatgccctgagacagatcttggccccagtcgtgaaggaaattatggatgacaaatctctcaacatcaaaactgaccctgtggatatttacaaatcttgggttaatcagatggagtctcagacaggagaggcaagcaaactgccctatgatgtgacccctgagcaggcgctagctcatgaagaagtgaagacacggctagacagctccatcaggaacatgcgggctgtgacagacaagtttctctcagccattgtcagctctgtggacaaaatcccttatgggatgcgcttcattgccaaagtgctgaaggactcgttgcatgagaagttccctgatgctggtgaggatgagctgctgaagttctgtgctttcctacagtgaggcctcgattctagactttctgttcagattattggtaacttgctttattatcgatacatgaatccagccattgttgctcctgatgcctttgacatcattgacctgtcagcaggaggccagcttaccacagaccaacgccgaaatctgggctccattgcaaaaatgcttcagcatgctgcttccaataagatgtttctgggagataatgcccacttaagcatcattaatgaatatctttcccagtcctaccagaaattcagacggtttttccaaactgcttgtgatgtcccagagcttcaggataaatttaatgtggatgagtactctgatttagtaaccctcaccaaaccagtaatctacatttccattggtgaaatcatcaacacccacactctcctgttggatcaccaggatgccattgctccggagcacaatgatccaatccacgaactgctggacgacctcggcgaggtgcccaccatcgagtccctgataggggaaagctctggcaatttaaatgacccaaataaggaggcactggctaagacggaagtgtctctcaccctgaccaacaagttcgacgtgcctggagatgagaatgcagaaatggatgctcgaaccatcttactgaatacaaaacgtttaattgtggatgtcatccggttccagccaggagagaccttgactgaaatcctagaaacaccagccaccagtgaacaggaagcagaacatcagagagccatgcagagacgtgctatccgtgatgccaaaacacctgacaagatgaaaaagtcaaaatctgtaaaggaagacagcaacctcactcttcaagagaagaaagagaagatccagacaggtttaaagaagctaacagagcttggaaccgtggacccaaagaacaaataccaggaactgatcaacgacattgccagggatattcggaatcagcggaggtaccgacagaggagaaaggccgaactagtgaaactgcaacagacatacgctgctctgaactctaaggccaccttttatggggagcaggtggattactataaaagctatatcaaaacctgcttggataacttagccagcaagggcaaagtctccaaaaagcctagggaaatgaaaggaaagaaaagcaaaaagatttctctgaaatatacagcagcaagactacatgaaaaaggagttcttctggaaattgaggacctgcaagtgaatcagtttaaaaatgttatatttgaaatcagtccaacagaagaagttggagacttcgaagtgaaagccaaattcatgggagttcaaatggagacttttatgttacattatcaggacctgctgcagctacagtatgaaggagttgcagtcatgaaattatttgatagagctaaagtaaatgtcaacctcctgatcttccttctcaacaaaaagttctacgggaagtaattgatcgtttgctgccagcccagaaggatgaaggaaagaagcacctcacagctcctttctaggtccttctttcctcattggaagcaaagacctagccaacaacagcacctcaatctgatacactcccgatgccacatttttaactcctctcgctctgatgggacatttgttacccttttttcatagtgaaattgtgtttcaggcttagtctgacctttctggtttcttcattttcttccattacttaggaaagagtggaaactccactaaaatttctctgtgttgttacagtcttagaggttgcagtactatattgtaagctttggtgtttgtttaattagcaatagggatggtaggattcaaatgtgtgtcatttagaagtggaagctattagcaccaatgacataaatacatacaagacacacaactaaaatgtcatgttattaacagttattaggttgtcatttaaaaataaagttcctttatatttctgtcccatcaggaaaactgaaggatatggggaatcattggttatcttccattgtgtttttctttatggacaggagctaatggaagtgacagtcatgttcaaaggaagcatttctagaaaaaaggagataatgtttttaaatttcattatcaaacttgggcaattctgtttgtgtaactccccgactagtggatgggagagtcccattgctaaaattcagctactcagataaattcagaatgggtcaaggcacctg

SEQ ID NO: 10039 - DNA, 3602 bp, Homo sapiens
  source 1..3602: mol_type = unassigned DNA
acttggcaggagctgtagctaccgccgtccgcgcctccaaggtttcacggcttcctcagcagagactcgggctcgtccgccatgtccgccgcagacgaggttgacgggctgggcgtggcccggccgcactatggctctgtcctggataatgaaagacttactgcagaggagatggatgaaaggagacgtggaatctggcagtccaacaaagacacccaagaagcacagaagtttgccttaggaatctttgccattaatgaggcagtagaaagtggtgatgttggcaaaacactgagtgcccttcgctcccctgatgttggcttgtatggagtcatccctgagtgtggtgaaacttaccacagtgatcttgctgaagccaagaagaaaaaactggcagtaggagataataacagcaagtgggtgaagcactgggtaaaaggtggatattattattaccacaatctggagacccaggaaggaggatgggatgaacctccaaattttgtgcaaaattctatgcagctttctcgggaggagatccagagttctatctctggggtgactgccgcatataaccgagaacagctgtggctggccaatgaaggcctgatcaccaggctgcaggctcgctgccgtggatacttagttcgacaggaattccgatccaggatgaatttcctgaagaaacaaatccctgccatcacctgcattcagtcacagtggagaggatacaagcagaagaaggcatatcaagatcggttagcttacctgcgctcccacaaagatgaagttgtaaagattcagtccctggcaaggatgcaccaagctcgaaagcgctatcgagatcgcctgcagtacttccgggaccatataaatgacattatcaaaatccaggcttttattcgggcaaacaaagctcgggatgactacaagactctcatcaatgctgaggatcctcctatggttgtggtccgaaaatttgtccacctgctggaccaaagtgaccaggattttcaggaggagcttgaccttatgaagatgcgggaagaggttatcaccctcattcgttctaaccagcagctggagaatgacctcaatctcatggatatcaaaattggactgctagtgaaaaataagattacgttgcaggatgtggtttcccacagtaaaaaacttaccaaaaaaaataaggaacagttgtctgatatgatgatgataaataaacagaagggaggtctcaaggctttgagcaaggagaagagagagaagttggaagcttaccagcacctgttttatttattgcaaaccaatcccacctatctggccaagctcatttttcagatgccccagaacaagtccaccaagttcatggactctgtaatcttcacactctacaactacgcgtccaaccagcgagaggagtacctgctcctgcggctctttaagacagcactccaagaggaaatcaagtcgaaggtagatcagattcaagagattgtgacaggaaatcctacggttattaaaatggttgtaagtttcaaccgtggtgcccgtggccagaatgccctgagacagatcttggccccagtcgtgaaggaaattatggatgacaaatctctcaacatcaaaactgaccctgtggatatttacaaatcttgggttaatcagatggagtctcagacaggagaggcaagcaaactgccctatgatgtgacccctgagcaggcgctagctcatgaagaagtgaagacacggctagacagctccatcaggaacatgcgggctgtgacagacaagtttctctcagccattgtcagctctgtggacaaaatcccttatgggatgcgcttcattgccaaagtgctgaaggactcgttgcatgagaagttccctgatgctggtgaggatgagctgctgaagattattggtaacttgctttattatcgatacatgaatccagccattgttgctcctgatgcctttgacatcattgacctgtcagcaggaggccagcttaccacagaccaacgccgaaatctgggctccattgcaaaaatgcttcagcatgctgcttccaataagatgtttctgggagataatgcccacttaagcatcattaatgaatatctttcccagtcctaccagaaattcagacggtttttccaaactgcttgtgatgtcccagagcttcaggataaatttaatgtggatgagtactctgatttagtaaccctcaccaaaccagtaatctacatttccattggtgaaatcatcaacacccacactctcctgttggatcaccaggatgccattgctccggagcacaatgatccaatccacgaactgctggacgacctcggcgaggtgcccaccatcgagtccctgataggggaaagctctggcaatttaaatgacccaaataaggaggcactggctaagacggaagtgtctctcaccctgaccaacaagttcgacgtgcctggagatgagaatgcagaaatggatgctcgaaccatcttactgaatacaaaacgtttaattgtggatgtcatccggttccagccaggagagaccttgactgaaatcctagaaacaccagccaccagtgaacaggaagcagaacatcagagagccatgcagagacgtgctatccgtgatgccaaaacacctgacaagatgaaaaagtcaaaatctgtaaaggaagacagcaacctcactcttcaagagaagaaagagaagatccagacaggtttaaagaagctaacagagcttggaaccgtggacccaaagaacaaataccaggaactgatcaacgacattgccagggatattcggaatcagcggaggtaccgacagaggagaaaggccgaactagtgaaactgcaacagacatacgctgctctgaactctaaggccaccttttatggggagcaggtggattactataaaagctatatcaaaacctgcttggataacttagccagcaagggcaaagtctccaaaaagcctagggaaatgaaaggaaagaaaagcaaaaagatttctctgaaatatacagcagcaagactacatgaaaaaggagttcttctggaaattgaggacctgcaagtgaatcagtttaaaaatgttatatttgaaatcagtccaacagaagaagttggagacttcgaagtgaaagccaaattcatgggagttcaaatggagacttttatgttacattatcaggacctgctgcagctacagtatgaaggagttgcagtcatgaaattatttgatagagctaaagtaaatgtcaacctcctgatcttccttctcaacaaaaagttctacgggaagtaattgatcgtttgctgccagcccagaaggatgaaggaaagaagcacctcacagctcctttctaggtccttctttcctcattggaagcaaagacctagccaacaacagcacctcaatctgatacactcccgatgccacatttttaactcctctcgctctgatgggacatttgttacccttttttcatagtgaaattgtgtttcaggcttagtctgacctttctggtttcttcattttcttccattacttaggaaagagtggaaact

SEQ ID NO: 10040 - DNA, 559 bp, Homo sapiens
  source 1..559: mol_type = unassigned DNA
agctaccgccgtccgcgcctccaaggtttcacggcttcctcagcagagactcgggctcgtccgccatgtccgccgcagacgaggttgacgggctgggcgtggcccggccgcactatggctgtggatggaagcatgcctaggggaagatctgcctcccaccacagaactggaggaggggcttaggaatggggtctaccttgccaaactggggaacttcttctctcccaaagtagtgtccctgaaaaaaatctatgatcgagaacagaccagatacaaggcgactggcctccactttagacacactgataatgtgattcagtggttgaatgccatggatgagattggattgcctaagagaaagttctgaagttctcttccttgccactgattttttacccagaaactacagatatctatgatcgaaagaacatgccaagatgtatctactgtatccatgcactcagtttgtacctgttcaagctaggcctggcccctcagattcaagacctatatggaaaggttgacttcacagaagaagaaatcaacaacatgaagactg

SEQ ID NO: 10041 - DNA, 1201 bp, Homo sapiens
  source 1..1201: mol_type = unassigned DNA
acgaggttgacgggctgggcgtggcccggccgcactatggctctgtcctggataatgaaagacttactgcagaggagatggatgaaaggagacgtcagaacgtggcttatgagtacctttgtcatttggaagaagcgaagaggtaaagattggctggctggagagaagattaagagaagggaactgataatagtgtgaatacaaataaagattgctttgaggctgaacacagtggtccatgcctgtaatcccaacacgttgggaggccgaggtgggggggaatcacttgaacccagctgtttgagaccagattgggcaacatagtgacaccccatctctacaaaaaaattttaaaaattagccaggcatggtggtgcatgccagtagtcctagctactcgggagcctgaggagggaggatcacttgagtccgggaggtcgaggcagcagtgagccgtgctctcaccactgtgctctagcctgggtgacaaaactcctgtttttggtggggggaaaaaaaagaaaagatttatttgagtatgttatagatgtaactgggaagctggtggttgagggaataagtataggtagggtatttatttatggcaataagtagccttgatgagagtttatcatgaatcactgtgatgggcatttaagtgtactgaacggttttccaggtttctattgttcagtcttatgcttattgtgcatgttttgggcgttaccaactgtggggtggaaatagcatttttaggatttgaagttattggctttaatgtttcacttatgcttcatgaattttgatttatatatgaattgagtctcctcctcctatgacctgcggagtggctgcttggtttgggaggcttagaagcgtggtgctgttggtgtaggtccatctgtttggcaatattcagagtcagcatcctctgcattctttgtgaagtgaatgtaaagctgctcttttcctttttcagatgccccacaaccttgtggtcttaattttagagtgtcattttgttatcagtgattcatttcttttgttctggtgcttgtgttcttttgcagagtcccagggtagatgtaattatagatcatgtattctataagtgagctttggtggaaaagtcaagtgagggataatgaaatatttgtaattaacgtttaataaaaagggtgtttgaagtggtgctaataaa

SEQ ID NO: 10042 - DNA, 376 bp, Homo sapiens
  source 1..376: mol_type = unassigned DNA
agaactggaggaggggcttaggaatggggtctaccttgccaaactggggaacttcttctctcccaaagtagtgtccctgaaaaaaatctatgatcgagaacagaccagatacaaggcgactggcctccactttagacacactgataatgtgattcagtggttgaatgccatggatgagattggattgcctaaggtaacttacctgagataatagtttaggctttgttccagctgttgtggcataaccctcaaacaacctgttctcattctacctgtaaaattattctcagaatctttggtgtttttttaaatactaaaagatgtctttctttttgacttaggaaatagttttgttctttttcttttataatcctca

SEQ ID NO: 10043 - DNA, 350 bp, Homo sapiens
  source 1..350: mol_type = unassigned DNA
gtaaaaggtggatattattattaccacaatctggagacccaggaaggaggatgggatgaacctccaaattttgtgcaaaattctatgcagctttctcgggaggagatccagagttctatctctggggtgactgccgcatataaccgagaacagctgtggctggccaatgaaggcctgatcaccaggctgcaggctcgctgccgtggatacttagttcgacaggaattccgatccaggatgaatttcctgaagaaacaaatccctgccatcacctgcattcaggtatttcagaacctatcacacagacagcaagcgggcatctagagcaggggtaataaacggtcagctgt

SEQ ID NO: 10044 - DNA, 596 bp, Homo sapiens
  source 1..596: mol_type = unassigned DNA
tggagggatggcccgtgcccttgttcccctgtcactgctggaagtggtccttcctaaaacttcatcatgaaattgcacttggatcatgtatcaagatgaaagtttttttttaacttccattgatgcttgggaagtaatatgtcttctgtaacatttgactgtttcagtcacagtggagaggatacaagcagaagaaggcatatcaagatcggttagcttacctgcgctcccacaaagatgaagttgtaaaggtatggtagcctgaacagggtttctccatgaggggcacaggtataacacgtgttgagatgaaggactcttctaatttccaggatcccttttccacagattcagtccctggcaaggatgcaccaagctcgaaagcgctatcgagatcgcctgcagtacttccgggaccatataaatgacattatcaaaatccaggcttttattcgggcaaacaaagctcgggatgactacaagactctcagtgagtaactggctccgcatgaagagttgaggcagtggctgggagccaccaagttcagggtattctccacagacctcttttgttatcctgaaggcaaggcttgggg

SEQ ID NO: 10045 - DNA, 565 bp, Homo sapiens
  source 1..565: mol_type = unassigned DNA
taacatagcaatagcctgacacagaagactgcacctgatagttgtcttagcacatctcaaaattaaatgtttatgaatagactactttttcaagacaatgctatttcctgagacgtagtactttttctgctaactccattctttgatgcatactttctgtcagtcaatgctgaggatcctcctatggttgtggtccgaaaatttgtccacctgctggaccaaagtgaccaggattttcaggaggagcttgaccttatgaagatgcgggaagaggttatcaccctcattcgttctaaccagcagctggagaatgacctcaatctcatggatatcaaaattggactgctagtgaaaaataagattacgttgcaggatgtggtttcccacagtaaaaaacttaccaaaaaaaataaggaacagttgtctgatatgatgatgataaataaacagaagggaggtctcaaggctttgagcaaggagaagagagagaagttggaagcttaccagcacctgttttatttattgcaaaccaatcccacctatctggccaagctcatttttcaga

SEQ ID NO: 10046 - DNA, 440 bp, Homo sapiens
  source 1..440: mol_type = unassigned DNA
gtcaatgctgaggatcctcctatggttgtggtccgaaaatttgtccacctgctggaccaaagtgaccaggattttcaggaggagcttgaccttatgaagatgcgggaagaggttatcaccctcattcgttctaaccagcagctggagaatgacctcaatctcatggatatcaaaattggactgctagtgaaaaataagattacgttgcaggtatggcccagtgccagcgggggccttggaacggttcatcctgctttgtaacccctgcattcccctttctgactggtggggagggtggaggctgactttctcctcagctactgccataagagctttttttttttcttttgactgagtctcactctgttgcccaggttgcagtgagccaagattgcatgactgcactccggactgggtgacagagtgaaactctatctcca

SEQ ID NO: 10047 - DNA, 544 bp, Homo sapiens
  source 1..544: mol_type = unassigned DNA
gtgtgtatatgtgcatgcatgcgtgtgtatatgtattttttatttattttttcctcataggactgcattttctgcttttctttgctagcaaagtcatttatagcttccttggtggtatgtcttttaatacccatctttctgtttcgtctgttccagattattggtaacttgctttattatcgatacatgaatccagccattgttgctcctgatgcctttgacatcattgacctgtcagcaggaggccagcttaccacagaccaacgccgaaatctgggctccattgcaaaaatgcttcagcatgctgcttccaataagatgtttctgggagataatgcccacttaagcatcattaatgaatatctttcccagtcctaccagaaattcagacggtttttccaaactgcttgtgatgtcccagagcttcaggataaatttaatgtggatgagtactctgatttagtaaccctcaccaaaccagtaatctacatttccattggtgaaatcatcaacacccacactctcctgttggatcaccaggatg

SEQ ID NO: 10048 - DNA, 637 bp, Homo sapiens
  source 1..637: mol_type = unassigned DNA
gtcccagagcttcaggataaatttaatgtggatgagtactctgatttagtaaccctcaccaaaccagtaatctacatttccattggtgaaatcatcaacacccacactctcctgttggatcaccaggatgccattgctccggagcacaatgatccaatccacgaactgctggacgacctcggcgaggtgcccaccatcgagtccctgataggtagagttctaacttttgcctggaagatcaaaagggaatgtgacagaaaagtgttgtaattgtcacctcctctattttttgcactataccaaactctggatatacattgagaaataaaatagatgtgatcctgatagtttcataagagagaaaacaacaacaacaacaaaagcccagatgtgatcaatatctataaggaactggagtcagaggaaaagatcattttaaacgcagatacatactgccagcttgtgtttttttaaaaaaattgcagatacataaattaaaagtcctctaaaggaaagaatttttttgtttgtttgttatgagacagggtctccctctgttgcccaggctgaagtacagtggtgcagtcatagctcactgcagcctcaaattcctaggctcaagtgatcctcctgagtt

SEQ ID NO: 10049 - DNA, 601 bp, Homo sapiens
  source 1..601: mol_type = unassigned DNA
cgacctcggcgaggtgcccaccatcgagtccctgataggggaaagctctggcaatttaaatgacccaaataaggaggcactggctaagacggaagtgtctctcaccctgaccaacaagttcgacgtgcctggagatgagaatgcagaaatggatgctcgaaccatcttactgaatacaaaacgtttaattgtggatgtcatccggttccagccaggagagaccttgactgaaatcctagaaacaccagccaccagtgaacaggaagcagaacatcagagagccatgcagagacgtgctatccgtgatgccaaaacacctgacaagatgaaaaagtcaaaatctgtaaaggaagacagcaacctcactcttcaagagaagaaagagaagatccagacaggtttaaagaagctaacagagcttggaaccgtggacccaaagaacaaataccaggaactgatcaacgacattgccagggtactgcattcgggggacagaggggacccggccttgttcaaagctgagaggctcgagagacagtagctgttcacataacagcatagcttcagttcatgggcaaattagtgccctcctctatgagaa

SEQ ID NO: 10050 - DNA, 720 bp, Homo sapiens
  source 1..720: mol_type = unassigned DNA
ttctcaaacatttatggagttattatggatcccttgcctttatcatttggcataacattttatttctcagtaaaagttgttctcgtcacactgtatgtgttaggtgattcaagtattatcttagacttgcatcatcttatatttgtattatttccccccaatatctcctctctttattacgctgactctttccaccctcccaaaacttcaggggaaagctctggcaatttaaatgacccaaataaggaggcactggctaagacggaagtgtctctcaccctgaccaacaagttcgacgtgcctggagatgagaatgcagaaatggatgctcgaaccatcttactgaatacaaaacgtttaattgtggatgtcatccggttccagccaggagagaccttgactgaaatcctagaaacaccagccaccagtgaacaggaagcagaacatcagagagccatgcagagacgtgctatccgtgatgccaaaacacctgacaagatgaaaaagtcaaaatctgtaaaggaagacagcaacctcactcttcaagagaagaaagagaagatccagacaggtttaaagaagctaacagagcttggaaccgtggacccaaagaacaaataccaggaactgatcaacgacattgccagggatattcggaatcagcggaggtaccgacagaggagaaaggccgaactagtgaaactgcaacagacatacgct

SEQ ID NO: 10051 - DNA, 583 bp, Homo sapiens
  source 1..583: mol_type = unassigned DNA
atttgtattatttccccccaatatctcctctctttattacgctgactctttccaccctcccaaaacttcaggggaaagctctggcaatttaaatgacccaaataaggaggcactggctaagacggaagtgtctctcaccctgaccaacaagttcgacgtgcctggagatgagaatgcagaaatggatgctcgaaccatcttactgaatacaaaacgtttaattgtggatgtcatccggttccagccaggagagaccttgactgaaatcctagaaacaccagccaccagtgaacaggaagcagaacatcagagagccatgcagagacgtgctatccgtgatgccaaaacacctgacaagatgaaaaagtcaaaatctgtaaaggaagacagcaacctcactcttcaagagaagaaagagaagatccagacaggtttaaagaagctaacagagcttggaaccgtggacccaaagaacaaataccaggaactgatcaacgacattgccagggtactgcattcgggggacagaggggacccggccttgttcaaagctgagaggctcgagagacagtagctgttcaca

SEQ ID NO: 10052 - DNA, 550 bp, Homo sapiens
  source 1..550: mol_type = unassigned DNA
taaatgcctcccccatctcgtttcagtacaaaacgtttaattgtggatgtcatccggttccagccaggagagaccttgactgaaatcctagaaacaccagccaccagtgaacaggaagcagaacatcagagagccatgcagagacgtgctatccgtgatgccaaaacacctgacaagatgaaaaagtcaaaatctgtaaaggaagacagcaacctcactcttcaagagaagaaagagaagatccagacaggtttaaagaagctaacagagcttggaaccgtggacccaaagaacaaataccaggaactgatcaacgacattgccagggatattcggaatcagcggaggtaccgacagaggagaaaggccgaactagtgaaactgcaacagacatacgctgctctgaactctaaggccaccttttatggggagcaggtggattactataaaagctatatcaaaacctgcttggataacttagccagcaagggcaaagtctccaaaaagcctagggaaatgaaaggaaagaaaagcaaaaagatttctctga

SEQ ID NO: 10053 - DNA, 2313 bp, Homo sapiens
  source 1..2313: mol_type = unassigned DNA
ttaatgctgcatattattccattatgcagatagatataacagttgacttcagcagttctccattgatggacatttaagttgtttccagttgtttgttattattttttaaattctgcagcaaataacctcttgtacatatgtcattttgcaaatgtgggcatatttctgaagttagcacttcttgccttgattatcctaatagcctcctaacctgtttctttttccttattttcattcatctgtaattgctgtgctggcttaaacgcttttaaaaagtatttgatgacattttaattttttccctacacagctgaggggcgtagagtaactccttcactcctgggattcagtaccattccctcagctggcatacgaagctctcctagttacttgttaggtacttaagttcccagaaggacatgggaggattaagacactgttaaattcatgggagtgttctcaaatataatttaaactaaaaatagaagcaatttagtaatatttcccctgttttgcagagatattgcttaggctaattctaacatttgtttgccattttagagttggtatgttacttatgcttatgtctggaagtttggtttctgacatgtttccttcagttaccaatgatgaagattcagagtagatggttacttatagaaagtgacatgatgtgatttttacagagtctccaaaaagcctagggaaatgaaaggaaagaaaagcaaaaagatttctctgaaatatacagcagcaagactacatgaaaaaggagttcttctggaaattgaggacctgcaagtgaatcagtttaaaaatgttatatttgaaatcagtccaacagaagaagttggagacttcgaagtgaaagccaaattcatgggagttcaaatggagacttttatgttacattatcaggacctgctgcagctacagtatgaaggagttgcagtcatgaaattatttgatagagctaaagtaaatgtcaacctcctgatcttccttctcaacaaaaagttctacgggaagtaattgatcgtttgctgccagcccagaaggatgaaggaaagaagcacctcacagctcctttctaggtccttctttcctcattggaagcaaagacctagccaacaacagcacctcaatctgatacactcccgatgccacatttttaactcctctcgctctgatgggacatttgttacccttttttcatagtgaaattgtgtttcaggcttagtctgacctttctggtttcttcattttcttccattacttaggaaagagtggaaactccactaaaatttctctgtgttgttacagtcttagaggttgcagtactatattgtaagctttggtgtttgtttaattagcaatagggatggtaggattcaaatgtgtgtcatttagaagtggaagctattagcaccaatgacataaatacatacaagacacacaactaaaatgtcatgttattaacagttattaggttgtcatttaaaaataaagttcctttatatttctgtcccatcaggaaaactgaaggatatggggaatcattggttatcttccattgtgtttttctttatggacaggagctaatggaagtgacagtcatgttcaaaggaagcatttctagaaaaaaggagataatgtttttaaatttcattatcaaacttgggcaattctgtttgtgtaactccccgactagtggatgggagagtcccattgctaaaattcagctactcagataaattcagaatgggtcaaggcacctgcctgtttttgttggtgcacagagattgacttgattcagagagacaattcactccatccctatggcagaggaatgggttagccctaatgtagaatgtcattgtttttaaaactgttttatatcttaagagtgccttattaaagtatagatgtatgtcttaaaatgtgggtgataggaattttaaagatttatataatgcatcaaaagccttagaataagaaaagctttttttaaattgctttatctgtatatctgaactcttgaaacttatagctaaaacactaggatttatctgcagtgttcagggagataattctgcctttaattgtctaaaacaaaaacaaaaccagccaacctatgttacacgtgagattaaaaccaattttttccccattttttctccttttttctcttgctgcccacattgtgcctttattttatgagccccagttttctgggcttagtttaaaaaaaaaatcaagtctaaacattgcatttagaaagcttttgttcttggataaaaagtcatacacttt

SEQ ID NO: 10054 - DNA, 2871 bp, Homo sapiens
  source 1..2871: mol_type = unassigned DNA
ttatctttggtaatactgagtgtgcttatatacacagcacctactctttctagaaaacctcctcccttggtgctttttatacggacccccttttgtttatttacttctcccagtcctcaaacatgcatgtattcaaacacatacaccctctccttccccagtgtcctccgttttctccttttatcattaggtttcctttttggccatgtggaagtgaagagaattcctatgatgtcatcccttcacacgccacttgtggaactcctcagtggttcctctttgataggatgtaagtgctgcaggcagagagaggttgccattcctctctccaagtcccagagcagatggtacttgggcttggcaatctgtgctgcttcagctgcagaagtacttttgacctgtattttctgcagcccttttcactcttgaagacttggttcatctcctttccccatttcacagaatatttttatatgagaatataaaaaccatacccttacgatgttatctttcaacaggtttaaaaatgttatatttgaaatcagtccaacagaagaagttggagacttcgaagtgaaagccaaattcatgggagttcaaatggagacttttatgttacattatcaggacctgctgcagctacagtatgaaggagttgcagtcatgaaattatttgatagagctaaagtaaatgtcaacctcctgatcttccttctcaacaaaaagttctacgggaagtaattgatcgtttgctgccagcccagaaggatgaaggaaagaagcacctcacagctcctttctaggtccttctttcctcattggaagcaaagacctagccaacaacagcacctcaatctgatacactcccgatgccacatttttaactcctctcgctctgatgggacatttgttacccttttttcatagtgaaattgtgtttcaggcttagtctgacctttctggtttcttcattttcttccattacttaggaaagagtggaaactccactaaaatttctctgtgttgttacagtcttagaggttgcagtactatattgtaagctttggtgtttgtttaattagcaatagggatggtaggattcaaatgtgtgtcatttagaagtggaagctattagcaccaatgacataaatacatacaagacacacaactaaaatgtcatgttattaacagttattaggttgtcatttaaaaataaagttcctttatatttctgtcccatcaggaaaactgaaggatatggggaatcattggttatcttccattgtgtttttctttatggacaggagctaatggaagtgacagtcatgttcaaaggaagcatttctagaaaaaaggagataatgtttttaaatttcattatcaaacttgggcaattctgtttgtgtaactccccgactagtggatgggagagtcccattgctaaaattcagctactcagataaattcagaatgggtcaaggcacctgcctgtttttgttggtgcacagagattgacttgattcagagagacaattcactccatccctatggcagaggaatgggttagccctaatgtagaatgtcattgtttttaaaactgttttatatcttaagagtgccttattaaagtatagatgtatgtcttaaaatgtgggtgataggaattttaaagatttatataatgcatcaaaagccttagaataagaaaagctttttttaaattgctttatctgtatatctgaactcttgaaacttatagctaaaacactaggatttatctgcagtgttcagggagataattctgcctttaattgtctaaaacaaaaacaaaaccagccaacctatgttacacgtgagattaaaaccaattttttccccattttttctccttttttctcttgctgcccacattgtgcctttattttatgagccccagttttctgggcttagtttaaaaaaaaaatcaagtctaaacattgcatttagaaagcttttgttcttggataaaaagtcatacactttaaaaaaaaaaaaaactttttccaggaaaatatattgaaatcatgctgctgagcctctattttctttctttgatgttttgattcagtattcttttatcataaatttttagcatttaaaaattcactgatgtacattaagccaataaactgctttaatgaataacaaactatgtagtgtgtccctattataaatgcattggagaagtatttttatgagactctttactcaggtgcatggttacagcccacagggaggcatggagtgccatggaaggattcgccactacccagaccttgttttttgttgtattttggaagacaggttttttaaagaaacattttcctcagattaaaagatgatgctattacaactagcattgcctcaaaaactgggaccaaccaaagtgtgtcaaccctgtttccttaaaagaggctatgaatcccaaaggccacatccaagacaggcaataatgagcagagtttacagctcctttaataaaatgtgtcagtaattttaaggtttatagttccctcaacacaattgctaatgcagaatagtgtaaaatgcgcttcaagaatgttgatgatgatgatatagaattgtggctttagtagcacagaggatgccccaacaaactcatggcgttgaaaccacacagttctcattactgttatttattagctgtagcattctctgtctcctctctctcctcctttgaccttctcctcgaccagccatcatgacatttaccatgaatttacttcctcccaagagtttggactgcccgtcagattgttgctgcacatagttgcctttgtatctctgtatgaaataaaaggtcatttgttc

SEQ ID NO: 10055 - DNA, 5279 bp, Homo sapiens
  source 1..5279: mol_type = unassigned DNA
gcgggcttggctggcctggggctcggacttggggccggagccgcgggagccggcggacgctggaccaggagccccgacgtgatcgcgtggcgggtggtcgggtctccgggtggccgggtgtcggccccgggatccggcggctcgctggcgggagtcggcggcctctgctgggcctgggtcccggctcccggcccggcccgctcccactgcggccgccatgtggtgcctgcactgcaactcggagaggacccagtcccttctggagctagagcttgacagcggcgtcgagggcgaggcccccagcagtgagactggcacatccctggacagcccctcagcctacccccagggccccttggtgcccggttccagcctgagcccggatcactacgagcacacgtcagtgggagcctatgggctgtactcggggccgccggggcaacagcagcgcacgcggaggcccaagctgcagcactcgacctccatcctgcgcaagcaggctgaggaggaggccatcaagcgctcacgctcactctccgagagctatgagctctcctcggacctgcaggacaagcaggtggagatgctagaacgaaagtatggggggcgcctggtaacccgccatgcggcccgcaccatccagacggcgtttcgccagtaccagatgaacaagaacttcgagcgcttgcgcagctccatgtcagagaaccgcatgtcacgccggattgtgctgtccaacatgaggatgcagttctcctttgaggggcctgagaaagtgcacagctcctacttcgaggggaagcaggtctcagtgactaacgacggctcccagctgggagccctggtgtcccctgagtgtggtgacctcagcgagcccaccaccctcaagtctccggccccctccagtgactttgcggacgccatcaccgagctggaggacgccttctctaggcaagtgaaatcactggccgagtccatcgacgatgccctcaactgccgcagcctgcacactgaggaggcaccggccctggatgcggcgcgggcccgggacaccgaaccccagacagccctgcacggcatggaccaccgcaaactggacgagatgacggcctcgtacagtgatgtcaccctgtacatcgatgaggaggagctgtcgccccctctgcccctctcgcaggcaggggaccggccgtccagcaccgagtcggacctgcggctacgggctgggggcgcagccccagactactgggccctggcccacaaagaggacaaggctgacacggacacgagctgccggagcacgccgtcgctggagcggcaggagcagcggctgcgggtggagcatctgccgctgctcaccatcgagccacccagcgacagctctgtggaccttagtgaccgctcggagcgggggtcactcaagaggcagagtgcttacgagcgcagccttggcgggcagcagggcagtcccaagcatggtccccacagcggcgcccccaagagcctcccccgggaggagcctgagttgcggccccggccccccaggcccctggacagccacttggccatcaatggctcagccaaccggcagagcaagtctgagtcggactactcagacggtgacaatgacagcatcaacagcacgtccaactccaacgataccatcaactgcagctccgagtcatcgtcccgtgacagcctgcgggagcagacgctcagcaagcagacctaccacaaggaggcccgcaacagctgggactcgcctgcctttagcaacgatgtcatccgcaagaggcactaccgcatcggcctgaacctcttcaacaagaagcctgagaagggagtccagtacctcatcgagcgtggctttgtgcccgacacgcccgtcggggtggcccacttcctgctgcagcgcaagggcctcagccggcagatgatcggcgagttcctgggcaaccggcagaagcagttcaaccgtgacgtgctcgactgcgtcgtggacgagatggacttctctaccatggagctggatgaggccctcaggaaattccaggcgcacatccgtgtccaaggggaggctcagaaagtggagcggctcatagaggcgttcagccagcgctactgcatctgcaaccctggggtggtgcggcaattccggaacccagacaccattttcatcctggccttcgccatcatcctgctgaacaccgacatgtacagccccaatgtcaagcccgagcggaaaatgaagctagaggacttcatcaagaacctccgaggtgtggacgatggtgaggacattccccgtgagatgctgatggggatctatgaacggatccgtaagcgagagctaaagaccaatgaggaccatgtgtcccaggtgcagaaggtggagaagctcattgtggggaaaaagccgatcggatccctgcatcccgggctcggctgtgtgctctctctgccccaccgtcggttggtctgctactgccggctctttgaggttccagacccaaacaagccccagaaactcggactacaccagcgagaaatcttcctgttcaacgacctcctggtggtcaccaagatcttccagaagaagaagaactcggtgacgtacagcttccgacagtccttctccttgtacggcatgcaggtcctgctcttcgagaaccagtactaccccaatggcatccggctcacctcgtctgtccccggagcagatatcaaagtgttaataaacttcaacgcccccaaccctcaagaccggaagaaattcaccgatgacctgcgggagtccattgcggaagtccaagagatggagaagcacaggatagagtcggagctcgagaagcagaaaggcgtcgtgcggcccagcatgtcccagtgctctagcctcaaaaaggagtcgggcaacggaacactgagccgggcctgcctggacgacagctatgccagcggtgagggcctcaagcgcagcgccctcagcagctccctgcgggacctctcggaagccgggaagcgagggcgtcgcagcagtgcgggatcgctagagagcaatgtggaatttcagcctttcgagccactgcagccgtcagtgctgtgctcctaagccatgggacccgaggactgccccccggcgcctgcccaggcggaggccctttcagaaagggcgaagctcacgcctgactctgcgggccgcggggccgcgttcccagtggacagcgtggtgagccgtggccggacggcaggaggagaggggagccccctctggctgtgtgtcaccttggctggctggctggccagggttttgccgatttccctcctcacatccctcccaccctcggtcatatcattgagatcaccgtaccagcaaatctgcaaaccaagcactttgttaatctccagagagagcaaatacagcaatctagagtttagcctttttaaaaatgtgactttaacccgcccacctgtgtcctcccattggcgtggcatttctttggtgtctgctcagaaagaaacagcatgggaccgtgtgattgggtccaggctgggctgtcagggaagcgccctggtgtctccgactcatcaattctcgggtcttttttaaaagccaggctccccaaagcactctgtctcgcaattttgaggaggctgttccgacctggaagcgttaaactgctgcatgtcatctggcgtcagctgtgaggctgcgctctgcgtgttgtgcgtttgcaaaatgtattggcgtgactgtaaacacatcgttgaagtaaagcgattacatattgagtatgtcagcttttctcaccctcttctgtgctgggaggagagtctaactgtaacctttaggttgttccagaaaagattcaggccgtttggcacagaattgctctttctgaagggtagcagtaatgaataggaacagacagaaaaccccaggaggggctttcaggaaactctccctctccatcgccatcctgcaagctccacagcctcgggctgccagcctgtggcactgtcctcggtgtgtcctggagctgtgctgggcagcagggcctcgcgtaaggaactgctggaacccactgagcccttcccggggtttcccgccgcactcagtgtgttccttcaggctagtgaggtttcattctgttttatttgcaagcttatcaaaagtttgtggaagatacattgttgggttccagaggctggagtcatgctgcccacatcttgtttgggaaagcaaaagctcccagtgagctggtgtccccgtgtgtctttcatgggactgtcccctttagagatcccacctgtcagagccacagcttcggggtcctgtcatcacatcccctgggaggggaggcaggaggaggccgagggccccaggatgtctgcctggtcccttctcactgtgaggacgcccttggcacacctttctcaagtcacacaaattactgcagttacatacagaattgctgacaggagcaggagacgctgagggaaacagctggcaatgtgacaaaagtcttttctgggacaacaatcaaatcatgtatttgtatttttttaagtttaccaatgaattgtacaacaatgtaaaaataaagttcatcctaatatgctgtgcacatcttgcttaaaaatgtcttcagcacccagtgcagtgatctttccctcacacactgcatgcagcaggagcctcttgtttttcttaatgagctgaaaagacagcagatgttcacagctgatgctgggtgttgactcagcgccacgggaagctctgtgcccgcaggtaagcacgcacagtcttacagttctccttgtaaaatatcatcacccttcctgcctgagaaacgagtacatttgtattttatgtaacaacaatagtcaaggcagcattgcaacactgagcagggtgaggtgggggtgctgagcacaggacaagagggaggaggcctgccctccattcagatgcatctgcatcgcccttctgtgtgcagtcacatcgagactgcacacagcatgcatctcctcttggaaaatatcttttgcctccgagttgttttaagcaattagaatcaggtcctgaatccccagactgttcagagacttcaagggacacctccctcacaagaagcctggcacccccactgtgtacctttgagaggaaaggagtgcgtttgttttcatctgcattctgtttgtcagtggcaacagactctatcaatgtaaaaccatggttgtgatcatgtggggaaatcaaataaatcctttgaaactct

SEQ ID NO: 10056 - DNA, 3744 bp, Homo sapiens
  source 1..3744: mol_type = unassigned DNA
cctgagaagccagccaggctgcggctgtttgtggcaggaggcccccacccacagcactggaccaagcgtcgagggcgaggcccccagcagtgagactggcacatccctggacagcccctcagcctacccccagggccccttggtgcccggttccagcctgagcccggatcactacgagcacacgtcagtgggagcctatgggctgtactcggggccgccggggcaacagcagcgcacgcggaggcccaagctgcagcactcgacctccatcctgcgcaagcaggctgaggaggaggccatcaagcgctcacgctcactctccgagagctatgagctctcctcggacctgcaggacaagcaggtggagatgctagaacgaaagtatggggggcgcctggtaacccgccatgcggcccgcaccatccagacggcgtttcgccagtaccagatgaacaagaacttcgagcgcttgcgcagctccatgtcagagaaccgcatgtcacgccggattgtgctgtccaacatgaggatgcagttctcctttgaggggcctgagaaagtgcacagctcctacttcgaggggaagcaggtctcagtgactaacgacggctcccagctgggagccctggtgtcccctgagtgtggtgacctcagcgagcccaccaccctcaagtctccggccccctccagtgactttgcggacgccatcaccgagctggaggacgccttctctaggcaagtgaaatcactggccgagtccatcgacgatgccctcaactgccgcagcctgcacactgaggaggcaccggccctggatgcggcgcgggcccgggacaccgaaccccagacagccctgcacggcatggaccaccgcaaactggacgagatgacggcctcgtacagtgatgtcaccctgtacatcgatgaggaggagctgtcgccccctctgcccctctcgcaggcaggggaccggccgtccagcaccgagtcggacctgcggctacgggctgggggcgcagccccagactactgggccctggcccacaaagaggacaaggctgacacggacacgagctgccggagcacgccgtcgctggagcggcaggagcagcggctgcgggtggagcatctgccgctgctcaccatcgagccacccagcgacagctctgtggaccttagtgaccgctcggagcgggggtcactcaagaggcagagtgcttacgagcgcagccttggcgggcagcagggcagtcccaagcatggtccccacagcggcgcccccaagagcctcccccgggaggagcctgagttgcggccccggccccccaggcccctggacagccacttggccatcaatggctcagccaaccggcagagcaagtctgagtcggactactcagacggtgacaatgacagcatcaacagcacgtccaactccaacgataccatcaactgcagctccgagtcatcgtcccgtgacagcctgcgggagcagacgctcagcaagcagacctaccacaaggaggcccgcaacagctgggactcgcctgcctttagcaacgatgtcatccgcaagaggcactaccgcatcggcctgaacctcttcaacaagaagcctgagaagggagtccagtacctcatcgagcgtggctttgtgcccgacacgcccgtcggggtggcccacttcctgctgcagcgcaagggcctcagccggcagatgatcggcgagttcctgggcaaccggcagaagcagttcaaccgtgacgtgctcgactgcgtcgtggacgagatggacttctctaccatggagctggatgaggccctcaggaaattccaggcgcacatccgtgtccaaggggaggctcagaaagtggagcggctcatagaggcgttcagccagcgctactgcatctgcaaccctggggtggtgcggcaattccggaacccagacaccattttcatcctggccttcgccatcatcctgctgaacaccgacatgtacagccccaatgtcaagcccgagcggaaaatgaagctagaggacttcatcaagaacctccgaggtgtggacgatggtgaggacattccccgtgagatgctgatggggatctatgaacggatccgtaagcgagagctaaagaccaatgaggaccatgtgtcccaggtgcagaaggtggagaagctcattgtggggaaaaagccgatcggatccctgcatcccgggctcggctgtgtgctctctctgccccaccgtcggttggtctgctactgccggctctttgaggttccagacccaaacaagccccagaaactcggactacaccagcgagaaatcttcctgttcaacgacctcctggtggtcaccaagatcttccagaagaagaagaactcggtgacgtacagcttccgacagtccttctccttgtacggcatgcaggtcctgctcttcgagaaccagtactaccccaatggcatccggctcacctcgtctgtccccggagcagatatcaaagtgttaataaacttcaacgcccccaaccctcaagaccggaagaaattcaccgatgacctgcgggagtccattgcggaagtccaagagatggagaagcacaggatagagtcggagctcgagaagcagaaaggcgtcgtgcggcccagcatgtcccagtgctctagcctcaaaaaggagtcgggcaacggaacactgagccgggcctgcctggacgacagctatgccagcggtgagggcctcaagcgcagcgccctcagcagctccctgcgggacctctcggaagccggggtccatcattagcagtcctcacatgcgccggagagctacatcaacacgagagtgtccatctcgcccacaccagactatgcccaactcatcttccctcctgggctccttattcgggagcaagagagggaagccccctccccaggcccacctgccctcagccccagccctgccacccccccacccaccggtggtcctgcctcacttgcagcactctgtggctggccaccacctggggcccccagaggggctgccgcaggccgccatgcacgggcatcacacccagtactgccacatgcagaaccctcccccgtaccaccatcaccaccaccaccacccaccccagcacatccagcacgcacaccagtaccaccacggcccccatgggggccacccagcctacggggcccatgcccacggccacccgccgctgccctcggcccacgtggggcacacagtgcaccaccatgggcagccccctgccccgccgccccccaccagcagcaaggccaaacccagcggcatcagcacaattgtgtagacagcctgggtaggggtcccaggctccctgaaacacctgcacaccacacagggcacgcccgggggtcgccagccgcacaccaaacccggggcacttctgttgccatctctcccctctgcccctcacggcccaaccggagccccaggagcccacagggctggtgttgtgtggaacaaaggcccagatttcatttcttgttggcaccctgggctctgctcacctcagtctgagggatgggtgggcctcagacaccatcagccttgaaacggtgagccagccaagtagtgttgaactgcctcccccactccagctctcagctccctgtgccctaatgtacatgcatatgaaaacccaacctagaaaacgaagaaatgagatacaaaaacagacaaaacaaaccccaaaa

SEQ ID NO: 10057 - DNA, 3582 bp, Homo sapiens
  source 1..3582: mol_type = unassigned DNA
attcccctccacttcttgcctgagccgcctgctcctcttggaaacacgttgagcctccccgctggagagggagccagaacagggaagaacggattcacacaggatggcttgcagaagacgctatttcgtcgagggcgaggcccccagcagtgagactggcacatccctggacagcccctcagcctacccccagggccccttggtgcccggttccagcctgagcccggatcactacgagcacacgtcagtgggagcctatgggctgtactcggggccgccggggcaacagcagcgcacgcggaggcccaagctgcagcactcgacctccatcctgcgcaagcaggctgaggaggaggccatcaagcgctcacgctcactctccgagagctatgagctctcctcggacctgcaggacaagcaggtggagatgctagaacgaaagtatggggggcgcctggtaacccgccatgcggcccgcaccatccagacggcgtttcgccagtaccagatgaacaagaacttcgagcgcttgcgcagctccatgtcagagaaccgcatgtcacgccggattgtgctgtccaacatgaggatgcagttctcctttgaggggcctgagaaagtgcacagctcctacttcgaggggaagcaggtctcagtgactaacgacggctcccagctgggagccctggtgtcccctgagtgtggtgacctcagcgagcccaccaccctcaagtctccggccccctccagtgactttgcggacgccatcaccgagctggaggacgccttctctaggcaagtgaaatcactggccgagtccatcgacgatgccctcaactgccgcagcctgcacactgaggaggcaccggccctggatgcggcgcgggcccgggacaccgaaccccagacagccctgcacggcatggaccaccgcaaactggacgagatgacggcctcgtacagtgatgtcaccctgtacatcgatgaggaggagctgtcgccccctctgcccctctcgcaggcaggggaccggccgtccagcaccgagtcggacctgcggctacgggctgggggcgcagccccagactactgggccctggcccacaaagaggacaaggctgacacggacacgagctgccggagcacgccgtcgctggagcggcaggagcagcggctgcgggtggagcatctgccgctgctcaccatcgagccacccagcgacagctctgtggaccttagtgaccgctcggagcgggggtcactcaagaggcagagtgcttacgagcgcagccttggcgggcagcagggcagtcccaagcatggtccccacagcggcgcccccaagagcctcccccgggaggagcctgagttgcggccccggccccccaggcccctggacagccacttggccatcaatggctcagccaaccggcagagcaagtctgagtcggactactcagacggtgacaatgacagcatcaacagcacgtccaactccaacgataccatcaactgcagctccgagtcatcgtcccgtgacagcctgcgggagcagacgctcagcaagcagacctaccacaaggaggcccgcaacagctgggactcgcctgcctttagcaacgatgtcatccgcaagaggcactaccgcatcggcctgaacctcttcaacaagaagcctgagaagggagtccagtacctcatcgagcgtggctttgtgcccgacacgcccgtcggggtggcccacttcctgctgcagcgcaagggcctcagccggcagatgatcggcgagttcctgggcaaccggcagaagcagttcaaccgtgacgtgctcgactgcgtcgtggacgagatggacttctctaccatggagctggatgaggccctcaggaaattccaggcgcacatccgtgtccaaggggaggctcagaaagtggagcggctcatagaggcgttcagccagcgctactgcatctgcaaccctggggtggtgcggcaattccggaacccagacaccattttcatcctggccttcgccatcatcctgctgaacaccgacatgtacagccccaatgtcaagcccgagcggaaaatgaagctagaggacttcatcaagaacctccgaggtgtggacgatggtgaggacattccccgtgagatgctgatggggatctatgaacggatccgtaagcgagagctaaagaccaatgaggaccatgtgtcccaggtgcagaaggtggagaagctcattgtggggaaaaagccgatcggatccctgcatcccgggctcggctgtgtgctctctctgccccaccgtcggttggtctgctactgccggctctttgaggttccagacccaaacaagccccagaaactcggactacaccagcgagaaatcttcctgttcaacgacctcctggtggtcaccaagatcttccagaagaagaagaactcggtgacgtacagcttccgacagtccttctccttgtacggcatgcaggtcctgctcttcgagaaccagtactaccccaatggcatccggctcacctcgtctgtccccggagcagatatcaaagtgttaataaacttcaacgcccccaaccctcaagaccggaagaaattcaccgatgacctgcgggagtccattgcggaagtccaagagatggagaagcacaggatagagtcggagctcgagaagcagaaaggcgtcgtgcggcccagcatgtcccagtgctctagcctcaaaaaggagtcgggcaacggaacactgagccgggcctgcctggacgacagctatgccagcggtgagggcctcaagcgcagcgccctcagcagctccctgcgggacctctcggaagccgggaagcgagggcgtcgcagcagtgcgggatcgctagagagcaatgtggaagggtccatcattagcagtcctcacatgcgccggagagctacatcaacacgagagtgtccatctcgcccacaccagactatgcccaactcatcttccctcctgggctccttattcgggagcaagagagggaagccccctccccaggcccacctgccctcagccccagccctgccacccccccacccaccggtggtcctgcctcacttgcagcactctgtggctggccaccacctggggcccccagaggggctgccgcaggccgccatgcacgggcatcacacccagtactgccacatgcagaaccctcccccgtaccaccatcaccaccaccaccacccaccccagcacatccagcacgcacaccagtaccaccacggcccccatgggggccacccagcctacggggcccatgcccacggccacccgccgctgccctcggcccacgtggggcacacagtgcaccaccatgggcagccccctgccccgccgccccccaccagcagcaaggccaaacccagcggcatcagcacaattgtgtagacagcctgggtaggggtcccaggctccctgaaacacctgcacaccacacagggcacgcccgggggtcgccagccgcacaccaaacccggggcacttctgttgccatctctcccctctgcccctcacggcccaac

SEQ ID NO: 10058 - DNA, 545 bp, Homo sapiens
  source 1..545: mol_type = unassigned DNA
aatcgcagcccgccacctgacgccctcgctccagaccggcggggttccggctgcgggagagaggccgccgctcccggcccggcgttcagggcttccggggcagcgtcgagggcgaggcccccagcagtgagactggcacatccctggacagcccctcagcctacccccagggccccttggtgcccggttccagcctgagcccggatcactacgagcacacgtcagtgggagcctatgggctgtactcggggccgccggggcaacagcagcgcacgcggaggcccaagctgcagcactcgacctccatcctgcgcaagcaggctgaggaggaggccatcaagcgctcacgctcactctccgagagctatgagctctcctcggacctgcaggacaagcaggtggagatgctagaacgaaagtatggggggcgcctggtaacccgccatgcggcccgcaccatccagacggcgtttcgccagtaccagatgaacaagaacttcgagcgcttgcgcagctccatgtcagagaaccgcatgtcacgccgg

SEQ ID NO: 10059 - DNA, 436 bp, Homo sapiens
  source 1..436: mol_type = unassigned DNA
gcggccgccatgtggtgcctgcactgcaactcggagaggacccagtcccttctggagctagagcttgacagcggatgaggaaagaatggctagaaaatgaaaatgacgaattcaagctctgcagaatatagacctggtcctctggtaaatgcatggaccctctttcccctccctggcattgctggggagcagcttgttagaatgcagcctgaggcagaggcagggaggagcagggggccaaggaggagccggagagacaaaacctgcaggccccagctgtgcgcactccagtggcagcattgggttccctgtacagccaccgtggatggctacagaggtgcactaccatcagcagagtggaaggagaatccttggaagctctacccagtgcctacaatctcaaaaacatgttcgccagccccaggaagtcatctgg

SEQ ID NO: 10060 - DNA, 7094 bp, Homo sapiens
  source 1..7094: mol_type = unassigned DNA
ggaggctgggccggtgggagagggaggcgagccgaccgctgggctgctgggctcccgcgccctcgcgctccccgccgccagcccaggcgcaggcagggcgcaggcggcggcgggcggcatggagagcctgctggagaatccggtgcgcgccgtgctctacctcaaggagctcacggccatcgtgcagaaccagcagagcctcatccacacccagcgagagcgtatcgacgagctggagcggcggctggacgagctgagcgctgagaaccgcagcctgtgggagcaccagcagctgctgcaagcccagcctccgcccgggctcgtccccccgtcatcggccccgctgccggccgctccggccaccgctcctgccgccgccgccagggcccaggaacctctccaggaccagggacagcgctcagcagccgcgccgcatcccgcgcccgatcggccgccgcgtcagcaccacggacagctcctggagcagccccagcggggccctggcagcagggctcacacaccccagtcgccccacaagcatctggggacacaaggggccgtgactgacaaggagaaggagcgtcccccgagttgctgcgctgctgccggagccctccttcagcacaaatccccctccgccctcggcaagggcgtcctgagcaggagacctgagaatgagaccgtgctgcaccagttctgctgcccagccgccgacgcctgctccgacctggcctcccaaagtgatggctcctgcacccaggccggtgggggcatggaggactccgtggtggcagcggcggcggtggcagccggcagacccagtgcccatgccccgaaggctcaagcccaggagctgcaggaggaggaggagcggccgggggcaggggctgcctccccaagggctggcccccagcacaaggcctcccccggccggcagcagcctgccctggcgacggcgctgtgcccccacgcccctgccgcctccgattacgaactctcccttgacctaaagaataaacagattgaaatgctagaacataagtacggcggtcacctggtgtcccggcgcgccgcttgcaccatccaaaccgccttccgccaataccagctcagcaagaacttcgagaaaatccgcaactcgcttctggagagccgcctgccacggcggatctccctgcgcaaggtgcggtcacccacggccgagagcctggcggccgagaaagcgctcatggagggctacggcctcgtggggctgccgctggtgcgctcgccctccctgccgcccaccttcgcaggcaccctcaccgagctggaggactccttcaccgagcaggtgcaatccctggccaagtccatcgacgacgcgctcagcacgtggagcctcaagaccatgtgctccctgcgggagagtggcgcttaccagctccaccaggccctgcaggcggccgcggggcccccaggcctggaggccgaggggcgggcgccggagagcgcgggccccgggcccggggatgacgccgcggagacccccggcctgcccccggcccacagcgggaccctcatgatggctttccgggacgtcacggtgcagatcgccaaccagaacatatccgtctcctcctccacggctctgtcggtggccaactgcctgggcgctcagacggtccaggcccccgcagagcccgcggcgggcaaggccgagcagggcgagacctctgggcgggaggccccggaagcccccgccgtgggccgggaggacgcgtcagccgaggactcatgcgcagaggctgcggctagtggggcggcggatggggccacagcccccaaaacagaggaggaagaggaggaggaggagacggcggaggtggggagaggggccgaggccgaggcaggcgacttggagcagctgagcagcagcagcacgtccaccaagtccgccaagtcaggctcggaggcgtcggcctccgcctccaaggacgccctgcaggccatgatcctgagcctgccgcgctaccactgcgagaacccagccagctgcaagtcgcccacgctctccaccgacaccctgcgcaagcggctctaccgcatcggcctcaacctcttcaacataaaccccgacaagggcatccagttcctgatctcacgcggcttcatcccggacacccccatcggtgtggcccatttcctcctccagcgaaagggcctcagccgccagatgattggagagttcctgggcaacagcaagaagcagttcaaccgcgacgtgctggactgcgtggtggacgagatggacttctccagcatggagctggacgaggccctgcgcaagttccaggcacacatccgtgtgcagggggaggctcagaaggtggagcggctcattgaggccttcagccagcgctactgcatgtgcaaccccgaagtggttcagcagttccacaaccccgacaccatcttcatcctcgccttcgccatcatcctcctcaacaccgacatgtacagccccaacatcaagcctgaccggaagatgatgctggaggacttcatccgaaaccttcgaggtgtggacgatggcgctgacatccccagggagctggtggtaggcatctatgagaggatacagcagaaggagctcaagtccaatgaggaccacgtcacgtacgtcaccaaggtggagaagtccattgtgggcatgaagacagtgctgtccgtgccccaccgccgcctggtgtgctgcagccggctcttcgaggtgacggatgtgaacaagctgcagaagcaggcagcgcatcagagggaggtgttcctcttcaatgacctgctggtgattctcaaactttgcccgaagaagaagagctcctccacgtacaccttttgcaagtcagttggcctgctgggcatgcagttccagctctttgagaacgagtattactctcatggcatcacactggtgaccccgctctcgggctccgagaagaagcaggtgctgcatttctgtgccctgggctcggacgagatgcagaagttcgtggaggacctgaaggagtccattgctgaggtgacggagctggagcagatccgaatagagtgggagctggagaagcagcagggaacaaagacactctccttcaagccctgcggagcccagggggacccacagtcaaagcaaggatcgccgacagccaaaagggaagccgcgctcagggagaggccggcggagagcacggtggaggtgtcaattcacaacaggcttcaaacgtcccagcacaactccgggctgggggccgagaggggagcgccggtgccgccgccagacctgcagcctagccccccgagacagcagaccccaccactgccgccgccgccacccacgcccccgggcaccctggtgcagtgccagcaaattgtcaaggtcattgtcctggacaagccctgcctggcccgcatggagcccctgctgagccaggctctctcctgctacacctcgtcgtcctctgactcctgcggctccacacccctgggcggtcccggctctccggtcaaggtcacccaccagcctccgctgcccccgcccccacccccctacaaccaccctcaccagttctgtcccccaggctccctgctgcacgggcaccgctactccagtggctcaaggagcctggtgtagactctgccccaccaccctgctgtcctgggagggctggccactggggggcctgggctgcccctccactgctccccataccctggcacgatgcgttcctggtcactgatcaccatcattttgggaagagaatcccaatccctggcacctgggtttgcctcatccaaccatccttccctttctcagctgcaccccctctgcagatctgaagacacacctcactctcccagggccctacacagccagacccggcgaggcctcctcttcccctggccaccactttcccccattggaccatggactgaagaaaacgagctgagggtctaacgagcttgcaggctttgagtctgttagtgcccggggcctcgggccttgggcagcagcatgaggctgggccggccggcagtggagcactagacagagtggctggctcgcagcccagaactagtgcctctgtagctgcactgaggggaggagggttggtcccacccctggagggacaggtgggaggagtgaggagggggctttttctgccacccccgcccccaagcctgaaactctcaggagtctacttcttggtccccagggacattggctgtcctgaccatgtccttccccctcctcccagggcctctgcttcctcaggagctgcccagactccagaaaagcctggaaaaagggaggcgggaaggggagcactttcggctttctataggtcagtccagcagggccacgggatcgcgaggtcatgtatctgcaaaatgcacctttttaaagagtgtcttagttccccagccccagctaatacccggccaatgccgtgtacgcaccggcatgtgcacgcaaacacgcatgagaaccaggccattccttccgctgtggaagcagaactggagacggggcaggaatgtgcccagcagagatggggctcagcccgaggcagggctccctcctgcatgaggctcggcccgaggcagggctccctcctgcatgagtctgtggcctccaggagggacttgggtgcagatgtaagcaagaaaaaccggggctccagaggcatgtgcatttcccctgcgcccctcagcctttaaatattccctcctcctagaaggttctagaccccccccttccagcaggggtgcccaagagtccctggaccctcaaaattgcaaaggagacccaagcggggctcgctgacctcccagggcccagcaagatgggatagccagccttaggtggccccacgagcccaagcctggggaagggcccctccccagccagacgagaggcagccaccccagagaccacaggagccgtaccatggcctgcgcagtcaggccctatcaggatgtgtctgtcccaagcctggccaggctccagtcctgtgccagtagctcactgctgtcctatgtgcaggtcccccaacacttggagcctgtggttaaggcctcctgggagaggcagtgagcatgagtcaaaggtgacatggacttgaatctccccaccccgccccgcctgcagtagccgggccaggtaggaggcaaggatcattccctgctcccagaggttccagatgacctagtttcgttttgtgtgtgtgtgtgtgtggtcacccagacgtcactgtgatatcacctagtgaatctatttctggccctgtcttcgtcggcccagtttctgtaacttgcagccaatttgccctctcccctgtggctgccagcccatctgcccctctgtgtccttgctgccctggccctcctctgttttctgtaacagatgctccagtcattgcctttcagagtggagcagatgacagatggggtgcacgcattcagacacctctgatgcccttagccagggcagggatcgtccttaaagtgaaggcctggacaggaggagtcagggacttgggaggaggtggagctgtggggatgggagtggaggaatcaaaatgagggaagctgaaaatagaatgaaaacgatgactaagaggcagggagtgcgaggtatgggggaataggaactatgagctaaatatacttatggggtgggggccgtgggggccagggacactctcccagacagccctgacccgccaggcaggaccccgtcccctgctcacacagctcttcaaacttaccaaggacaggcaggaccccgtcccctgctcacacagctcttcaagcttaccaaggacaggcagaaccccgtcccctgctcacacagctcttcaagcttaccaaggacaggcaggaccccgtcccctgctcacacagctcttcaaacttaccaagtgccctctcccctgttgagggcacagcaaccccaggccctccctcccacctcagctgaagccccaatcttccaaatcggaaccagcaagtcttagggctggcacgcatctgggcctctagctgagaacccggactctcaggcacctcagtgcccctgccccagggcagaggcccaccccgtgggttggtgcagtggctgccctgggctccacgggcagcacagggagtctgtccaggaagcagcccagccggggtcagtattccgtggagccagtcctgagctgggaggggcatttaacacccctgagggcctggggcaggacacagctggccctcctcattgtcaggggaagcaagtgcccaacatctgtaacctcccttccctgctcagtccccaggccaaggttgggacccctctccatccctgtccccagagcctagacctcagggacctaggaaaagcctcctgctccctccccacggcagcagacagggcagggcctccagcccccagagggccggtggggggtgctctcgggccttcctgctctcctaaggttgcggggacagtagagtgctgagccccagacccagtcaccccaagatggccccactctatccactctctagacctttgggaaatctgggtccctctcctgatttgatccattcggccccaactccagagtcgggaatgggagatgaaactagttttccacccacttttggacaagtcccacccctagatctgaagcaagctctaccagcagcgtgtcctggaagcctgcctgcctgcctgcccgtctgcacaggtgtcttgatccagccctgcgtcttcgagcccctgtgccaccggtccccacggcccgccaggagtctctttgtacccactaggcttccctgatgaccatctgtctgtccgtccctgtttttgctgtacataactcctgctgcaccctctccccgcacacccgtcacccatgagagagagaaacctctctagggaaaggcagggtggctgcacccagcaactaatccaaatggcaaatattttgtaacaaaatagcccagaggtattttatctgttcaattcatagagttttagagattatattgaaagatgtcacttgagcaaa

SEQ ID NO: 10061 - DNA, 2701 bp, Homo sapiens
  source 1..2701: mol_type = unassigned DNA
aagcccctccccttctctgggccttgatttcccctcctgctcagtggggacgttcttggtcctccttcttgcccactctacccagtcgccgagtctggcgaagcagagctgtctgggggtcaccgcagcaggagggaccgagcttagatacgaaaaaagacttctacacggcaagagccacagaaaggacgctccagctggctcagcagaggggcatctctccctttcaagaacaaaaggtggcaggtacccgggggccctggggcagaacgaggtaaattctgcacggacttccacatctaagaccccagaaatctccagccggctccctccgaccgaatgagaccgtgctgcaccagttctgctgcccagccgccgacgcctgctccgacctggcctcccaaagattgaaatgctagaacataagtacggcggtcacctggtgtcccggcgcgccgcttgcaccatccaaaccgccttccgccaataccagctcagcaagaacttcgagaaaatccgcaactcgcttctggagagccgcctgccacggcggatctccctgcgcaaggtgcggtcacccacggccgagagcctggcggccgagaaagcgctcatggagggctacggcctcgtggggctgccgctggtgcgctcgccctccctgccgcccaccttcgcaggcaccctcaccgagctggaggactccttcaccgagcaggtgcaatccctggccaagtccatcgacgacgcgctcagcacgtggagcctcaagaccatgtgctccctgcgggagagtggcgcttaccagctccaccaggccctgcaggcggccgcggggcccccaggcctggaggccgaggggcgggcgccggagagcgcgggccccgggcccggggatgacgccgcggagacccccggcctgcccccggcccacagcgggaccctcatgatggctttccgggacgtcacggtgcagatcgccaaccagaacatatccgtctcctcctccacggctctgtcggtggccaactgcctgggcgctcagacggtccaggcccccgcagagcccgcggcgggcaaggccgagcagggcgagacctctgggcgggaggccccggaagcccccgccgtgggccgggaggacgcgtcagccgaggactcatgcgcagaggctgcggctagtggggcggcggatggggccacagcccccaaaacagaggaggaagaggaggaggaggagacggcggaggtggggagaggggccgaggccgaggcaggcgacttggagcagctgagcagcagcagcacgtccaccaagtccgccaagtcaggctcggaggcgtcggcctccgcctccaaggacgccctgcaggccatgatcctgagcctgccgcgctaccactgcgagaacccagccagctgcaagtcgcccacgctctccaccgacaccctgcgcaagcggctctaccgcatcggcctcaacctcttcaacataaaccccgacaagggcatccagttcctgatctcacgcggcttcatcccggacacccccatcggtgtggcccatttcctcctccagcgaaagggcctcagccgccagatgattggagagttcctgggcaacagcaagaagcagttcaaccgcgacgtgctggactgcgtggtggacgagatggacttctccagcatggagctggacgaggccctgcgcaagttccaggcacacatccgtgtgcagggggaggctcagaaggtggagcggctcattgaggccttcagccagcgctactgcatgtgcaaccccgaagtggttcagcagttccacaaccccgacaccatcttcatcctcgccttcgccatcatcctcctcaacaccgacatgtacagccccaacatcaagcctgaccggaagatgatgctggaggacttcatccgaaaccttcgaggtgtggacgatggcgctgacatccccagggagctggtggtaggcatctatgagaggatacagcagaaggagctcaagtccaatgaggaccacgtcacgtacgtcaccaaggtggagaagtccattgtgggcatgaagacagtgctgtccgtgccccaccgccgcctggtgtgctgcagccggctcttcgaggtgacggatgtgaacaagctgcagaagcaggcagcgcatcagagggaggtgttcctcttcaatgacctgctggtgattctcaaactttgcccgaagaagaagagctcctccacgtacaccttttgcaagtcagttggcctgctgggcatgcagttccagctctttgagaacgagtattactctcatggcatcacactggtgaccccgctctcgggctccgagaagaagcaggtgctgcatttctgtgccctgggctcggacgagatgcagaagttcgtggaggacctgaaggagtccattgctgaggtgacggagctggagcagatccgaatagagtgggagctggagaagcagcagggaacaaagacactctccttcaagccctgcggagcccagggggacccacagtcaaagcaaggatcgccgacagccaaaagggaagccgcgctcagggagaggccggcggagagcacggtggaggtattaatcaatgcctccccagcccgactcaccattttaccaatttcaagagatacaattaaaagttactgctagcatgggtaa

SEQ ID NO: 10062 - DNA, 398 bp, Homo sapiens
  source 1..398: mol_type = unassigned DNA
ggtttctcttgctcacgggcctctgcattccttaggggagctggagaagcagcagggaacaaagacactctccttcaagccctgcggagcccagggggacccacagtcaaagcaaggatcgccgacagccaaaagggaagccgcgctcagggagaggccggcggagagcacggtggaggtattaatcaatgcctccccagcccgactcaccattttaccaatttcaagagatacaattaaaagttactgctagcatgggtaatgccactgttccagcgcctaattaagccacgagctctttctcccctttccccagcctgctgccctccgaggccgagctcccagactaacacagtggagacggagctcacggcaccctagggccatccttcctgtgt

SEQ ID NO: 10063 - DNA, 539 bp, Homo sapiens
  source 1..539: mol_type = unassigned DNA
agccctgcggagcccagggggacccacagtcaaagcaaggatcgccgacagccaaaagggaagccgcgctcagggagaggccggcggagagcacggtggaggcttcaaacgtcccagcacaactccgggctgggggccgagaggggagcgccggtgccgccgccagacctgcagcctagccccccgagacagcagaccccaccactgccgccgccgccacccacgcccccgggcaccctggtgcagtgccagcaaattgtcaaggtcattgtcctggacaagccctgcctggcccgcatggagcccctgctgagccaggctctctcctgctacacctcgtcgtcctctgactcctgcggctccacacccctgggcggtcccggctctccggtcaagctgcaccccctctgcagatctgaagacacacctcactctcccagggccctacacagccagacccggcgaggcctcctcttcccctggccaccactttcccccattggaccatggactgaagaaaacgagctgagggtctaacg

SEQ ID NO: 10064 - DNA, 526 bp, Homo sapiens
  source 1..526: mol_type = unassigned DNA
ctgggagaggcagtgagcatgagtcaaaggtgacatggacttgaatctccccaccccgccccgcctgcagtagccgggccagagtcgggaatgggagatgaaactagttttccacccacttttggacaagtcccacccctagatctgaagcaagctctaccagcagcgtgtcctggaagcctgcctgcctgcctgcccgtctgcacaggtgtcttgatccagccctgcgtcttcgagcccctgtgccaccggtccccacggcccgccaggagtctctttgtacccactaggcttccctgatgaccatctgtctgtccgtccctgtttttgctgtacataactcctgctgcaccctctccccgcacacccgtcacccatgagagagagaaacctctctagggaaaggcagggtggctgcacccagcaactaatccaaatggcaaatattttgtaacaaaatagcccagaggtattttatctgttcaattcatagagttttagagattatattgaaagatgtcacttg

SEQ ID NO: 10065 - DNA, 3232 bp, Homo sapiens
  source 1..3232: mol_type = unassigned DNA
ggaggctgggccggtgggagagggaggcgagccgaccgctgggctgctgggctcccgcgccctcgcgctccccgccgccagcccaggcgcaggcagggcgcaggcggcggcgggcggcatggagagcctgctggagaatccggtgcgcgccgtgctctacctcaaggagctcacggccatcgtgcagaaccagcagagcctcatccacacccagcgagagcgtatcgacgagctggagcggcggctggacgagctgagcgctgagaaccgcagcctgtgggagcaccagcagctgctgcaagcccagcctccgcccgggctcgtccccccgtcatcggccccgctgccggccgctccggccaccgctcctgccgccgccgccagggcccaggaacctctccaggaccagggacagcgctcagcagccgcgccgcatcccgcgcccgatcggccgccgcgtcagcaccacggacagctcctggagcagccccagcggggccctggcagcagggctcacacaccccagtcgccccacaagcatctggggacacaaggggccgtgactgacaaggagaaggagcgtcccccgagttgctgcgctgctgccggagccctccttcagcacaaatccccctccgccctcggcaagggcgtcctgagcaggagacctgagaatgagaccgtgctgcaccagttctgctgcccagccgccgacgcctgctccgacctggcctcccaaagtgatggctcctgcacccaggccggtgggggcatggaggactccgtggtggcagcggcggcggtggcagccggcagacccagtgcccatgccccgaaggctcaagcccaggagctgcaggaggaggaggagcggccgggggcaggggctgcctccccaagggctggcccccagcacaaggcctcccccggccggcagcagcctgccctggcgacggcgctgtgcccccacgcccctgccgcctccgattacgaactctcccttgacctaaagaataaacagattgaaatgctagaacataagtacggcggtcacctggtgtcccggcgcgccgcttgcaccatccaaaccgccttccgccaataccagctcagcaagaacttcgagaaaatccgcaactcgcttctggagagccgcctgccacggcggatctccctgcgcaaggtgcggtcacccacggccgagagcctggcggccgagaaagcgctcatggagggctacggcctcgtggggctgccgctggtgcgctcgccctccctgccgcccaccttcgcaggcaccctcaccgagctggaggactccttcaccgagcaggtgcaatccctggccaagtccatcgacgacgcgctcagcacgtggagcctcaagaccatgtgctccctgcgggagagtggcgcttaccagctccaccaggccctgcaggcggccgcggggcccccaggcctggaggccgaggggcgggcgccggagagcgcgggccccgggcccggggatgacgccgcggagacccccggcctgcccccggcccacagcgggaccctcatgatggctttccgggacgtcacggtgcagatcgccaaccagaacatatccgtctcctcctccacggctctgtcggtggccaactgcctgggcgctcagacggtccaggcccccgcagagcccgcggcgggcaaggccgagcagggcgagacctctgggcgggaggccccggaagcccccgccgtgggccgggaggacgcgtcagccgaggactcatgcgcagaggctgcggctagtggggcggcggatggggccacagcccccaaaacagaggaggaagaggaggaggaggagacggcggaggtggggagaggggccgaggccgaggcaggcgacttggagcagctgagcagcagcagcacgtccaccaagtccgccaagtcaggctcggaggcgtcggcctccgcctccaaggacgccctgcaggccatgatcctgagcctgccgcgctaccactgcgagaacccagccagctgcaagtcgcccacgctctccaccgacaccctgcgcaagcggctctaccgcatcggcctcaacctcttcaacataaaccccgacaagggcatccagttcctgatctcacgcggcttcatcccggacacccccatcggtgtggcccatttcctcctccagcgaaagggcctcagccgccagatgattggagagttcctgggcaacagcaagaagcagttcaaccgcgacgtgctggactgcgtggtggacgagatggacttctccagcatggagctggacgaggccctgcgcaagttccaggcacacatccgtgtgcagggggaggctcagaaggtggagcggctcattgaggccttcagccagcgctactgcatgtgcaaccccgaagtggttcagcagttccacaaccccgacaccatcttcatcctcgccttcgccatcatcctcctcaacaccgacatgtacagccccaacatcaagcctgaccggaagatgatgctggaggacttcatccgaaaccttcgaggtgtggacgatggcgctgacatccccagggagctggtggtaggcatctatgagaggatacagcagaaggagctcaagtccaatgaggaccacgtcacgtacgtcaccaaggtggagaagtccattgtgggcatgaagacagtgctgtccgtgccccaccgccgcctggtgtgctgcagccggctcttcgaggtgacggatgtgaacaagctgcagaagcaggcagcgcatcagagggaggtgttcctcttcaatgacctgctggtgattctcaaactttgcccgaagaagaagagctcctccacgtacaccttttgcaagtcagttggcctgctgggcatgcagttccagctctttgagaacgagtattactctcatggcatcacactggtgaccccgctctcgggctccgagaagaagcaggtgctgcatttctgtgccctgggctcggacgagatgcagaagttcgtggaggacctgaaggagtccattgctgaggtgacggagctggagcagatccgaatagagtgggagctggagaagcagcagggaacaaagacactctccttcaagccctgcggagcccagggggacccacagtcaaagcaaggatcgccgacagccaaaagggaagccgcgctcagggagaggccggcggagagcacggtggag

SEQ ID NO: 10066 - DNA, 2701 bp, Homo sapiens; identical to SEQ ID NO: 10061
  source 1..2701: mol_type = unassigned DNA

SEQ ID NO: 10067 - DNA, 398 bp, Homo sapiens; identical to SEQ ID NO: 10062
  source 1..398: mol_type = unassigned DNA

SEQ ID NO: 10068 - DNA, 101 bp, Homo sapiens
  source 1..101: mol_type = unassigned DNA
agccctgcggagcccagggggacccacagtcaaagcaaggatcgccgacagccaaaagggaagccgcgctcagggagaggccggcggagagcacggtggag

SEQ ID NO: 10069 - DNA, 3483 bp, Homo sapiens
  source 1..3483: mol_type = unassigned DNA
ttccccgccggtccgcccctggctagagaagccgcagcccgcagtgtccgacccagtcgtcccgcgccggagccggccccgtagcgtgccatggcctgctacatctaccagctgccctcctgggtgctggacgacctgtgccgcaacatggacgcgctcagcgagtgggactggatggagttcgcctcctacgtgatcacagacctgacccagctgcggaagatcaagtccatggagcgggtgcagggtgtgagcatcacgcgggagctgctgtggtggtggggcatgcggcaggccaccgtccagcaacttgtggacctcctgtgccgcctggagctctaccgggctgcccagatcatcctgaactggaaaccggctcctgaaatcaggtgtcccattccagccttccctgactctgtgaagccagaaaagcctttggcagcttctgtaagaaaggctgaggatgaacaggaagaggggcagcctgtgaggatggccacctttccaggcccagggtcctctccagccagagcccaccagccggcctttctccagcctcctgaagaagatgcccctcattccttgagaagcgacctccccacttcgtctgattcaaaggacttcagcacctccattcctaagcaggaaaaacttttgagcttggctggagacagccttttctggagtgaggcagacgtggtccaggcaaccgatgacttcaatcaaaaccgcaaaatcagccaggggacctttgctgacgtctacagagggcacaggcacgggaagccattcgtcttcaagaagctcagagagacagcctgttcaagtccaggatcaatcgaaagattcttccaggcagagttgcagatttgtcttagatgctgccaccccaatgtcttacctgtgctgggcttctgtgctgcaagacagtttcacagcttcatctacccctacatggcaaatggttccctacaggacagactgcagggtcagggtggctcggaccccctcccctggccccagcgtgtcagcatctgctcagggctgctctgtgccgtcgagtacctgcatggtctggagatcatccacagcaacgtcaagagctctaatgtcttgctggaccaaaatctcacccccaaacttgctcacccaatggctcatctgtgtcctgtcaacaaaaggtcaaaatacaccatgatgaagactcacctgctccggacgtcagccgcgtatctgccagaggatttcatccgggtggggcagctgacaaagcgagtggacatcttcagctgtggaatagtgttggccgaggtcctcacgggcatccctgcaatggataacaaccgaagcccggtttacctgaaggacttactcctcagtgatattccaagcagcaccgcctcgctctgctccaggaagacgggcgtggagaacgtgatggcaaaggagatctgccagaagtacctggagaagggcgcagggaggcttccggaggactgcgccgaggccctggccacggctgcctgcctgtgcctgcggaggcgtaacaccagcctgcaggaggtgtgtggctctgtggctgctgtggaagagcggctccgaggtcgggagacgttgctcccttggagtgggctttctgagggtacaggctcttcttccaacaccccagaggaaacagacgacgttgacaattccagccttgatgcctcctcctccatgagtgtggcaccctgggcaggggctgccaccccacttctccccacagagaatggggaaggaaggctgcgggtcatcgtgggaagggaggctgactcctcctctgaggcctgtgttggcctggagcctccccaggatgttacagaaacttcgtggcaaattgagatcaatgaggccaaaaggaaactgatggagaatattctgctctacaaagaggaaaaagtggacagcattgagctctttggcccctgatgaccggaacacagctgaggacccttgtcctcagttggaaagatgagcatcagatcaagaaaaaggtctgaggcagaatccaagatctgccaggaaacacacaacaaaacatctgctgtcctgggtgggagggaaacttcatttcactggaatgagttgggagagaaaggccctcagcttttagagacacaaaaatccatgaagtctcttcctttctgggctttgttagtcagagcaggggatcagaggagactgaagcagaaaccctgcacacgggcccaggatgtggctgattttgtggttccggggagtatgtgatgataatcacccccagcagattccattacctcagcagctcttgttcccccgccactggcagttctgcaatgccatagcattttccagagctaagatctctgggttgtatttgctgacagcctgcaagcttgcatgctctgaaagattttttttagtttttaatttttttgtagagatggggtctcgctttgttggcgcaatcctcccacctcagactcccaaagtgctggaattacagttgggagccactgtgcctggcctggaagactttcaacttgtgtctcagtgcagttcttgactcacctctctgggcctcaggttctacaaatgccagacacctagcgaagagctctgcaggctttccactgcctgtattggaaatcttgcaattcacataattattcagtcactgcctggtacctttatcttcccatcccactaatgttagtgttttttaatggagcttttattctgagaatatgtgtttgtctgtttgtttgttttttgagacagagtctcactttgtcacccaggctggagtgcagtggcacgatctcagctcactgcaagctctgcctctcaggttcaagtgattctcctgcctcagcctcctgagtagatgggactgtaggcacctgccactatgcctggctaatttttgtgtttttagtagagacagggtttcaccatattggccaggctggtctcgaactactgacctcgtgatctgcccgccttggcctatcaaagtgttgggattacaggcttgagccaccgcacccggccgagaatatgtgttgttatttatgactggattatgaagaatcaggagaatgcatttcatgtctgattctgctgctaattaagtcaatcatttaatttttgggacctcagtttctttgtaagtaaaataacacctgcttgttcttcatccctgggctgttgggaggaacagatgagacagtggctatagaagcacttggaaaatgcacttgtcctgttttgtaaaataaaaaggtattaaatgtgtatttctgccatgtacctaatgattattcagtgcgtatatatctgaaaagtcatgttgcaaatctttctgtgaaacagatgctattttaaattcactgggagaaatatcctatttaaagtaatctatagtaatttctttttatataataaaaatatatttgtaaagtc

SEQ ID NO: 10070 - DNA, 1858 bp, Homo sapiens
  source 1..1858: mol_type = unassigned DNA
ctccccgcgcctttaatactcgcccgctgcggcggtcgccgagtccgcggacatgtccttcccgcagctgggctacccgcagtacctgagcgccgcggggccgggcgcctacggcggcgagcgcccgggggtgctggccgcggccgctgcggcggctgccgccgcctcgtcgggccgaccgggggccgcggagctgggcggcggggcaggcgcggctgcagtcacctcggtgctgggcatgtacgcggcggcggggccgtacgcgggcgcgcccaactacagcgccttcctgccctacgccgcggatctcagcctcttctcgcagatgggctcgcagtatgaactgaaggacaaccctggggtgcaccccgccaccttcgcagcccacacggcgccggcttattacccctacggccagttccaatacggggaccccgggcggcccaagaacgccacccgcgagagcaccagcacgctcaaggcctggctcaacgagcaccgcaagaatccctaccccaccaagggcgagaagatcatgctggccatcatcaccaagatgaccctcacgcaggtctccacctggttcgccaacgcgcgccggcgcctcaagaaggagaacaaggtgacatggggagcgcgcagcaaggaccaggaagatggagcgctcttcggcagcgacaccgagggcgacccggagaaggccgaggacgacgaggagatcgacctggaaagcatcgacattgacaagatcgacgagcacgatggcgaccagagcaacgaggatgacgaggacaaggccgaggctccgcacgcgcccgcagccccttctgctcttgcccgggaccaaggctcgccgctggcagcagccgacgttctcaagccccaggactcgcccttgggcctggcaaaggaggccccagagccgggcagcacgcgcctgctgagccccggcgctgcagcgggcggcctgcagggtgcgccgcacggcaagcccaagatctggtcgctggcggagacagccacgagccccgacggtgcgcccaaggcttcgccaccaccacccgcgggccaccccggcgcgcacgggccctccgccggggcgccgctgcaacaccccgccttcctgcctagccacggactgtacacctgccacatcggcaagttctccaactggaccaacagcgcattcctcgcacagggctccctgctcaacatgcgctccttcctgggcgttggcgctccccacgccgcgccccatggccctcaccttcctgcacctccaccaccgcagccgccggtcgctattgccccgggggcactcaatggagacaaggcctcggtccgcagcagccccacgctcccagagagagacctcgtccccaggccagattcgccggcacagcagttaaagtcgcccttccagccggtacgcgacaactctctggccccgcaggagggaacgccgcggatcctagcagccctcccgtccgcctgattaagggtcttcttttacttttgcgggggggaggggggaggagttggggagggagggaatgtgggaggaattaagacaaatatttcagactggtgtaaaggacaaatatgacaacgacgtcaaggactcgcatccgtcgctttctgcagaaaggggcttcttcggtcccgagctcgcgtccaggtggccaggcctctgccggcggctccagtggctgcgattatcgggttcggtaaatgcccccacgtgcttgtgtctctttccccccttttctgtatatagagtggtttcagattgtaaatagcgcgtcagcgaacttgtctaaatcatatatttttgtctaataaactaaatgaaatgaca

SEQ ID NO: 10071 - DNA, 2630 bp, Homo sapiens
  source 1..2630: mol_type = unassigned DNA
ctcccccaaaccccgaccgccggcctggcgcgcggctgcgcccaccggctccgcgctgctgccgccgccaccgccaccccgccgccgccccggcccgcgggccgcccaggctagtacccgggccggcctgcctccgccggccgtccgggtgcccgccgccgcgccgcgccccggccgggcgtggatggagggcgccgcgcgccctgcccgctgctcggcgtgacgcgggccccgcgccccgcgcccaccatgtcctacccgcagggctacctgtaccaggcgcccggctcgctggcgctctactcgtgcccggcctacggcgcgtcggctttggcggctccgcgcagcgaggagctggcgcgctcggcgtcgggctcggcgttcagcccctacccgggctcggcggccttcacggcgcaggcggccaccggcttcgggagcccgctgcagtactcggccgacgccgccgccgccgccgccggcttcccgtcctacatgggcgcaccctacgacgcgcacaccaccggcatgaccggcgccatcagctaccacccgtacggcagcgcggcctacccgtaccagctcaacgaccccgcgtaccgcaagaacgccacgcgggacgccacggccactctcaaggcctggctcaacgagcaccgcaagaacccctaccccaccaagggcgagaagatcatgctagccatcatcaccaagatgaccctcacccaggtctccacctggttcgccaacgcgcgccggcgcctcaagaaggagaacaagatgacctgggccccgagaaacaaaagcgaagatgaggacgaggacgagggcgacgctaccagaagcaaggacgagagtcccgacaaggcgcaggagggcacggagacctcggcagaggacgaagggatcagcctgcacgtggactcgctcacggatcactcgtgctcggccgagtcggacggggagaagcttccgtgccgcgccggggaccccctgtgcgaatcgggctcggagtgcaaggacaagtatgacgacctggaggacgacgaggacgacgacgaggagggcgagcggggcctggcgccgcccaagcccgtgacctcgtcgccgcttaccggcttggaggcgccgctgctgagccccccgcccgaggccgcgccccgcggtggccgcaagacgccccagggcagccggacgtctccgggcgcgccgccccccgccagcaagcccaagctgtggtcgctggccgagatcgccacgtcggacctcaagcagccgagcctgggcccgggctgcgggccaccggggctgcccgcggccgccgcgccggcctcaaccggggcaccgccaggaggctcgccctaccctgcctcgccgctgctgggccgccccctctactacacgtcgcccttctacggcaactacacaaactacgggaacttgaacgcggcgctgcagggccagggtctcctgcggtacaactctgcggccgcggcccccggcgaggccctgcacaccgcgccaaaggcggccagcgacgcgggcaaggcgggcgcgcacccgctcgagtcccactaccggtccccgggcggcggctacgagcccaagaaagatgccagcgagggctgcaccgtggttggcgggggcgtccagccctacctatagaagggccgagcacagcaatgcaagtaggtgtcacaattgctttgaaaaaaaaaaaaaaaaaaaagtcagcaggccattctctcttcccaagctcataaatttacagatacaacaaacagatgtctaaatccagaccacatcttgtgccactgtaaaagagaaggatccacacagcactgtcagcccacagactctaacaattggaacagactattgttggacatatgtgaatttgttggcatagtatagtttccccgatgtatgtgtgacttttgaaaacaatctgtttttctcaggatatcttgaattgatcacttcattgccacggtatatattctataggtgtgataggatttactgtaaagtttatttgtaaaagatgtacacagtagaaataaaacgtgatggaagaacttgagtacttcagaagtggaaacaaatttgatatttatttttataatgatataaagcttctagtaatttatgcaagttgtattgcaatggaatctaaactttttgtaaataaattctgcctggtttttatttgaacattgctggttatacaatctttgttggttgtttaacacgaattctttactaatttatatcttaaattgtaaataaaaacagactagtctacaataatatgatgtttggggcttatttttcctagaagaatgatttggggtagagcgctagtgaataacctccaggtgatctgacctcacctttttaatgaaaacctgtgtgaaataaactctcctttctctcctgagcattgaaaaaaaaaaaaaaaggcagatggaagagaagtatataatcgggagaaacatgtgctgtagatgatttctatacaggtattgcaaaaaaaccaaaaaacataagatttttgtgccctgagtgtgctaattacttgttagtgtaaatttttaaaacttggcaaaataaaatgatctgacacccta

SEQ ID NO: 10072 - DNA, 2456 bp, Homo sapiens
  source 1..2456: mol_type = unassigned DNA
aaaccccgaccgccggcctggcgcgcggctgcgcccaccggctccgcgctgctgccgccgccaccgccaccccgccgccgccccggcccgcgggccgcccaggctagtacccgggccggcctgcctccgccggccgtccgggtgcccgccgccgcgccgcgccccggccgggcgtggatggagggcgccgcgcgccctgcccgctgctcggcgtgacgcgggccccgcgccccgcgcccaccatgtcctacccgcagggctacctgtaccaggcgcccggctcgctggcgctctactcgtgcccggcctacggcgcgtcggctttggcggctccgcgcagcgaggagctggcgcgctcggcgtcgggctcggcgttcagcccctacccgggctcggcggccttcacggcgcaggcggccaccggcttcgggagcccgctgcagtactcggccgacgccgccgccgccgccgccggcttcccgtcctacatgggcgcaccctacgacgcgcacaccaccggcatgaccggcgccatcagctaccacccgtacggcagcgcggcctacccgtaccagctcaacgaccccgcgtaccgcaagaacgccacgcgggacgccacggccactctcaaggcctggctcaacgagcaccgcaagaacccctaccccaccaagggcgagaagatcatgctagccatcatcaccaagatgaccctcacccaggtctccacctggttcgccaacgcgcgccggcgcctcaagaaggagaacaagatgacctgggccccgagaaacaaaagcgaagatgaggacgaggacgagggcgacgctaccagaagcaaggacgagagtcccgacaaggcgcaggagggcacggagacctcggcagaggacgaagggatcagcctgcacgtggactcgctcacggatcactcgtgctcggccgagtcggacggggagaagcttccgtgccgcgccggggaccccctgtgcgaatcgggctcggagtgcaaggacaagtatgacgacctggaggacgacgaggacgacgacgaggagggcgagcggggcctggcgccgcccaagcccgtgacctcgtcgccgcttaccggcttggaggcgccgctgctgagccccccgcccgaggccgcgccccgcggtggccgcaagacgccccagggcagccggacgtctccgggcgcgccgccccccgccagcaagcccaagctgtggtcgctggccgagatcgccacgtcggacctcaagcagccgagcctgggcccgggctgcgggccaccggggctgcccgcggccgccgcgccggcctcaaccggggcaccgccaggaggctcgccctaccctgcctcgccgctgctgggccgccccctctactacacgtcgcccttctacggcaactacacaaactacgggaacttgaacgcggcgctgcagggccagggtctcctgcggtacaactctgcggccgcggcccccggcgaggccctgcacaccgcgccaaaggcggccagcgacgcgggcaaggcgggcgcgcacccgctcgagtcccactaccggtccccgggcggcggctacgagcccaagaaagatgccagcgagggctgcaccgtggttggcgggggcgtccagccctacctatagaagggccgagcacagcaatgcaagtaagtgggcaccctggtgcttcccagaccctgtggagcctcccagcaccaacttgcttaatgtgtttttcttgcttctggtcatggggttagaagacagagcatttcaatcttgtccagcttttctttccttaagggggaaactatattttctgttttatagattccctctttttggcacaagttctatcactcctttacctagggaaggaaaaaaaaaatatatatatatatgtgtgtgtgtgtgtgtgtaatatatatatgtatatatatagtacatgtatatatatagtacatgtgtatatatatattacacactactgttgttttcttttgaaacaatagattattaaaatctgggcatttatatgcaatttagagccatttttactatgctagacacataatagacacatgctttgatgagcttgggctaccaaaacttggagtagcaaaaacctttatagatgatgtttgcaaaataagactgaagagacacgaggcgtactagtcttttatcagccctgtccaacctcccctccacccatgtccaagtggacaggactctgacattctcccggggctcacaacagtatctcaaaaaatatgttgctttgcaacgagtcagaattactaatcatagatcttgaagataagaaagatttggaaccacttcagatcaactcgtttttataatggtgttgttgtggaactgaaagattggggatgatttggttttttccttggtccacaggtaggtgtcacaattgctttg

SEQ ID NO: 10073 - DNA, 2401 bp, Homo sapiens
  source 1..2401: mol_type = unassigned DNA
cttagcatcttggcaggacctttgcaaaggcaaaagcagagccccccggtgcaaagagcgaggggaaaaaagagaaagcagcaagggaggggaggggaggggaaaaaaagcccagctggggcgagcgaggcgcgcagaggagcgggcgcggcggtcgcagccggaggcgcgcgggaagccagcgaggaggcgccgcgggccggagccccggagccggggccagaggagcggcggcccagggcagccagaggccaggtgcccgcccgctcgccctcgcagggcgccgcccggctcgttggcggccgcggcgcggcgcgccccatgcccgtgtgtggccatgtcctatccgcagggctacttgtaccagccgtccgcctcgctggcgctctactcgtgcccggcgtacagcaccagcgtcatttcggggccccgcacggatgagctcggccgctcttcttcgggctccgcgttctcgccctacgctggctcgactgccttcacggcgccctcgccgggctacaactcgcacctccagtacggcgccgaccccgcggccgccgccgccgccgccttctcctcgtacgtgggctctccctacgaccacacacccggcatggcgggctccttggggtaccatccttacgcggcgcccctgggatcgtacccttacggggacccagcgtaccggaagaacgccacaagggacgccacggctaccctcaaggcctggctcaacgagcaccgcaagaacccctaccccaccaagggcgagaagatcatgctggccatcatcaccaagatgaccctcacccaggtgtccacctggttcgccaacgcgcgccggcgcctcaagaaagagaataaaatgacgtggacgccgcggaaccgcagcgaggacgaggaagaggaggagaacattgacctggagaagaacgacgaggacgagccccagaagcccgaggacaagggcgaccccgagggccccgaagcaggaggagctgagcagaaggcggcttcgggctgcgaacggcttcagggaccacccacccctgcaggcaaggagacggagggcagcctcagcgactcggattttaaggagccgccctcggagggccgcctcgacgcgctgcagggccccccccgcaccggcgggccctccccggctgggccagcggcggcgcggctggcggaggacccggcccctcactaccccgccggagcgccggcgcccggcccgcatccagccgcgggcgaggtgcctccgggtcccggcgggccctcggttatccattcgccgcctccgccgccgcctcctgcggtgctcgccaagcccaaactgtggtctttggcagagatcgccacatcgtcggacaaggtcaaggacgggggcggcgggaacgagggctctccatgcccaccgtgtcccgggcccatagccgggcaagccctaggaggcagccgggcgtcgccggccccggcgccgtcacgctcgccctcggcgcagtgtccttttccaggcgggacggtgctgtcccggcctctctactacaccgcgcccttctatcccggctacacgaactatggctccttcggacaccttcatggccacccggggcccgggccaggccccacaaccggtccggggtctcatttcaatggattaaaccagaccgtgttgaaccgagcggacgctttggctaaagacccgaaaatgttgcggagccagtctcagctagacctgtgcaaagactctccctatgaattgaagaaaggtatgtccgacatttaacgcgggctgcgtcggtcccggacttttctaatttattaaaaacatggccttggcagttatttttccatcaccgagagagagagacagagagagaaaataaactacccctcctattcagaagtttatagtttatggagatggatgacataaaaatgtaaacatctccacacaaaaaaaaaaatgtcttaaccaaccgaaaagaaaaattaaaaaaggatttgtattaaatcttattctgtatatttaatgtagcatttttgtatttaaattgataattcaatatctttgaagtaaattatgaaatcaagacacctgtacaggcatttaatgtttttttgtaatataaatatatacatttgtgtttcccccaaaactgtttcatagttaaaaaatacaagtttaatttaattttttacacctattgattctgctgggtatgagctaaagtattacagaaaggaaacaggttatactcttagatttaaaaagtgaaagaaactgcaggcgcctttgtaaaatgcaaaatatttaattaaaagagattttaacataatgagagccactcattactttttagaagcctcaataaactgtccattgccttggtcaaaa

SEQ ID NO: 10074 - DNA, 879 bp, Homo sapiens
  source 1..879: mol_type = unassigned DNA
atgtcctatccgcagggctacttgtaccagccgtccgcctcgctggcgctctactcgtgcccggcgtacagcaccagcgtcatttcggggccccgcacggatgagctcggccgctcttcttcgggctccgcgttctcgccctacgctggctcgactgccttcacggcgccctcgccgggctacaactcgcacctccagtacggcgccgaccccgcggccgccgccgccgccgccttctcctcgtacgtgctgttgaaaaaagaaaaaaagagccttgacttcccttgttttccccccttgcgcccaacgtgcgtccgctcccccgccgagcgcggagtcgcctcagttgcccaggcctctatctgcatggagggccgggccgccgtggccagatctgcgcacgggggctctccatgcccaccgtgtcccgggcccatagccgggcaagccctaggaggcagccgggcgtcgccggccccggcgccgtcacgctcgccctcggcgcagtgtccttttccaggcgggacggtgctgtcccggcctctctactacaccgcgcccttctatcccggctacacgaactatggctccttcggacaccttcatggccacccggggcccgggccaggccccacaaccggtccggggtctcatttcaatggattaaaccagaccgtgttgaaccgagcggacgctttggctaaagacccgaaaatgttgcggagccagtctcagctagacctgtgcaaagactctccctatgaattgaagaaaggtatgtccgacatttaacgcgggctgcgtcggtcccggacttttctaatttattaaaaacatggccttggcagttatttttccatcaccgagagagagagacag

SEQ ID NO: 10075 - DNA, 2061 bp, Homo sapiens
  source 1..2061: mol_type = unassigned DNA
atgtcctatccgcagggctacttgtaccagccgtccgcctcgctggcgctctactcgtgcccggcgtacagcaccagcgtcatttcggggccccgcacggatgagctcggccgctcttcttcgggctccgcgttctcgccctacgctggctcgactgccttcacggcgccctcgccgggctacaactcgcacctccagtacggcgccgaccccgcggccgccgccgccgccgccttctcctcgtacgtgggctctccctacgaccacacacccggcatggcgggctccttggggtaccatccttacgcggcgcccctgggatcgtacccttacggggacccagcgtaccggaagaacgccacaagggacgccacggctaccctcaaggcctggctcaacgagcaccgcaagaacccctaccccaccaagggcgagaagatcatgctggccatcatcaccaagatgaccctcacccaggtgtccacctggttcgccaacgcgcgccggcgcctcaagaaagagaataaaatgacgtggacgccgcggaaccgcagcgaggacgaggaagaggaggagaacattgacctggagaagaacgacgaggacgagccccagaagcccgaggacaagggcgaccccgagggccccgaagcaggagctgagcagaaggcggcttcgggctgcgaacggcttcagggaccacccacccctgcaggcaaggagacggagggcagcctcagcgactcggattttaaggagccgccctcggagggccgcctcgacgcgctgcagggccccccccgcaccggcgggccctccccggctgggccagcggcggcgcggctggcggaggacccggcccctcactaccccgccggagcgccggcgcccggcccgcatccagccgcgggcgaggtgcctccgggtcccggcgggccctcggttatccattcgccgcctccgccgccgcctcctgcggtgctcgccaagcccaaactgtggtctttggcagagatcgccacatcgtcggacaaggtcaaggacgggggcggcgggaacgagggctctccatgcccaccgtgtcccgggcccatagccgggcaagccctaggaggcagccgggcgtcgccggccccggcgccgtcacgctcgccctcggcgcagtgtccttttccaggcgggacggtgctgtcccggcctctctactacaccgcgcccttctatcccggctacacgaactatggctccttcggacaccttcatggccacccggggcccgggccaggccccacaaccggtccggggtctcatttcaatggattaaaccagaccgtgttgaaccgagcggacgctttggctaaagacccgaaaatgttgcggagccagtctcagctagacctgtgcaaagactctccctatgaattgaagaaaggtatgtccgacatttaacgcgggctgcgtcggtcccggacttttctaatttattaaaaacatggccttggcagttatttttccatcaccgagagagagagacagagagagaaaataaactacccctcctattcagaagtttatagtttatggagatggatgacataaaaatgtaaacatctccacacaaaaaaaaaaatgtcttaaccaaccgaaaagaaaaattaaaaaaggatttgtattaaatcttattctgtatatttaatgtagcatttttgtatttaaattgataattcaatatctttgaagtaaattatgaaatcaagacacctgtacaggcatttaatgtttttttgtaatataaatatatacatttgtgtttcccccaaaactgtttcatagttaaaaaatacaagtttaatttaattttttacacctattgattctgctgggtatgagctaaagtattacagaaaggaaacaggttatactcttagatttaaaaagtgaaagaaactgcaggcgcctttgtaaaatgcaaaatatttaattaaaagagattttaacataatgagagccactcattactttttagaagcctcaataaactgtccattgccttggtcaaaa

SEQ ID NO: 10076 - DNA, 1825 bp, Homo sapiens
  source 1..1825: mol_type = unassigned DNA
aagagccttgacttcccttgttttccccccttgcgcccaacgtgcgtccgctcccccgccgagcgcggagtcgcctcagttgcccaggcctctatctgcatggagggccgggccgccgtggccagatctgcgcacggggtacggacgtgcccgggcagatgggggcctacggggtgacaccgaggccgggacagcttcaggggccccagaaggacctgacccagaaattgaggtccccgctgccttctgaggagggggaggagttgctcctaggtctgaaccccgccagccttgccccgtaggaagctggagtgcgggcctcgtccacccacagaccccggggagcgcagggaaaagggtgcttcggtcgttccgatggcagtggagaccacggtccacactcacctctctgcgtctccaccgcagggctctccctacgaccacacacccggcatggcgggctccttggggtaccatccttacgcggcgcccctgggatcgtacccttacggggacccagcgtaccggaagaacgccacaagggacgccacggctaccctcaaggcctggctcaacgagcaccgcaagaacccctaccccaccaagggcgagaagatcatgctggccatcatcaccaagatgaccctcacccaggtgtccacctggttcgccaacgcgcgccggcgcctcaagaaagagaataaaatgacgtggacgccgcggaaccgcagcgaggacgaggaagaggaggagaacattgacctggagaagaacgacgaggacgagccccagaagcccgaggacaagggcgaccccgagggccccgaagcaggaggagctgagcagaaggcggcttcgggctgcgaacggcttcagggaccacccacccctgcaggcaaggagacggagggcagcctcagcgactcggattttaaggagccgccctcggagggccgcctcgacgcgctgcagggccccccccgcaccggcgggccctccccggctgggccagcggcggcgcggctggcggaggacccggcccctcactaccccgccggagcgccggcgcccggcccgcatccagccgcgggcgaggtgcctccgggtcccggcgggccctcggttatccattcgccgcctccgccgccgcctcctgcggtgctcgccaagcccaaactgtggtctttggcagagatcgccacatcgtcggacaaggtcaaggacgggggcggcgggaacgagggctctccatgcccaccgtgtcccgggcccatagccgggcaagccctaggaggcagccgggcgtcgccggccccggcgccgtcacgctcgccctcggcgcagtgtccttttccaggcgggacggtgctgtcccggcctctctactacaccgcgcccttctatcccggctacacgaactatggctccttcggacaccttcatggccacccggggcccgggccaggccccacaaccggtccggggtctcatttcaatggattaaaccagaccgtgttgaaccgagcggacgctttggctaaagacccgaaaatgttgcggagccagtctcagctagacctgtgcaaagactctccctatgaattgaagaaaggtatgtccgacatttaacgcgggctgcgtcggtcccggacttttctaatttattaaaaacatggccttggcagttatttttccatcaccgagagagagagacagagagagaaaataaactacccctcctattcagaagtttatagtttatggagatggatgacataaaaatgtaaacatctccacacaaaaaaaaaaatgtcttaaccaaccg

SEQ ID NO: 10077 - DNA, 881 bp, Homo sapiens
  source 1..881: mol_type = unassigned DNA
atgtcctatccgcagggctacttgtaccagccgtccgcctcgctggcgctctactcgtgcccggcgtacagcaccagcgtcatttcggggccccgcacggatgagctcggccgctcttcttcgggctccgcgttctcgccctacgctggctcgactgccttcacggcgccctcgccgggctacaactcgcacctccagtacggcgccgaccccgcggccgccgccgccgccgccttctcctcgtacgtgctgttgaaaaaagaaaaaaagagccttgacttcccttgttttccccccttgcgcccaacgtgcgtccgctcccccgccgagcgcggagtcgcctcagttgcccaggcctctatctgcatggagggccgggccgccgtggccagatctgcgcacgggggctctccctacgcccaccgtgtcccgggcccatagccgggcaagccctaggaggcagccgggcgtcgccggccccggcgccgtcacgctcgccctcggcgcagtgtccttttccaggcgggacggtgctgtcccggcctctctactacaccgcgcccttctatcccggctacacgaactatggctccttcggacaccttcatggccacccggggcccgggccaggccccacaaccggtccggggtctcatttcaatggattaaaccagaccgtgttgaaccgagcggacgctttggctaaagacccgaaaatgttgcggagccagtctcagctagacctgtgcaaagactctccctatgaattgaagaaaggtatgtccgacatttaacgcgggctgcgtcggtcccggacttttctaatttattaaaaacatggccttggcagttatttttccatcaccgagagagagagacag

SEQ ID NO: 10078 - DNA, 2039 bp, Homo sapiens
  source 1..2039: mol_type = unassigned DNA
ctgagtcgactctgcgccggtgagtgcggttcggggcagggacggcctccgtggggacccaggctggcttggccccggccgcttagagtccccgctgaccccctgctcaccccgggcccccagcccgccgcgatggaggccgccgcccagttcttcgtcgagagcccggacgtggtctacggccccgaggccatcgaggcgcaatacgagtaccggacgacgcgcgtcagccgcgagggtggcgttctcaaggctgggacatctcgtcgctgaacctggccgaggcgatgcggcgcgcgaaggtgctggactgggggctgcaggagcaactgtggccgcacatggaggccctgcggccccggccttctgtttacatccccgaattcatcgcggccaaccagagcgcgcgcgcggacaacctcatcccaggctcgcgtgcgcagcagctggagcagatccgcagggacatccgagacttccggtctagcgcggggctggacaaagtcatagtgctgtggacggcgaacacggagcgcttctgtgaggtgattccaggcctcaacgacacagccgagaacctgctgcgcaccattgagctcggtctggaggtgtcgccctccacgctcttcgccgtggccagcatcctggagggctgtgccttcctcaatgggtctccgcagaacaccctggtgcccggagctcttgagctcgcgtggcagcaccgggtttttgtgggcggagatgacttcaagtcaggccagaccaaagtcaagtccgtgcttgtggacttcctcattggctccggcctcaagaccatgtccatcgtgagttacaaccacctgggcaacaacgatggggagaacctatcggcgccattgcagttccgctctaaggaggtgtccaagagcaacgtggtggacgacatggtgcagagcaacccagtgctctatacgcccggcgaagagcctgaccactgcgtggtcatcaagtatgtgccgtacgtgggtgacagcaagcgcgcgctggatgagtatacctcggagctgatgctgggcggaaccaacacactggtgctgcacaacacgtgtgaggactcgctgctggccgcacccatcatgctggacctagcgctgctgaccgagctgtgccagcgcgtgagcttctgcactgacatggaccccgagccgcagaccttccaccccgtgctgtccctgctcagcttcctcttcaaggcgccactagtgccgcccggcagcccggtggtcaatgcgcttttccgccagcgcagctgcatcgagaacatcctcagggcctgcgtggggctcccgccacagaaccacatgctcctggaacacaaaatggagcgcccagggcccagcctcaagcgagttggacccgtggctgccacctaccctatgttgaacaagaaaggaccggtacccgctgccaccaatggctgcaccggtgatgccaatgggcatctgcaagaggagcccccaatgcccaccacctgaggccccggtcacacagtttctcggctcttcctccccgctgccccccacgaccctaccttgaaggcccccacaaataaaggcgctgccactcagccctccttccacctggggttcttggggcctgtgacctgactctgcctccctctacttccccgactcttgagcgcccagcttcagtcccatcccctctgcccatggtcatcaccccaactcccagggagagcccagaacctggagcctcgctctgcccccagttctcaaaggtggggctagatgggggcggggacggaacaagaccacagggtggagagtgtggtggcagaaggccaaagagggaatctgagacaagctaccaaaaaccaaaaccagcttccatttatttatgggccccaccccctgacgtcctggggagaggggccccccaaagagcctttctctctgggacaaaatacaaatggcaggaagggtccatacagaaaagaacgtctctgaggtccttgcgtttttaataaaatggtaagagtc

SEQ ID NO: 10079 - DNA, 2420 bp, Homo sapiens
  source 1..2420: mol_type = unassigned DNA
acttccgccaggcggggacccgatggccacggtggctctgggttgtcgggcctcgaaccgggtctccagacgttgggcccctccctcccagcgcgggagaggcggggaagggggcggggcgggggaggggccgcagcgcttttctccggaggtcgcgcgcccgagagcccgcgctgtccgccgccgctgcctgagtcgactctgcgccgcccgccgcgatggaggccgccgcccagttcttcgtcgagagcccggacgtggtctacggccccgaggccatcgaggcgcaatacgagtaccggacgacgcgcgtcagccgcgagggtggcgttctcaaggtgcaccccacgtccacgcgcttcaccttccggaccgcccggcaggtgccccggctcggggtcatgcttgtcggctggggcgggaacaacggctccacactcaccgccgcggtgctggccaatcgactgcgtttgtcctggcccacgcgcagcggccgcaaggaggccaactactacggctcgctgactcaggcgggcaccgtgagcctgggcctggacgccgagggccaggaggtgttcgtacccttcagcgcggtgctgcccatggtggcgcccaacgacctcgtgttcgatggctgggacatctcgtcgctgaacctggccgaggcgatgcggcgcgcgaaggtgctggactgggggctgcaggagcaactgtggccgcacatggaggccctgcggccccggccttctgtttacatccccgaattcatcgcggccaaccagagcgcgcgcgcggacaacctcatcccaggctcgcgtgcgcagcagctggagcagatccgcagggacatccgagacttccggtctagcgcggggctggacaaagtcatagtgctgtggacggcgaacacggagcgcttctgtgaggtgattccaggcctcaacgacacagccgagaacctgctgcgcaccattgagctcggtctggaggtgtcgccctccacgctcttcgccgtggccagcatcctggagggctgtgccttcctcaatgggtctccgcagaacaccctggtgcccggagctcttgagctcgcgtggcagcaccgggtttttgtgggcggagatgacttcaagtcaggccagaccaaagtcaagtccgtgcttgtggacttcctcattggctccggcctcaagaccatgtccatcgtgagttacaaccacctgggcaacaacgatggggagaacctatcggcgccattgcagttccgctctaaggaggtgtccaagagcaacgtggtggacgacatggtgcagagcaacccagtgctctatacgcccggcgaagagcctgaccactgcgtggtcatcaagtatgtgccgtacgtgggtgacagcaagcgcgcgctggatgagtatacctcggagctgatgctgggcggaaccaacacactggtgctgcacaacacgtgtgaggactcgctgctggccgcacccatcatgctggacctagcgctgctgaccgagctgtgccagcgcgtgagcttctgcactgacatggaccccgagccgcagaccttccaccccgtgctgtccctgctcagcttcctcttcaaggcgccactagtgccgcccggcagcccggtggtcaatgcgcttttccgccagcgcagctgcatcgagaacatcctcagggcctgcgtggggctcccgccacagaaccacatgctcctggaacacaaaatggagcgcccagggcccagcctcaagcgagttggacccgtggctgccacctaccctatgttgaacaagaaaggaccggtacccgctgccaccaatggctgcaccggtgatgccaatgggcatctgcaagaggagcccccaatgcccaccacctgaggccccggtcacacagtttctcggctcttcctccccgctgccccccacgaccctaccttgaaggcccccacaaataaaggcgctgccactcagccctccttccacctggggttcttggggcctgtgacctgactctgcctccctctacttccccgactcttgagcgcccagcttcagtcccatcccctctgcccatggtcatcaccccaactcccagggagagcccagaacctggagcctcgctctgcccccagttctcaaaggtggggctagatgggggcggggacggaacaagaccacagggtggagagtgtggtggcagaaggccaaagagggaatctgagacaagctaccaaaaaccaaaaccagcttccatttatttatgggccccaccccctgacgtcctggggagaggggccccccaaagagcctttctctctgggacaaaatacaaatggcaggaagggtccatacagaaaagaacgtctctgaggtccttgcgtttttaataaaatggtaagagtc

SEQ ID NO: 10080 - DNA, 1703 bp, Homo sapiens
  source 1..1703: mol_type = unassigned DNA
agcgcttttctccggaggtcgcgcgcccgagagcccgcgctgtccgccgccgctgcctgagtcgactctgcgccgcccgccgcgatggaggccgccgcccagttcttcgtcgagagcccggacgtggtctacggccccgaggccatcgaggcgcaatacgagtaccggacgacgcgcgtcagccgcgagggtggcgttctcaaggaggccaactactacggctcgctgactcaggcgggcaccgtgagcctgggcctggacgccgagggccaggaggtgttcgtacccttcagcgcggtgctgcccatggtggcgcccaacgacctcgtgttcgatggctgggacatctcgtcgctgaacctggccgaggcgatgcggcgcgcgaaggtgctggactgggggctgcaggagcaactgtggccgcacatggaggccctgcggccccggccttctgtttacatccccgaattcatcgcggccaaccagagcgcgcgcgcggacaacctcatcccaggctcgcgtgcgcagcagctggagcagatccgcagggacatccgagacttccggtctagcgcggggctggacaaagtcatagtgctgtggacggcgaacacggagcgcttctgtgaggtgattccaggcctcaacgacacagccgagaacctgctgcgcaccattgagctcggtctggaggtgtcgccctccacgctcttcgccgtggccagcatcctggagggctgtgccttcctcaatgggtctccgcagaacaccctggtgcccggagctcttgagctcgcgtggcagcaccgggtttttgtgggcggagatgacttcaagtcaggccagaccaaagtcaagtccgtgcttgtggacttcctcattggctccggcctcaagaccatgtccatcgtgagttacaaccacctgggcaacaacgatggggagaacctatcggcgccattgcagttccgctctaaggaggtgtccaagagcaacgtggtggacgacatggtgcagagcaacccagtgctctatacgcccggcgaagagcctgaccactgcgtggtcatcaagtatgtgccgtacgtgggtgacagcaagcgcgcgctggatgagtatacctcggagctgatgctgggcggaaccaacacactggtgctgcacaacacgtgtgaggactcgctgctggccgcacccatcatgctggacctagcgctgctgaccgagctgtgccagcgcgtgagcttctgcactgacatggaccccgagccgcagaccttccaccccgtgctgtccctgctcagcttcctcttcaaggcgccactagtgccgcccggcagcccggtggtcaatgcgcttttccgccagcgcagctgcatcgagaacatcctcagggcctgcgtggggctcccgccacagaaccacatgctcctggaacacaaaatggagcgcccagggcccagcctcaagcgagttggacccgtggctgccacctaccctatgttgaacaagaaaggaccggtacccgctgccaccaatggctgcaccggtgatgccaatgggcatctgcaagaggagcccccaatgcccaccacctgaggccccggtcacacagtttctcggctcttcctccccgctgccccccacgaccctaccttgaaggcccccacaaataaaggcgctgccactcagccctccttcca

SEQ ID NO: 10081 - DNA, 696 bp, Homo sapiens
  source 1..696: mol_type = unassigned DNA
gggcgcggggttgcccggcgaggggtggcagggacccgggcaaactcctgctgcactccaggtggtcatcaagtatgtgccgtacgtgggtgacagcaagcgcgcgctggatgagtatacctcggagctgatgctgggcggaaccaacacactggtgctgcacaacacgtgtgaggactcgctgctggccgcacccatcatgctggacctagcgctgctgaccgagctgtgccagcgcgtgagcttctgcactgacatggaccccgagccgcagaccttccaccccgtgctgtccctgctcagcttcctcttcaaggcgccactagtgccgcccggcagcccggtggtcaatgcgcttttccgccagcgcagctgcatcgagaacatcctcagggcctgcgtggggctcccgccacagaaccacatgctcctggaacacaaaatggagcgcccagggcccagcctcaagcgagttggacccgtggctgccacctaccctatgttgaacaagaaaggaccggtacccgctgccaccaatggctgcaccggtgatgccaatgggcatctgcaagaggagcccccaatgcccaccacctgaggccccggtcacacagtttctcggctcttcctccccgctgccccccacgaccctaccttgaaggcccccacaaataaaggcgctgccactcagccctc

SEQ ID NO: 10082 - DNA, 793 bp, Homo sapiens
  source 1..793: mol_type = unassigned DNA
acaaccacctgggcaacaacgatggggagaacctatcggcgccattgcagttccgctctaaggaggtgtccaagagcaacgtggtggacgacatggtgcagagcaacccagtgctctatacgcccggcgaagagcctgaccactgcgtggtcatcaagtatgtgccgtacgtgggtgacagcaagcgcgcgctggatgagtatacctcggagctgatgctgggcggaaccaacacactggtgctgcacaacacgtgtgaggactcgctgctggccgcacccatcatgctggacctagcgctgctgaccgagctgtgccagcgcgtgagcttctgcactgacatggaccccgagccgcagaccttccaccccgtgctgtccctgctcagcttcctcttcaaggcgccactagtgccgcccggcagcccggtggtcaatgcgcttttccgccagcgcagctgcatcgagaacatcctcaggtgcaccccagcctccagggcctgcgtggggctcccgccacagaaccacatgctcctggaacacaaaatggagcgcccagggcccagcctcaagcgagttggacccgtggctgccacctaccctatgttgaacaagaaaggaccggtacccgctgccaccaatggctgcaccggtgatgccaatgggcatctgcaagaggagcccccaatgcccaccacctgaggccccggtcacacagtttctcggctcttcctccccgctgccccccacgaccctaccttgaaggcccccacaaataaaggcgctgccactca

SEQ ID NO: 10083 - DNA, 1691 bp, Homo sapiens
  source 1..1691: mol_type = unassigned DNA
gggagtcttacaggggcggagcttaaggtgccggaggtctcaggggaggggcctgggggcagcggcttccgtcctggctgtgagcctggaactgaaaaatgcccgaaagtggggcggggcttgagagtctaggtggggcccaggccgggtcgcggccctttcaccactcccacccgtcacctcgccgtgtctgctgacccccaggaggccaactactacggctcgctgactcaggcgggcaccgtgagcctgggcctggacgccgagggccaggaggtgttcgtacccttcagcgcggtgctgcccatggtggcgcccaacgacctcgtgttcgatggctgggacatctcgtcgctgaacctggccgaggcgatgcggcgcgcgaaggtgctggactgggggctgcaggagcaactgtggccgcacatggaggccctgcggccccggccttctgtttacatccccgaattcatcgcggccaaccagagcgcgcgcgcggacaacctcatcccaggctcgcgtgcgcagcagctggagcagatccgcagggacatccgagacttccggtctagcgcggggctggacaaagtcatagtgctgtggacggcgaacacggagcgcttctgtgaggtgattccaggcctcaacgacacagccgagaacctgctgcgcaccattgagctcggtctggaggtgtcgccctccacgctcttcgccgtggccagcatcctggagggctgtgccttcctcaatgggtctccgcagaacaccctggtgcccggagctcttgagctcgcgtggcagcaccgggtttttgtgggcggagatgacttcaagtcaggccagaccaaagtcaagtccgtgcttgtggacttcctcattggctccggcctcaagaccatgtccatcgtgagttacaaccacctgggcaacaacgatggggagaacctatcggcgccattgcagttccgctctaaggaggtgtccaagagcaacgtggtggacgacatggtgcagagcaacccagtgctctatacgcccggcgaagagcctgaccactgcgtggtcatcaagtatgtgccgtacgtgggtgacagcaagcgcgcgctggatgagtatacctcggagctgatgctgggcggaaccaacacactggtgctgcacaacacgtgtgaggactcgctgctggccgcacccatcatgctggacctagcgctgctgaccgagctgtgccagcgcgtgagcttctgcactgacatggaccccgagccgcagaccttccaccccgtgctgtccctgctcagcttcctcttcaaggcgccactagtgccgcccggcagcccggtggtcaatgcgcttttccgccagcgcagctgcatcgagaacatcctcagggcctgcgtggggctcccgccacagaaccacatgctcctggaacacaaaatggagcgcccagggcccagcctcaagcgagttggacccgtggctgccacctaccctatgttgaacaagaaaggaccggtacccgctgccaccaatggctgcaccggtgatgccaatgggcatctgcaagaggagcccccaatgcccaccacctgaggccccggtcacacagtttctcggctcttcctccccgctgccccccacgaccctaccttgaaggcccccacaaataaaggcgctgccactca

SEQ ID NO: 10084 - DNA, 1654 bp, Homo sapiens
  source 1..1654: mol_type = unassigned DNA
ttttctccggaggtcgcgcgcccgagagcccgcgctgtccgccgccgctgcctgagtcgactctgcgccgcccgccgcgatggaggccgccgcccagttcttcgtcgagagcccggacgtggtctacggccccgaggccatcgaggcgcaatacgagtaccggacgacgcgcgtcagccgcgagggtggcgttctcaaggtgcaccccacgtccacgcgcttcaccttccggaccgcccggcaggtgccccggctcggggtcatgcttgtcggctggggcgggaacaacggctccacactcaccgccgcggtgctggccaatcgactgcgtttgtcctggcccacgcgcagcggccgcaaggaggccaactactacggctcgctgactcaggcgggcaccgtgagcctgggcctggacgccgagggccaggaggtgttcgtacccttcagcgcggtgctgcccatggtggcgcccaacgacctcgtgttcgatgctggagcagatccgcagggacatccgagacttccggtctagcgcggggctggacaaagtcatagtgctgtggacggcgaacacggagcgcttctgtgaggtgattccaggcctcaacgacacagccgagaacctgctgcgcaccattgagctcggtctggaggtgtcgccctccacgctcttcgccgtggccagcatcctggagggctgtgccttcctcaatgggtctccgcagaacaccctggtgcccggagctcttgagctcgcgtggcagcaccgggtttttgtgggcggagatgacttcaagtcaggccagaccaaagtcaagtccgtgcttgtggacttcctcattggctccggcctcaagaccatgtccatcgtgagttacaaccacctgggcaacaacgatggggagaacctatcggcgccattgcagttccgctctaaggaggtgtccaagagcaacgtggtggacgacatggtgcagagcaacccagtgctctatacgcccggcgaagagcctgaccactgcgtggtcatcaagtatgtgccgtacgtgggtgacagcaagcgcgcgctggatgagtatacctcggagctgatgctgggcggaaccaacacactggtgctgcacaacacgtgtgaggactcgctgctggccgcacccatcatgctggacctagcgctgctgaccgagctgtgccagcgcgtgagcttctgcactgacatggaccccgagccgcagaccttccaccccgtgctgtccctgctcagcttcctcttcaaggcgccactagtgccgcccggcagcccggtggtcaatgcgcttttccgccagcgcagctgcatcgagaacatcctcagggcctgcgtggggctcccgccacagaaccacatgctcctggaacacaaaatggagcgcccagggcccagcctcaagcgagttggacccgtggctgccacctaccctatgttgaacaagaaaggaccggtacccgctgccaccaatggctgcaccggtgatgccaatgggcatctgcaagaggagcccccaatgcccaccacctgaggccccggtcacacagtttctcggctcttcctccccgctgccccccacgaccctaccttgaaggcccccacaaataaaggcgctgccactca

SEQ ID NO: 10085 - DNA, 2148 bp, Homo sapiens
  source 1..2148: mol_type = unassigned DNA
gcttttctccggaggtcgcgcgcccgagagcccgcgctgtccgccgccgctgcctgagtcgactctgcgccgcccgccgcgatggaggccgccgcccagttcttcgtcgagagcccggacgtggtctacggccccgaggccatcgaggcgcaatacgagtaccggacgacgcgcgtcagccgcgagggtggcgttctcaaggtgcaccccacgtccacgcgcttcaccttccggaccgcccggcaggtgccccggctcggggtcatgcttgtcggctggggcgggaacaacggctccacactcaccgccgcggtgctggccaatcgactgcgtttgtcctggcccacgcgcagcggccgcaaggaggccaactactacggctcgctgactcaggcgggcaccgtgagcctgggcctggacgccgagggccaggaggtgttcgtacccttcagcgcggtgctgcccatggtggcgcccaacgacctcgtgttcgatggtgggcggagccctgggccggggtggggcgggatgggagatggggtctggaggggcccaggatccgggcagggccgagtgtgagggtccccccaggctgggacatctcgtcgctgaacctggccgaggcgatgcggcgcgcgaaggtgctggactgggggctgcaggagcaactgtggccgcacatggaggccctgcggccccggccttctgtttacatccccgaattcatcgcggccaaccagagcgcgcgcgcggacaacctcatcccaggctcgcgtgcgcagcaggtgctgtcccatcccgcatcccttgcttcctgccacctgttcttcgccacttggttccctctttttgccccaccccgcgaatccaggcctcacttgacacccggggaactgagtagcccaggcctctgtgagtccgagagtatgtacaaccaacttccctacaccctctccatcctccccacaccctcaccatccaacccacagctggagcagatccgcagggacatccgagacttccggtctagcgcggggctggacaaagtcatagtgctgtggacggcgaacacggagcgcttctgtgaggtgattccaggcctcaacgacacagccgagaacctgctgcgcaccattgagctcggtctggaggtgtcgccctccacgctcttcgccgtggccagcatcctggagggctgtgccttcctcaatgggtctccgcagaacaccctggtgcccggagctcttgagctcgcgtggcagcaccgggtttttgtgggcggagatgacttcaagtcaggccagaccaaagtcaagtccgtgcttgtggacttcctcattggctccggcctcaagaccatgtccatcgtgagttacaaccacctgggcaacaacgatggggagaacctatcggcgccattgcagttccgctctaaggaggtgtccaagagcaacgtggtggacgacatggtgcagagcaacccagtgctctatacgcccggcgaagagcctgaccactgcgtggtcatcaagtatgtgccgtacgtgggtgacagcaagcgcgcgctggatgagtatacctcggagctgatgctgggcggaaccaacacactggtgctgcacaacacgtgtgaggactcgctgctggccgcacccatcatgctggacctagcgctgctgaccgagctgtgccagcgcgtgagcttctgcactgacatggaccccgagccgcagaccttccaccccgtgctgtccctgctcagcttcctcttcaaggcgccactagtgccgcccggcagcccggtggtcaatgcgcttttccgccagcgcagctgcatcgagaacatcctcagggcctgcgtggggctcccgccacagaaccacatgctcctggaacacaaaatggagcgcccagggcccagcctcaagcgagttggacccgtggctgccacctaccctatgttgaacaagaaaggaccggtacccgctgccaccaatggctgcaccggtgatgccaatgggcatctgcaagaggagcccccaatgcccaccacctgaggccccggtcacacagtttctcggctcttcctccccgctgccccccacgaccctaccttgaaggcccccacaaataaaggcgctgccactc

SEQ ID NO: 10086 - DNA, 1466 bp, Homo sapiens
  source 1..1466: mol_type = unassigned DNA
ctgcctgagtcgactctgcgccgcccgccgcgatggaggccgccgcccagttcttcgtcgagagcccggacgtggtctacggccccgaggccatcgaggcgcaatacgagtaccggacgacgcgcgtcagccgcgagggtggcgttctcaaggctgggacatctcgtcgctgaacctggccgaggcgatgcggcgcgcgaaggtgctggactgggggctgcaggagcaactgtggccgcacatggaggccctgcggccccggccttctgtttacatccccgaattcatcgcggccaaccagagcgcgcgcgcggacaacctcatcccaggctcgcgtgcgcagcagctggagcagatccgcagggacatccgagacttccggtctagcgcggggctggacaaagtcatagtgctgtggacggcgaacacggagcgcttctgtgaggtgattccaggcctcaacgacacagccgagaacctgctgcgcaccattgagctcggtctggaggtgtcgccctccacgctcttcgccgtggccagcatcctggagggctgtgccttcctcaatgggtctccgcagaacaccctggtgcccggagctcttgagctcgcgtggcagcaccgggtttttgtgggcggagatgacttcaagtcaggccagaccaaagtcaagtccgtgcttgtggacttcctcattggctccggcctcaagaccatgtccatcgtgagttacaaccacctgggcaacaacgatggggagaacctatcggcgccattgcagttccgctctaaggaggtgtccaagagcaacgtggtggacgacatggtgcagagcaacccagtgctctatacgcccggcgaagagcctgaccactgcgtggtcatcaagtatgtgccgtacgtgggtgacagcaagcgcgcgctggatgagtatacctcggagctgatgctgggcggaaccaacacactggtgctgcacaacacgtgtgaggactcgctgctggccgcacccatcatgctggacctagcgctgctgaccgagctgtgccagcgcgtgagcttctgcactgacatggaccccgagccgcagaccttccaccccgtgctgtccctgctcagcttcctcttcaaggcgccactagtgccgcccggcagcccggtggtcaatgcgcttttccgccagcgcagctgcatcgagaacatcctcagggcctgcgtggggctcccgccacagaaccacatgctcctggaacacaaaatggagcgcccagggcccagcctcaagcgagttggacccgtggctgccacctaccctatgttgaacaagaaaggaccggtacccgctgccaccaatggctgcaccggtgatgccaatgggcatctgcaagaggagcccccaatgcccaccacctgaggccccggtcacacagtttctcggctcttcctccccgctgccccccacgacc

SEQ ID NO: 10087 - DNA, 860 bp, Homo sapiens
  source 1..860: mol_type = unassigned DNA
ccccaccccgcgaatccaggcctcacttgacacccggggaactgagtagcccaggcctctgtgagtccgagagtatgtacaaccaacttccctacaccctctccatcctccccacaccctcaccatccaacccacagctggagcagatccgcagggacatccgagacttccggtctagcgcggggctggacaaagtcatagtgctgtggacggcgaacacggagcgcttctgtgaggtgattccaggcctcaacgacacagccgagaacctgctgcgcaccattgagctcggtctggaggtgtcgccctccacgctcttcgccgtggccagcatcctggagggctgtgccttcctcaatgggtctccgcagaacaccctggtgcccggagctcttgagctcgcgtggcagcaccgggtttttgtgggcggagatgacttcaagtcaggccagaccaaagtcaagtccgtgcttgtggacttcctcattggctccggcctcaagaccatgtccatcgtgagttacaaccacctgggcaacaacgatggggagaacctatcggcgccattgcagttccgctctaaggaggtgtccaagagcaacgtggtggacgacatggtgcagagcaacccagtgctctatacgcccggcgaagagcctgaccactgctatgtgccgtacgtgggtgacagcaagcgcgcgctggatgagtatacctcggagctgatgctgggcggaaccaacacactggtgctgcacaacacgtgtgaggactcgctgctggccgcacccatcatgctggacctagcgctgctgaccgagctgtgccagcgcgtgagcttctgcactgacatggacccc

SEQ ID NO: 10088 - DNA, 371 bp, Homo sapiens
  source 1..371: mol_type = unassigned DNA
cggcgccattgcagttccgctctaaggaggtgtccaagagcaacgtggtggacgacatggtgcagagcaacccagtgctctatacgcccggcgaagagcctgaccactgcgtggtcatcaagtatgtgccgtacgtgggtgacagcaagcgcgcgctggatgagtatacctcggagctgatgctgggcggaaccaacacactggtgctgcacaacacgtgtgaggtgcggcgcggcttcaggggctgctatgggaggcagggcttggccaccgcccccatctcctgacccacccgccccgcaggactcgctgctggccgcacccatcatgctggacctagcgctgctgaccgagctgtgccagcgcgtgag

SEQ ID NO: 10089 - DNA, 592 bp, Homo sapiens
  source 1..592: mol_type = unassigned DNA
gcccgagagcccgcgctgtccgccgccgctgcctgagtcgactctgcgccgcccgccgcgatggaggccgccgcccagttcttcgtcgagagcccggacgtggtctacggccccgaggccatcgaggcgcaatacgagtaccggacgacgcgcgtcagccgcgagggtggcgttctcaaggtgcaccccacgtccacgcgcttcaccttccggaccgcccggcaggtgccccggctcggggtcatgcttgtcggctggggcgggaacaacggctccacactcaccgccgcggtgctggccaatcgactgcgtttgtcctggcccacgcgcagcggccgcaagctggagcagatccgcagggacatccgagacttccggtctagcgcggggctggacaaagtcatagtgctgtggacggcgaacacggagcgcttctgtgaggtgattccaggcctcaacgacacagccgagaacctgctgcgcaccattgagctcggtctggaggtgtcgccctccacgctcttcgccgtggccagcatcctggagggctgtgccttcctcaatgggtctccgcagaacaccctggtgcccg

SEQ ID NO: 10090 - DNA, 627 bp, Homo sapiens
  source 1..627: mol_type = unassigned DNA
ttttctccggaggtcgcgcgcccgagagcccgcgctgtccgccgccgctgcctgagtcgactctgcgccgcccgccgcgatggaggccgccgcccagttcttcgtcgagagcccggacgtggtctacggccccgaggccatcgaggcgcaatacgagtaccggacgacgcgcgtcagccgcgagggtggcgttctcaaggtggaccagggggctgaggaaggaggcgtgctggggagagcggggcggctcggggagaagggcacgggacccgggattcactgcgcggcctgtcttcaggtgcaccccacgtccacgcgcttcaccttccggaccgcccggcaggtgccccggctcggggtcatgcttgtcggctggggcgggaacaacggctccacactcaccgccgcggtgctggccaatcgactgcgtttgtcctggcccacgcgcagcggccgcaaggaggccaactactacggctcgctgactcaggcgggcaccgtgagcctgggcctggacgccgagggccaggaggtgttcgtacccttcagcgcggtgctgcccatggtggcgcccaacgacctcgtgttcgatggctgggacatctcgtcgctgaacctggccgaggc

SEQ ID NO: 10091 - DNA, 629 bp, Homo sapiens
  source 1..629: mol_type = unassigned DNA
ttttctccggaggtcgcgcgcccgagagcccgcgctgtccgccgccgctgcctgagtcgactctgcgccggtgagtgcggttcggggcagggacggcctccgtggggacccaggctggcttggccccggccgcttagagtccccgctgaccccctgctcaccccgggcccccagcccgccgcgatggaggccgccgcccagttcttcgtcgagagcccggacgtggtctacggccccgaggccatcgaggcgcaatacgagtaccggacgacgcgcgtcagccgcgagggtggcgttctcaaggtgcaccccacgtccacgcgcttcaccttccggaccgcccggcaggtgccccggctcggggtcatgcttgtcggctggggcgggaacaacggctccacactcaccgccgcggtgctggccaatcgactgcgtttgtcctggcccacgcgcagcggccgcaaggaggccaactactacggctcgctgactcaggcgggcaccgtgagcctgggcctggacgccgagggccaggaggtgttcgtacccttcagcgcggtgctgcccatggtggcgcccaacgacctcgtgttcgatggctgggacatctcgtcgctgaacctggccga

SEQ ID NO: 10092 - DNA, 10192 bp, Homo sapiens
  source 1..10192: mol_type = unassigned DNA
gtgcaggctgcaggcgccgcgccgaggaggctgccgctctggcttgccgccccccgccgccgctgcacaccggacccagccgccgtgccgcgggccatggacctgcccaggggcctggtggtggcctgggcgctcagcctgtggccagggttcacggacaccttcaacatggacaccaggaagccccgggtcatccctggctccaggaccgccttctttggctacacagtgcagcagcacgacatcagtggcaataagtggctggtcgtgggcgccccactggaaaccaatggctaccagaagacgggagacgtgtacaagtgtccagtgatccacgggaactgcaccaaactcaacctgggaagggtcaccctgtccaacgtgtccgagcggaaagacaacatgcgcctcggccttagtctcgccaccaaccccaaggacaacagcttcctggcctgcagccccctctggtctcatgagtgtgggagctcctactacaccacagggatgtgttcaagagtcaactccaacttcaggttctccaagaccgtggccccagctctccaaaggtgccagacctacatggacatcgtcattgtcctggatggctccaacagcatctacccctgggtggaggttcagcacttcctcatcaacatcctgaaaaagttttacattggcccagggcagatccaggttggagttgtgcagtatggcgaagatgtggtgcatgagtttcacctcaacgactacaggtctgtaaaagatgtggtggaagctgccagccacattgagcagagaggaggaacagagacccggacggcatttggcattgaatttgcacgctcagaggctttccagaagggtggaaggaaaggagccaagaaggtgatgattgtcatcacagatggggagtcccacgacagcccagacctggagaaggtgatccagcaaagcgaaagagacaacgtaacaagatatgcggtggccgtcctgggctactacaaccgcagggggatcaatccagaaacttttctaaatgaaatcaaatacatcgccagtgaccctgatgacaagcacttcttcaatgtcactgatgaggctgccttgaaggacattgtcgatgccctgggggacagaatcttcagcctggaaggcaccaacaagaacgagacctcctttgggctggagatgtcacagacgggcttttcctcgcacgtggtggaggatggggttctgctgggagccgtcggtgcctatgactggaatggagctgtgctaaaggagacgagtgccgggaaggtcattcctctccgcgagtcctacctgaaagagttccccgaggagctcaagaaccatggtgcatacctggggtacacagtcacatcggtcgtgtcctccaggcaggggcgggtgtacgtggccggagccccccggttcaaccacacgggcaaggtcatcctgttcaccatgcacaacaaccggagcctcaccatccaccaggctatgcggggccagcagataggctcttactttgggagtgaaatcacctcggtggacatcgacggcgacggcgtgactgatgtcctgctggtgggcgcacccatgtacttcaacgagggccgtgagcgaggcaaggtgtacgtctatgagctgagacagaacctgtttgtttataacggaacgctaaaggattcacacagttaccagaatgcccgatttgggtcctccattgcctcagttcgagacctcaaccaggattcctacaatgacgtggtggtgggagcccccctggaggacaaccacgcaggagccatctacatcttccacggcttccgaggcagcatcctgaagacacctaagcagagaatcacagcctcagagctggctaccggcctccagtattttggctgcagcatccacgggcaattggacctcaatgaggatgggctcatcgacctggcagtgggagcccttggcaacgctgtgattctgtggtcccgcccagtggttcagatcaatgccagcctccactttgagccatccaagatcaacatcttccacagagactgcaagcgcagtggcagggatgccacctgcctggccgccttcctctgcttcacgcccatcttcctggcaccccatttccaaacaacaactgttggcatcagatacaacgccaccatggatgagaggcggtatacaccgagggcccacctggacgagggcggggaccgattcaccaacagagccgtactgctctcctccggccaggagctctgtgagcggatcaacttccatgtcctggacactgctgactacgtgaagccagtgaccttctcagtcgagtattccctggaggaccctgaccatggccccatgctggacgacggctggcccaccactctcagagtctcggtgcccttctggaacggctgcaatgaggatgagcactgtgtccctgaccttgtgttggatgcccggagtgacctgcccacggccatggagtactgccagagggtgctgaggaagcctgcgcaggactgctccgcatacacgctgtccttcgacaccacagtcttcatcatagagagcacacgccagcgagtggcggtggaggccacactggagaacaggggcgagaacgcctacagcacggtcctaaatatctcgcagtcagcaaacctgcagtttgccagcttgatccagaaggaggactcagacggtagcattgagtgtgtgaacgaggagaggaggctccagaagcaagtctgcaacgtcagctatcccttcttccgggccaaggccaaggtggctttccgtcttgattttgagttcagcaaatccatcttcctacaccacctggagatcgagctcgctgcaggcagtgacagtaatgagcgggacagcaccaaggaagacaacgtggcccccttacgcttccacctcaaatacgaggctgacgtcctcttcaccaggagcagcagcctgagccactacgaggtcaagcccaacagctcgctggagagatacgatggtatcgggcctcccttcagctgcatcttcaggatccagaacttgggcttgttccccatccacgggatgatgatgaagatcaccattcccatcgccaccaggagcggcaaccgcctactgaagctgagggacttcctcacggacgaggtggcgaacacgtcctgtaacatctggggcaatagcactgagtaccggcccaccccagtggaggaagacttgcgtcgtgctccacagctgaatcacagcaactctgatgtcgtctccatcaactgcaatatacggctggtccccaaccaggaaatcaatttccatctactggggaacctgtggttgaggtccctaaaagcactcaagtacaaatccatgaaaatcatggtcaacgcagccttgcagaggcagttccacagccccttcatcttccgtgaggaggatcccagccgccagatcgtgtttgagatctccaagcaagaggactggcaggtccccatctggatcattgtaggcagcaccctggggggcctcctactgctggccctgctggtcctggcactgtggaagctcggcttctttagaagtgccaggcgcaggagggagcctggtctggaccccacccccaaagtgctggagtgaggctccagaggagactttgagttgatgggggccaggacaccagtccaggtagtgttgagacccaggcctgtggccccaccgagctggagcggagaggaagccagctggctttgcacttgacctcatctcccgagcaatggcgcctgctccctccagaatggaactcaagctggttttaagtggaactgccctactgggagactgggacacctttaacacagacccctagggatttaaagggacacccctacacacacccaggcccatgccaaggcctccctcaggctctgtggagggcatttgctgccccagctactaaggtgctaggaattcgtaatcatccccatcctccagagaaacccagggaggaagactgtaaatacgaacccaatctgcacactccaggcctctagttccagaaggatccaagacaaaacagatctgaattctgcccttttctctcacccatcccacccctccattggctcccaagtcacacccactcccttccccatagataggcccctggggctcccgaagaatgaacccaagagcaagggcttgatggtgacagctgcaagccagggatgaagaaagactctgagatgtggagactgatggccaggcaagtgggaccaggatactggacgctgtcctgagatgagaggtagccgggctctgcacccacgtgcattcacattgaccgcaactcacacattcccccaccagctgcagccccttgctctcagctgccaaccctcccgggtcacttttgttcccaggtacctcatgggaagcatgtggatgacacaatccctggggctgtgcattcccacgtcttcttgctgcagcctgcccctagacatggacgcaccggcctggctgcagctgggcagcaggggtaggggtagggagcctcccctccctgtatcaccccctccctacacacacacacacacacacacacacacacacacacacacacacacacacacacacacactgcctcccatccttccctcatgcccgccagtgcacagggaagggcttggccagcgctgttgaggggtcccctctggaatgcactgaataaagcacgtgcaaggactcccggagcctgtgcagccttggtggcaaatatctcatctgccggcccccaggacaagtggtatgaccagtgataatgccccaaggacaaggggcgtgcctggcgcccagtggagtaatttatgccttagtcttgttttgaggtagaaatgcaagggggacacatgaaaggcatcagtccccctgtgcatagtacgacctttactgtcgtatttttgaaaaattaaaaatacagtgtttaaaaacaaccaagcactgacatcccattctgtgggcagagcatatcacagtgagccatactcccctttgaaggagaggaagtagaatgagggagttccttgcttcctcccccctacctctacatgtcagaagggactcatccaccatttgctgcccacaacatgccctcctagtggctgcctggcctccgtgtgacgtctccagtggtggagcgctccctctcccaagatcacccttccatctatggccagtgtggacggttaggacctaaatgtttcactgtagcttctgcccttggttccagctcttccctctcacgcctcccagacttctccaggccggtttcattgttaaccgtcttacactctgacatcagccaaggcgtctccattctgttcttgtgccattcatgtcttggattcccagtaagtagaaccttggaaataatttgatcttgtttttgcataaatgaggacactcagaaccaggaagagccctaggctcccacagcaaaaccaaaactaaacccaggactgctatttcccaagccagattctgttattcgagcccagccttagaagggcttgatgtggagcaaaaggtgaaaatggtgaaactaaaatttgagtatcaaaacccattgccttctaatagaatcagaaggaaatgttgctaaatcatattccatttccgtcatcactcttatgaatggggtaacctggctaaatgagaattaatgaacccacactcataagttttcattgacttagcaccaagtcgtccatcaaatatcatcagatctgagaatgctcttatggatatctgatttttagaggctggcattcatatttttaaaaactgccacctgtgaccacactgcaggccaaacagaatgtacctgctggtcagatgcagcccagaggtcactgaattgcaacctctggactctcggtcagaggcaagcagcccttattccagaactccacagtccttcacacccttccccagacctacaccaagaccaactaagtggtcaaaaggtggacaaactgagagttgtatcaaggcccttagcctctcaatttgttatcaagtttccctttctgaatctatttaccctgaagtataaatacccaagatgagccttaagagtgcctggtagagcaaacaaagatgcatcttatagggagcaaagtctatgctaacgcagtgtttctcaatcctggctgcacctttgaaccacgggagctttaaaagtgaccactgcaagggccctacccactatggatcccaatttcattggttgggagaggggccaagtttgtttccaacttccccagatgactctaatggctgagagttgcaatcaacaggtaagtgaatatccaggctgtaagatgaagaaagagggggttgtgcccaagcccactgtgcctcataaagcagatgatctctgcagcgctgcgcttctcaaagagtggtcccaggactgcctcagtcagaccacagactcctaagttcctcctcagacttcatggatccaagctctgtgaggtaattctaagcacattaaacttgtagaacagccatctggatttaatattacataatagctataatattctgctattctctaatcttcaatgtcagtttcttaaactgtcaggcctgtctttagatgcccttcaactgtgctggggactatcttgatggcagccagcaaagaaaatcagcaaaaaccccagtggagtttctgggttttacttttgttaaggaaggtgatggtttcttgacatgacaggtatctaggtggaaagggcaaagtgctaatgcaaacacaatggagacactatggaatagctctgcctagggacatgtggaagagcttctaggagacagtgtggacctttccatccctagaggtcttcacaagataaattcctacctccgtcagtattcaaaaggttttagcatcaatactgtctgagaataagacattagacttgagtcagtcccctggcttcaatcccaggatgccaagcagcctctaatggagaccgctggcttaatcgtgctcctttcctggcataacaactcactgcacccatgcctcaccaccacgaagcagtctcctcaccacccaaatgtgccttgggtgacttaaatacagccattagtatgaatggtcccctgtttttattcaacaccacaccagtctttgcttttaccttcggctaatgtggttccagccttttatcctgcactccttcttataatttaaaaaaaaaaaaaactcccctactatctttatgttaatattaacatcaactaggttcttctcaaaggacagccaggcctaactggccacgttaaaatctgcacagtgcttttgtgtcactgtctattctattagtttcaacatcatgctaaaataggacagcatgttccaaaactgaaactgaaacaggaacggagccttgctgatttagcatgaggagggaattgtaagccttgcacctggacactaaaacttttcaataagatgtatgctaagccgtacctagcaaacttaccaggtccaaagtagagtacaagcagaaagttatttttaaaggatgggcactatccttgagggacttaccctttctaatcagctttgcatggtttgttttgagacagtgtctcactctgttgcccaggctagagtgcagcggcaccatcacagctcacggcagcctctgcctcccgggctcaagcaatcccacctcagtttcccaagtagctgggactacaggcacacaccacactcagctaattttagtattttttgtagagacagggtctcgccatgttgcccaggctggtctcaaactcctggattatctccctggccctgcattaaaaaagatgtgcaacaacttagtgatgtgtctgaaatgttttcagaaggtggcccaagtcagagtcaaaaaatttttttatttggaaaattagaggaaatacagaaaatcaaatttcaaatagatgcatctaaatggagaacaagcttatcaaggacagagtccatctttcttatttttatttttgagacagggtcttgctctgtcacccaggctagagtgcagcggcacaatcacagctccctgcagcctcgacctcctggacttcagtgatcctcccacctcagcctcttgagtagctgggactacagacatgcaccaccatgcccagctaattttttttttaattttgtgcagagagggggtctcactttgttgcccacactggtctctcttatttttgtatgcatatctgtggtgcagtgcctgaaatacagtaggtgttcaataagcgccaacatgcaagagtatcttgccattgattaaggcaaaagcaaaaccccagtccgcccctctgatggactgagcacaccaaatttctaaagcacaggcaaattagaaaatataattttgtctaaacttgccaacaagctaaggttttgtgaaccacctaaaatttgcctctctcatactgaaattttctaggtcaagtatctgaaggaatacactactgccagtattttctttggtgatctgtcatatacagcagacattacttgaaacaaagaaaaaaatgttttaaaacctgtctggatgatttccgcagtctcactaggttattgcagccagggagtgacctagcagagatctgaaggtgagcttccctagtactggcatctcacagtgaaagagcactgttcagtgggtcaagagacccagagcctactctcagttacgacacacatagtccttgtgtggcctttctgggcttgtgtcctgaactataaaatgagagggtggcactaaatgtttttttcagatctctatagaggctggaatggccacagagaatctaaatttgaaaacaaacatgtcctgagggtgtgctccaataccaccctttaatactctcctgagatgtgaaggctggaaatgagaatgccatattattgttacttgcaaacgattagtgtatctgggacatccaaaagaagtaactgaaaatttatttctttaaaaacaaaaaaaaccattacagtgcttttgtaaaaacattaatatttagaagtacgtagtggtaataaaaggaaaatagttgtaagaccttcattaaaaagaaaaacctaaaaaaaaaaacaaaacaaaactctggatacaggtgtatgatttacctaaccagacatagctttcttttggataaaaaaaaaaaaaaaaaaaaagctcagaagtgcagaactgtacagatgtccctaaatctattaattcaatgctaaacgaaataatctcttaacatgataaaattacaccaaacttcatctggaaaaataaacacgtaataatgaaaaaagttagccactcccacctccccacttaaaaaagacaaatgaagaaatactagtccaaggccaggtgtggtggctcacatctgtaatcccaacactttgagaggctgaggtgggaggactgcttgaacccaggagttcaagaccagcctaggcatcatggcaaaaccccatctctacaaaaaataccaaaataaaaagaattagctgggcatggtggcacatacctgtagtcccagctacttgggaggctgaggtgagaggatcacttgagcccggaagatcaaggcgacagtaagccatgatggcaccactgcactccagcctgggtgacagaatgaaaccctgtctcaaaaaacaaacaaacaaaaaccaaacaaattataggaaaatcaacattttaaaccaaagaagagaaggagaaagaagggaagggaagccataaaagtgtctttttcaaatagatcatgggggaaaaaaaaaaaaagtatgacttggaatagagacagccttacaagcaggatctaaaactcagaatccatttttttaaattgtgataaatttgactatagaaaaatgtaaactttggatacaaaagtaccatatttaaagtaaataagctacaactattacatgacagagaaaatgtcctcaaacttctaaggaacttctaacaagtagaaaaaaaacacacacaaccccaaagcaaacaccaatagtcaataaatatatgaaagtgttcaatgttactcataataaaggcatacaaatcaaacc

SEQ ID NO: 10093 - DNA, 3955 bp, Homo sapiens
  source 1..3955: mol_type = unassigned DNA
gtgcaggctgcaggcgccgcgccgaggaggctgccgctctggcttgccgccccccgccgccgctgcacaccggacccagccgccgtgccgcgggccatggacctgcccaggggcctggtggtggcctgggcgctcagcctgtggccagggttcacggacaccttcaacatggacaccaggaagccccgggtcatccctggctccaggaccgccttctttggctacacagtgcagcagcacgacatcagtggcaataagtggctggtcgtgggcgccccactggaaaccaatggctaccagaagacgggagacgtgtacaagtgtccagtgatccacgggaactgcaccaaactcaacctgggaagggtcaccctgtccaacgtgtccgagcggaaagacaacatgcgcctcggccttagtctcgccaccaaccccaaggacaacagcttcctggcctgcagccccctctggtctcatgagtgtgggagctcctactacaccacagggatgtgttcaagagtcaactccaacttcaggttctccaagaccgtggccccagctctccaaaggtgccagacctacatggacatcgtcattgtcctggatggctccaacagcatctacccctgggtggaggttcagcacttcctcatcaacatcctgaaaaagttttacattggcccagggcagatccaggttggagttgtgcagtatggcgaagatgtggtgcatgagtttcacctcaacgactacaggtctgtaaaagatgtggtggaagctgccagccacattgagcagagaggaggaacagagacccggacggcatttggcattgaatttgcacgctcagaggctttccagaagggtggaaggaaaggagccaagaaggtgatgattgtcatcacagatggggagtcccacgacagcccagacctggagaaggtgatccagcaaagcgaaagagacaacgtaacaagatatgcggtggccgtcctgggctactacaaccgcagggggatcaatccagaaacttttctaaatgaaatcaaatacatcgccagtgaccctgatgacaagcacttcttcaatgtcactgatgaggctgccttgaaggacattgtcgatgccctgggggacagaatcttcagcctggaaggcaccaacaagaacgagacctcctttgggctggagatgtcacagacgggcttttcctcgcacgtggtggaggatggggttctgctgggagccgtcggtgcctatgactggaatggagctgtgctaaaggagacgagtgccgggaaggtcattcctctccgcgagtcctacctgaaagagttccccgaggagctcaagaaccatggtgcatacctggggtacacagtcacatcggtcgtgtcctccaggcaggggcgggtgtacgtggccggagccccccggttcaaccacacgggcaaggtcatcctgttcaccatgcacaacaaccggagcctcaccatccaccaggctatgcggggccagcagataggctcttactttgggagtgaaatcacctcggtggacatcgacggcgacggcgtgactgatgtcctgctggtgggcgcacccatgtacttcaacgagggccgtgagcgaggcaaggtgtacgtctatgagctgagacagaacctgtttgtttataacggaacgctaaaggattcacacagttaccagaatgcccgatttgggtcctccattgcctcagttcgagacctcaaccaggattcctacaatgacgtggtggtgggagcccccctggaggacaaccacgcaggagccatctacatcttccacggcttccgaggcagcatcctgaagacacctaagcagagaatcacagcctcagagctggctaccggcctccagtattttggctgcagcatccacgggcaattggacctcaatgaggatgggctcatcgacctggcagtgggagcccttggcaacgctgtgattctgtggtcccgcccagtggttcagatcaatgccagcctccactttgagccatccaagatcaacatcttccacagagactgcaagcgcagtggcagggatgccacctgcctggccgccttcctctgcttcacgcccatcttcctggcaccccatttccaaacaacaactgttggcatcagatacaacgccaccatggatgagaggcggtatacaccgagggcccacctggacgagggcggggaccgattcaccaacagagccgtactgctctcctccggccaggagctctgtgagcggatcaacttccatgtcctggacactgctgactacgtgaagccagtgaccttctcagtcgagtattccctggaggaccctgaccatggccccatgctggacgacggctggcccaccactctcagagtctcggtgcccttctggaacggctgcaatgaggatgagcactgtgtccctgaccttgtgttggatgcccggagtgacctgcccacggccatggagtactgccagagggtgctgaggaagcctgcgcaggactgctccgcatacacgctgtccttcgacaccacagtcttcatcatagagagcacacgccagcgagtggcggtggaggccacactggagaacaggggcgagaacgcctacagcacggtcctaaatatctcgcagtcagcaaacctgcagtttgccagcttgatccagaaggaggactcagacggtagcattgagtgtgtgaacgaggagaggaggctccagaagcaagtctgcaacgtcagctatcccttcttccgggccaaggccaaggtggctttccgtcttgattttgagttcagcaaatccatcttcctacaccacctggagatcgagctcgctgcaggcagtgacagtaatgagcgggacagcaccaaggaagacaacgtggcccccttacgcttccacctcaaatacgaggctgacgtcctcttcaccaggagcagcagcctgagccactacgaggtcaagcccaacagctcgctggagagatacgatggtatcgggcctcccttcagctgcatcttcaggatccagaacttgggcttgttccccatccacgggatgatgatgaagatcaccattcccatcgccaccaggagcggcaaccgcctactgaagctgagggacttcctcacggacgaggcgaacacgtcctgtaacatctggggcaatagcactgagtaccggcccaccccagtggaggaagacttgcgtcgtgctccacagctgaatcacagcaactctgatgtcgtctccatcaactgcaatatacggctggtccccaaccaggaaatcaatttccatctactggggaacctgtggttgaggtccctaaaagcactcaagtacaaatccatgaaaatcatggtcaacgcagccttgcagaggcagttccacagccccttcatcttccgtgaggaggatcccagccgccagatcgtgtttgagatctccaagcaagaggactggcaggtccccatctggatcattgtaggcagcaccctggggggcctcctactgctggccctgctggtcctggcactgtggaagctcggcttctttagaagtgccaggcgcaggagggagcctggtctggaccccacccccaaagtgctggagtgaggctccagaggagactttgagttgatgggggccaggacaccagtccaggtagtgttgagacccaggcctgtggccccaccgagctggagcggagaggaagccagctggctttgcacttgacctcatctcccgagcaatggcgcctgctccctccagaatggaactcaagctggttttaagtggaactgccctactgggagactgggacacctttaacacagacccctagggatttaaagggacacccctacacacacccaggcccatgccaaggcctccctcaggctctgtg

SEQ ID NO: 10094 - DNA, 783 bp, Homo sapiens
  source 1..783: mol_type = unassigned DNA
ctttattttctccagcaggggctggggtgcagtgagttctccctaccctccaaacccccttcctgggtcctgcctcttccaggcctccccagctgcccctaggaattatggccctgcgtgattgaatctgctcagctagccctgaacctaccccatcactggcccatcctctggcactgccaagccatgcaccgggccaagcaacgcctgctgaggacacggtgccaaagatcagcctgtttcctcctgtggcagggtacacagtcacatcggtcgtgtcctccaggcaggggcgggtgtacgtggccggagccccccggttcaaccacacgggcaaggtcatcctgttcaccatgcacaacaaccggagcctcaccatccaccaggctatgcggggccagcagataggctcttactttgggagtgaaatcacctcggtggacatcgacggcgacggcgtgactgatgtcctgctggtgggcgcacccatgtacttcaacgagggccgtgagcgaggcaaggtgtacgtctatgagctgagacagaacctgtttgtttataacggaacgctaaaggattcacacagttaccagaatgcccgatttgggtcctccattgcctcagttcgagacctcaaccaggattcctacaatgacgtggtggtgggagcccccctggaggacaaccacgcaggagccatctacatcttccacggcttccgaggcagcatcctgaagacacctaagcagagaatcacagcctcagagctggctaccggcctcc

SEQ ID NO: 10095 - DNA, 567 bp, Homo sapiens
  source 1..567: mol_type = unassigned DNA
attttccttcctcttccaagtgctggctgtttgtctgcctgtacccagtaggatggggttctgctgggagccgtcggtgcctatgactggaatggagctgtgctaaaggagacgagtgccgggaaggtcattcctctccgcgagtcctacctgaaagagttccccgaggagctcaagaaccatggtgcatacctgggcaggggcgggtgtacgtggccggagccccccggttcaaccacacgggcaaggtcatcctgttcaccatgcacaacaaccggagcctcaccatccaccaggctatgcggggccagcagataggctcttactttgggagtgaaatcacctcggtggacatcgacggcgacggcgtgactgatgtcctgctggtgggcgcacccatgtacttcaacgagggccgtgagcgaggcaaggtgtacgtctatgagctgagacagaacctgtttgtttataacggaacgctaaaggattcacacagttaccagaatgcccgatttgggtcctccattgcctcagttcgagacctcaaccaggattcctacaatgacg

SEQ ID NO: 10096 - DNA, 670 bp, Homo sapiens
  source 1..670: mol_type = unassigned DNA
actcacttcctttccttcggtggcctccaggatgatctggaagggtcaccctgtccaacgtgtccgagcggaaagacaacatgcgcctcggccttagtctcgccaccaaccccaaggacaacagcttcctggcctgcagccccctctggtctcatgagtgtgggagctcctactacaccacagggatgtgttcaagagtcaactccaacttcaggttctccaagaccgtggccccagctctccaaaggtgccagacctacatggacatcgtcattgtcctggatggctccaacagcatctacccctgggtggaggttcagcacttcctcatcaacatcctgaaaaagttttacattggcccagggcagatccaggttggagttgtgcagtatggcgaagatgtggtgcatgagtttcacctcaacgactacaggtctgtaaaagatgtggtggaagctgccagccacattgagcagagaggaggaacagagacccggacggcatttggcattgaatttgcacgctcagaggctttccagaagggtggaaggaaaggagccaagaaggtgatgattgtcatcacagatggggagtcccacgacagcccagacctggagaaggtgatccagcaaagcgaaagagacaacgtaacaagatatgcggtggccgt

SEQ ID NO: 10097 - DNA, 401 bp, Homo sapiens
  source 1..401: mol_type = unassigned DNA
agagtcaactccaacttcaggttctccaagaccgtggccccagctctccaaaggtgccagacctacatggacatcgtcattgtcctggatggctccaacagcatctacccctgggtggaggttcagcacttcctcatcaacatcctgaaaaagttttacattggcccagggcagatccaggttggagttgtgcagtatggcgaagatgtggtgcatgagtttcacctcaacgactacaggtctgtaaaagatgtggtggaagctgccagccacattgagcagagaggaggaacagagacccggacggcatttggcattgaatttgcacggtaaaaaaaaagtagaacaaaaaaaatttttttagatctcagatgctattgtagttatctattgccttgtaa

SEQ ID NO: 10098 - DNA, 651 bp, Homo sapiens
  source 1..651: mol_type = unassigned DNA
gaacagggccttgaaaaaacaatgaaagagactccaagatcagtttttctccattagacctgaaaccaaaggaactagtacacattgcagcaagagagagttcagttagacccaaagaagatccctcaccccctcacccctcagatagaagtctgtcttgggtcgtggaggatgggagtgggcctcaggccattggacctcgatcctctctgaggtcccctcactgactggggatctgcactgccctccccaggcctgcagccccctctggtctcatgagtgtgggagctcctactacaccacagggatgtgttcaagagtcaactccaacttcaggttctccaagaccgtggccccagctctccaaaggtgccagacctacatggacatcgtcattgtcctggatggctccaacagcatctacccctgggtggaggttcagcacttcctcatcaacatcctgaaaaagttttacattggcccagggcagatccaggttggagttgtgcagtatggcgaagatgtggtgcatgagtttcacctcaacgactacaggtctgtaaaagatgtggtggaagctgccagccacattgagcagagaggaggaacagagacccggacggcatttggcattgaatttgcacggtaaaa

SEQ ID NO: 10099 - DNA, 7869 bp, Homo sapiens
  source 1..7869: mol_type = unassigned DNA
ttttccctgctctcaccgggcgggggagagaagccctctggacagcttctagagtgtgcaggttctcgtatccctcggccaagggtatcctctgcaaacctctgcaaacccagcgcaactacggtcccccggtcagacccaggatggggccagaacggacaggggccgcgccgctgccgctgctgctggtgttagcgctcagtcaaggcattttaaattgttgtttggcctacaatgttggtctcccagaagcaaaaatattttccggtccttcaagtgaacagtttggctatgcagtgcagcagtttataaatccaaaaggcaactggttactggttggttcaccctggagtggctttcctgagaaccgaatgggagatgtgtataaatgtcctgttgacctatccactgccacatgtgaaaaactaaatttgcaaacttcaacaagcattccaaatgttactgagatgaaaaccaacatgagcctcggcttgatcctcaccaggaacatgggaactggaggttttctcacatgtggtcctctgtgggcacagcaatgtgggaatcagtattacacaacgggtgtgtgttctgacatcagtcctgattttcagctctcagccagcttctcacctgcaactcagccctgcccttccctcatagatgttgtggttgtgtgtgatgaatcaaatagtatttatccttgggatgcagtaaagaattttttggaaaaatttgtacaaggcctggatataggccccacaaagacacaggtggggttaattcagtatgccaataatccaagagttgtgtttaacttgaacacatataaaaccaaagaagaaatgattgtagcaacatcccagacatcccaatatggtggggacctcacaaacacattcggagcaattcaatatgcaagaaaatatgcttattcagcagcttctggtgggcgacgaagtgctacgaaagtaatggtagttgtaactgacggtgaatcacatgatggttcaatgttgaaagctgtgattgatcaatgcaaccatgacaatatactgaggtttggcatagcagttcttgggtacttaaacagaaacgcccttgatactaaaaatttaataaaagaaataaaagcaatcgctagtattccaacagaaagatactttttcaatgtgtctgatgaagcagctctactagaaaaggctgggacattaggagaacaaattttcagcattgaaggtactgttcaaggaggagacaactttcagatggaaatgtcacaagtgggattcagtgcagattactcttctcaaaatgatattctgatgctgggtgcagtgggagcttttggctggagtgggaccattgtccagaagacatctcatggccatttgatctttcctaaacaagcctttgaccaaattctgcaggacagaaatcacagttcatatttaggttactctgtggctgcaatttctactggagaaagcactcactttgttgctggtgctcctcgggcaaattataccggccagatagtgctatatagtgtgaatgagaatggcaatatcacggttattcaggctcaccgaggtgaccagattggctcctattttggtagtgtgctgtgttcagttgatgtggataaagacaccattacagacgtgctcttggtaggtgcaccaatgtacatgagtgacctaaagaaagaggaaggaagagtctacctgtttactatcaaagagggcattttgggtcagcaccaatttcttgaaggccccgagggcattgaaaacactcgatttggttcagcaattgcagctctttcagacatcaacatggatggctttaatgatgtgattgttggttcaccactagaaaatcagaattctggagctgtatacatttacaatggtcatcagggcactatccgcacaaagtattcccagaaaatcttgggatccgatggagcctttaggagccatctccagtactttgggaggtccttggatggctatggagatttaaatggggattccatcaccgatgtgtctattggtgcctttggacaagtggttcaactctggtcacaaagtattgctgatgtagctatagaagcttcattcacaccagaaaaaatcactttggtcaacaagaatgctcagataattctcaaactctgcttcagtgcaaagttcagacctactaagcaaaacaatcaagtggccattgtatataacatcacacttgatgcagatggattttcatccagagtaacctccagggggttatttaaagaaaacaatgaaaggtgcctgcagaagaatatggtagtaaatcaagcacagagttgccccgagcacatcatttatatacaggagccctctgatgttgtcaactctttggatttgcgtgtggacatcagtctggaaaaccctggcactagccctgcccttgaagcctattctgagactgccaaggtcttcagtattcctttccacaaagactgtggtgaggacggactttgcatttctgatctagtcctagatgtccgacaaataccagctgctcaagaacaaccctttattgtcagcaaccaaaacaaaaggttaacattttcagtaacgctgaaaaataaaagggaaagtgcatacaacactggaattgttgttgatttttcagaaaacttgttttttgcatcattctccctgccggttgatgggacagaagtaacatgccaggtggctgcatctcagaagtctgttgcctgcgatgtaggctaccctgctttaaagagagaacaacaggtgacttttactattaactttgacttcaatcttcaaaaccttcagaatcaggcgtctctcagtttccaagccttaagtgaaagccaagaagaaaacaaggctgataatttggtcaacctcaaaattcctctcctgtatgatgctgaaattcacttaacaagatctaccaacataaatttttatgaaatctcttcggatgggaatgttccttcaatcgtgcacagttttgaagatgttggtccaaaattcatcttctccctgaaggtaacaacaggaagtgttccagtaagcatggcaactgtaatcatccacatccctcagtataccaaagaaaagaacccactgatgtacctaactggggtgcaaacagacaaggctggtgacatcagttgtaatgcagatatcaatccactgaaaataggacaaacatcttcttctgtatctttcaaaagtgaaaatttcaggcacaccaaagaattgaactgcagaactgcttcctgtagtaatgttacctgctggttgaaagacgttcacatgaaaggagaatactttgttaatgtgactaccagaatttggaacgggactttcgcatcatcaacgttccagacagtacagctaacggcagctgcagaaatcaacacctataaccctgagatatatgtgattgaagataacactgttacgattcccctgatgataatgaaacctgatgagaaagccgaagtaccaacaggagttataataggaagtataattgctggaatccttttgctgttagctctggttgcaattttatggaagctcggcttcttcaaaagaaaatatgaaaagatgaccaaaaatccagatgagattgatgagaccacagagctcagtagctgaaccagcagacctacctgcagtgggaaccggcagcatcccagccagggtttgctgtttgcgtgaatggatttctttttaaatcccatattttttttatcatgtcgtaggtaaactaacctggtattttaagagaaaactgcaggtcagtttggaatgaagaaattgtggggggtgggggaggtgcggggggcaggtagggaaataatagggaaaatacctattttatatgatgggggaaaaaaagtaatctttaaactggctggcccagagtttacattctaatttgcattgtgtcagaaacatgaaatgcttccaagcatgacaacttttaaagaaaaatatgatactctcagattttaagggggaaaactgttctctttaaaatatttgtctttaaacagcaactacagaagtggaagtgcttgatatgtaagtacttccacttgtgtatattttaatgaatattgatgttaacaagaggggaaaacaaaacacaggttttttcaatttatgctgctcatccaaagttgccacagatgatacttccaagtgataattttatttataaactaggtaaaatttgttgttggttccttttagaccacggctgccccttccacaccccatcttgctctaatgatcaaaacatgcttgaataactgagcttagagtatacctcctatatgtccatttaagttaggagagggggcgatatagagaataaggcacaaaattttgtttaaaactcagaatataacatgtaaaatcccatctgctagaagcccatcctgtgccagaggaaggaaaaggaggaaatttcctttctcttttaggaggcacaacagttctcttctaggatttgtttggctgactggcagtaacctagtgaatttctgaaagatgagtaatttctttggcaaccttcctcctcccttactgaaccactctcccacctcctggtggtaccattattatagaagccctctacagcctgactttctctccagcggtccaaagttatcccctcctttacccctcatccaaagttcccactccttcaggacagctgctgtgcattagatattaggggggaaagtcatctgtttaatttacacacttgcatgaattactgtatataaactccttaacttcagggagctattttcatttagtgctaaacaagtaagaaaaataagctcgagtgaatttctaaatgttggaatgttatgggatgtaaacaatgtaaagtaagacatctcaggatttcaccagaagttacagatgaggcactggaagccaccaaattagcaggtgcaccttctgtggctgtcttgtttctgaagtacttaaacttccacaagagtgaatttgacctaggcaagtttgttcaaaaggtagatcctgagatgatttggtcagattgggataaggcccagcaatctgcattttaacaagcaccccagtcactaggatgcagatggaccacactttgagaaacaccacccatttctactttttgcaccttattttctctgttcctgagcccccacattctctaggagaaacttagaggaaaagggcacagacactacatatctaaagctttggacaagtccttgacctctataaacttcagagtcctcattataaaatgggaagactgagctggagttcagcagtgatgcttttagttttaaaagtctatgatctggacttcctataatacaaatacacaatcctccaagaatttgacttggaaaaaaatgtcaaaggaaaacaggttatctgcccatgtgcatatggacaaccttgactaccctggcctggcccgtggtggcagtccagggctatctgtactgtttacagaattactttgtagttgacaacacaaaacaaacaaaaaaggcataaaatgccagcggtttatagaaaaaacagcatggtattctccagttaggtatgccagagtccaattcttttaacagctgtgagaatttgctgcttcattccaacaaaattttatttaaaaaaaaaaaaaaaagactggagaaactagtcattagcttgataaagaatatttaacagctagtggtgctggtgtgtacctgaagctccagctacttgagagactgagacaggaagatcgcttgagcccaggagttcaagtccagcctaagcaacatagcaagaccctgtctcaaaaaaatgactatttaaaaagacaatgtggccaggcacggtggctcacacctgtaatcccaacactttgggaggctgaggccggtggatcacgaggtcaggagtttgagactagcctggccaacatggtgaaaccccatctctaataatataaaaattagctgggcgtagtagcaggtgcctgtaatcccagttactcgggaagctgaggcaggagaatcacttgaacccgggaggcagaggtttcagtgagccgagatcgcgccactgcactccagcctgggtgacagggcaagactctgtctcaaacaaacaaacaaaaaaaaagttagtactgtatatgtaaatactagcttttcaatgtgctatacaaacaattatagcacatccttccttttactctgtctcacctcctttaggtgagtacttccttaaataagtgctaaacatacatatacggaacttgaaagctttggttagccttgccttaggtaatcagcctagtttacactgtttccagggagtagttgaattactataaaccattagccacttgtctctgcaccatttatcacaccaggacagggtctctcaacctgggcgctactgtcatttggggccaggtgattcttccttgcaggggctgtcctgtaccttgtaggacagcagccctgtcctagaaggtatgtttagcagcattcctggcctctagctacccgatgccagagcatgctccccccgcagtcatgacaatcaaaaaatgtctccagacattgtcaaatgcctcctggggggcagtatttctcaagcacttttaagcaaaggtaagtattcatacaagaaatttagggggaaaaaacattgtttaaataaaagctatgtgttcctattcaacaatatttttgctttaaaagtaagtagagggcataaaagatgtcatattcaaatttccatttcataaatggtgtacagacaaggtctatagaatgtggtaaaaacttgactgcaacacaaggcttataaaatagtaagatagtaaaatagcttatgaagaaactacagagatttaaaattgtgcatgactcatttcagcagcaaaataagaactcctaactgaacagaaatttttctacctagcaatgttattcttgtaaaatagttacctattaaaactgtgaagagtaaaactaaagccaatttattatagtcacacaagtgattatactaaaaattattataaaggttataattttataatgtatttacctgtcctgatatatagctataacccaatatatgaaaatctcaaaaattaagacatcatcatacagaaggcaggattccttaaactgagatccctgatccatctttaatatttcaatttgcacacataaaacaatgcccttttgtgtacattcaggcatacccattttaatcaatttgaaaggttaatttaaacctctagaggtgaatgagaaacatgggggaaaagtatgaaataggtgaaaatcttaactatttctttgaactctaaagactgaaactgtagccattatgtaaataaagtttcatatgtacctgtttattttggcagattaagtcaaaatatgaatgtatatattgcataactatgttagaattgtatatattttaaagaaattgtcttggatattttcctttatacataatagataagtcttttttcaaatgtggtgtttgatgtttttgattaaatgtgttttgcctctttccacaaaaactgtaaaaataaatgcatgtttgtacaaaaagttgcagaattcatttgatttatgagaaacaaaaattaaattgtagtcaacagttagtagtttttctcatatccaagtataacaaacagaaaagtttcattattgtaacccacttttttcataccacattattgaatattgttacaattgttttgaaaataaagccattttctttgggcttttataagtta

SEQ ID NO: 10100 - DNA, 3782 bp, Homo sapiens
  source 1..3782: mol_type = unassigned DNA
accgggcgggggagagaagccctctggacagcttctagagtgtgcaggttctcgtatccctcggccaagggtatcctctgcaaacctctgcaaacccagcgcaactacggtcccccggtcagacccaggatggggccagaacggacaggggccgcgccgctgccgctgctgctggtgttagcgctcagtcaaggcattttaaattgttgtttggcctacaatgttggtctcccagaagcaaaaatattttccggtccttcaagtgaacagtttggctatgcagtgcagcagtttataaatccaaaaggcaactggttactggttggttcaccctggagtggctttcctgagaaccgaatgggagatgtgtataaatgtcctgttgacctatccactgccacatgtgaaaaactaaatttgcaaacttcaacaagcattccaaatgttactgagatgaaaaccaacatgagcctcggcttgatcctcaccaggaacatgggaactggaggttttctcacatgtggtcctctgtgggcacagcaatgtgggaatcagtattacacaacgggtgtgtgttctgacatcagtcctgattttcagctctcagccagcttctcacctgcaactcagcgtggggttaattcagtatgccaataatccaagagttgtgtttaacttgaacacatataaaaccaaagaagaaatgattgtagcaacatcccagacatcccaatatggtggggacctcacaaacacattcggagcaattcaatatgcaagaaaatatgcttattcagcagcttctggtgggcgacgaagtgctacgaaagtaatggtagttgtaactgacggtgaatcacatgatggttcaatgttgaaagctgtgattgatcaatgcaaccatgacaatatactgaggtttggcatagcagttcttgggtacttaaacagaaacgcccttgatactaaaaatttaataaaagaaataaaagcaatcgctagtattccaacagaaagatactttttcaatgtgtctgatgaagcagctctactagaaaaggctgggacattaggagaacaaattttcagcattgaaggtactgttcaaggaggagacaactttcagatggaaatgtcacaagtgggattcagtgcagattactcttctcaaaatgatattctgatgctgggtgcagtgggagcttttggctggagtgggaccattgtccagaagacatctcatggccatttgatctttcctaaacaagcctttgaccaaattctgcaggacagaaatcacagttcatatttaggttactctgtggctgcaatttctactggagaaagcactcactttgttgctggtgctcctcgggcaaattataccggccagatagtgctatatagtgtgaatgagaatggcaatatcacggttattcaggctcaccgaggtgaccagattggctcctattttggtagtgtgctgtgttcagttgatgtggataaagacaccattacagacgtgctcttggtaggtgcaccaatgtacatgagtgacctaaagaaagaggaaggaagagtctacctgtttactatcaaagagggcattttgggtcagcaccaatttcttgaaggccccgagggcattgaaaacactcgatttggttcagcaattgcagctctttcagacatcaacatggatggctttaatgatgtgattgttggttcaccactagaaaatcagaattctggagctgtatacatttacaatggtcatcagggcactatccgcacaaagtattcccagaaaatcttgggatccgatggagcctttaggagccatctccagtactttgggaggtccttggatggctatggagatttaaatggggattccatcaccgatgtgtctattggtgcctttggacaagtggttcaactctggtcacaaagtattgctgatgtagctatagaagcttcattcacaccagaaaaaatcactttggtcaacaagaatgctcagataattctcaaactctgcttcagtgcaaagttcagacctactaagcaaaacaatcaagtggccattgtatataacatcacacttgatgcagatggattttcatccagagtaacctccagggggttatttaaagaaaacaatgaaaggtgcctgcagaagaatatggtagtaaatcaagcacagagttgccccgagcacatcatttatatacaggagccctctgatgttgtcaactctttggatttgcgtgtggacatcagtctggaaaaccctggcactagccctgcccttgaagcctattctgagactgccaaggtcttcagtattcctttccacaaagactgtggtgaggacggactttgcatttctgatctagtcctagatgtccgacaaataccagctgctcaagaacaaccctttattgtcagcaaccaaaacaaaaggttaacattttcagtaacgctgaaaaataaaagggaaagtgcatacaacactggaattgttgttgatttttcagaaaacttgttttttgcatcattctccctgccggttgatgggacagaagtaacatgccaggtggctgcatctcagaagtctgttgcctgcgatgtaggctaccctgctttaaagagagaacaacaggtgacttttactattaactttgacttcaatcttcaaaaccttcagaatcaggcgtctctcagtttccaagccttaagtgaaagccaagaagaaaacaaggctgataatttggtcaacctcaaaattcctctcctgtatgatgctgaaattcacttaacaagatctaccaacataaatttttatgaaatctcttcggatgggaatgttccttcaatcgtgcacagttttgaagatgttggtccaaaattcatcttctccctgaaggtaacaacaggaagtgttccagtaagcatggcaactgtaatcatccacatccctcagtataccaaagaaaagaacccactgatgtacctaactggggtgcaaacagacaaggctggtgacatcagttgtaatgcagatatcaatccactgaaaataggacaaacatcttcttctgtatctttcaaaagtgaaaatttcaggcacaccaaagaattgaactgcagaactgcttcctgtagtaatgttacctgctggttgaaagacgttcacatgaaaggagaatactttgttaatgtgactaccagaatttggaacgggactttcgcatcatcaacgttccagacagtacagctaacggcagctgcagaaatcaacacctataaccctgagatatatgtgattgaagataacactgttacgattcccctgatgataatgaaacctgatgagaaagccgaagtaccaacaggagttataataggaagtataattgctggaatccttttgctgttagctctggttgcaattttatggaagctcggcttcttcaaaagaaaatatgaaaagatgaccaaaaatccagatgagattgatgagaccacagagctcagtagctgaaccagcagacctacctgcagtgggaaccggcagcatcccagccagggtttgctgtttgcgtgaatggatttctttttaaatcccatattttttttatcatgtcgtaggtaaactaacctggtattttaagagaaaactgcaggtcagtttggaatgaagaaattgtggggggtgggggaggtgcggggggcaggtagggaaataatagggaaaatacctattttatatgatgggg

SEQ ID NO: 10101 - DNA, 3501 bp, Homo sapiens
  source 1..3501: mol_type = unassigned DNA
gcaactacggtcccccggtcagacccaggatggggccagaacggacaggggccgcgccgctgccgctgctgctggtgttagcgctcagtcaaggttactggttggttcaccctggagtggctttcctgagaaccgaatgggagatgtgtataaatgtcctgttgacctatccactgccacatgtgaaaaactaaatttgcaaacttcaacaagcattccaaatgttactgagatgaaaaccaacatgagcctcggcttgatcctcaccaggaacatgggaactggaggttttctcacatgtggtcctctgtgggcacagcaatgtgggaatcagtattacacaacgggtgtgtgttctgacatcagtcctgattttcagctctcagccagcttctcacctgcaactcagccctgcccttccctcatagatgttgtggttgtgtgtgatgaatcaaatagtatttatccttgggatgcagtaaagaattttttggaaaaatttgtacaaggcctggatataggccccacaaagacacaggtggggttaattcagtatgccaataatccaagagttgtgtttaacttgaacacatataaaaccaaagaagaaatgattgtagcaacatcccagacatcccaatatggtggggacctcacaaacacattcggagcaattcaatatgcaagaaaatatgcttattcagcagcttctggtgggcgacgaagtgctacgaaagtaatggtagttgtaactgacggtgaatcacatgatggttcaatgttgaaagctgtgattgatcaatgcaaccatgacaatatactgaggtttggcatagcagttcttgggtacttaaacagaaacgcccttgatactaaaaatttaataaaagaaataaaagcaatcgctagtattccaacagaaagatactttttcaatgtgtctgatgaagcagctctactagaaaaggctgggacattaggagaacaaattttcagcattgaaggtactgttcaaggaggagacaactttcagatggaaatgtcacaagtgggattcagtgcagattactcttctcaaaatgatattctgatgctgggtgcagtgggagcttttggctggagtgggaccattgtccagaagacatctcatggccatttgatctttcctaaacaagcctttgaccaaattctgcaggacagaaatcacagttcatatttaggttactctgtggctgcaatttctactggagaaagcactcactttgttgctggtgctcctcgggcaaattataccggccagatagtgctatatagtgtgaatgagaatggcaatatcacggttattcaggctcaccgaggtgaccagattggctcctattttggtagtgtgctgtgttcagttgatgtggataaagacaccattacagacgtgctcttggtaggtgcaccaatgtacatgagtgacctaaagaaagaggaaggaagagtctacctgtttactatcaaagagggcattttgggtcagcaccaatttcttgaaggccccgagggcattgaaaacactcgatttggttcagcaattgcagctctttcagacatcaacatggatggctttaatgatgtgattgttggttcaccactagaaaatcagaattctggagctgtatacatttacaatggtcatcagggcactatccgcacaaagtattcccagaaaatcttgggatccgatggagcctttaggagccatctccagtactttgggaggtccttggatggctatggagatttaaatggggattccatcaccgatgtgtctattggtgcctttggacaagtggttcaactctggtcacaaagtattgctgatgtagctatagaagcttcattcacaccagaaaaaatcactttggtcaacaagaatgctcagataattctcaaactctgcttcagtgcaaagttcagacctactaagcaaaacaatcaagtggccattgtatataacatcacacttgatgcagatggattttcatccagagtaacctccagggggttatttaaagaaaacaatgaaaggtgcctgcagaagaatatggtagtaaatcaagcacagagttgccccgagcacatcatttatatacaggagccctctgatgttgtcaactctttggatttgcgtgtggacatcagtctggaaaaccctggcactagccctgcccttgaagcctattctgagactgccaaggtcttcagtattcctttccacaaagactgtggtgaggacggactttgcatttctgatctagtcctagatgtccgacaaataccagctgctcaagaacaaccctttattgtcagcaaccaaaacaaaaggttaacattttcagtaacgctgaaaaataaaagggaaagtgcatacaacactggaattgttgttgatttttcagaaaacttgttttttgcatcattctccctgccggttgatgggacagaagtaacatgccaggtggctgcatctcagaagtctgttgcctgcgatgtaggctaccctgctttaaagagagaacaacaggtgacttttactattaactttgacttcaatcttcaaaaccttcagaatcaggcgtctctcagtttccaagccttaagtgaaagccaagaagaaaacaaggctgataatttggtcaacctcaaaattcctctcctgtatgatgctgaaattcacttaacaagatctaccaacataaatttttatgaaatctcttcggatgggaatgttccttcaatcgtgcacagttttgaagatgttggtccaaaattcatcttctccctgaaggtaacaacaggaagtgttccagtaagcatggcaactgtaatcatccacatccctcagtataccaaagaaaagaacccactgatgtacctaactggggtgcaaacagacaaggctggtgacatcagttgtaatgcagatatcaatccactgaaaataggacaaacatcttcttctgtatctttcaaaagtgaaaatttcaggcacaccaaagaattgaactgcagaactgcttcctgtagtaatgttacctgctggttgaaagacgttcacatgaaaggagaatactttgttaatgtgactaccagaatttggaacgggactttcgcatcatcaacgttccagacagtacagctaacggcagctgcagaaatcaacacctataaccctgagatatatgtgattgaagataacactgttacgattcccctgatgataatgaaacctgatgagaaagccgaagtaccaacaggagttataataggaagtataattgctggaatccttttgctgttagctctggttgcaattttatggaagctcggcttcttcaaaagaaaatatgaaaagatgaccaaaaatccagatgagattgatgagaccacagagctcagtagctgaaccagcagacctacctgcagtgggaaccggcagcatcccagccaggg

SEQ ID NO: 10102 - DNA, 3487 bp, Homo sapiens
  source 1..3487: mol_type = unassigned DNA
gcaactacggtcccccggtcagacccaggatggggccagaacggacaggggccgcgccgctgccgctgctgctggtgttagcgctcagtcaaggcattttaaattgttgtttggcctacaatgttggtctcccagaagcaaaaatattttccggtccttcaagtgaacagtttggctatgcagtgcagcagtttataaatccaaaaggcaactggttactggttggttcaccctggagtggctttcctgagaaccgaatgggagatgtgtataaatgtcctgttgacctatccactgccacatgtgaaaaactaaatttgcaaacttcaacaagcattccaaatgttactgagatgaaaaccaacatgagcctcggcttgatcctcaccaggaacatgggaactggaggttttctcacatgtggtcctctgtgggcacagcaatgtgggaatcagtattacacaacgggtgtgtgttctgacatcagtcctgattttcagctctcagccagcttctcacctgcaactcagccctgcccttccctcatagatgttgtggttgtgtgtgatgaatcaaatagtatttatccttgggatgcagtaaagaattttttggaaaaatttgtacaaggcctggatataggccccacaaagacacaggtggggttaattcagtatgccaataatccaagagttgtgtttaacttgaacacatataaaaccaaagaagaaatgattgtagcaacatcccagacatcccaatatggtggggacctcacaaacacattcggagcaattcaatatgcaagaaaatatgcttattcagcagcttctggtgggcgacgaagtgctacgaaagtaatggtagttgtaactgacggtgaatcacatgatggttcaatgttgaaagctgtgattgatcaatgcaaccatgacaatatactgaggtttggcatagcagttcttgggtacttaaacagaaacgcccttgatactaaaaatttaataaaagaaataaaagcaatcgctagtattccaacagaaagatactttttcaatgtgtctgatgaagcagctctactagaaaaggctgggacattaggagaacaaattttcagcattgaaggtactgttcaaggaggagacaactttcagatggaaatgtcacaagtgggattcagtgcagattactcttctcaaaatgatattctgatgctgggtgcagtgggagcttttggctggagtgggaccattgtccagaagacatctcatggccatttgatctttcctaaacaagcctttgaccaaattctgcaggacagaaatcacagttcatatttaggttactctgtggctgcaatttctactggagaaagcactcactttgttgctggtgctcctcgggcaaattataccggccagatagtgctatatagtgtgaatgagaatggcaatatcacggttattcaggctcaccgaggtgaccagattggctcctattttggtagtgtgctgtgttcagttgatgtggataaagacaccattacagacgtgctcttggtaggtgcaccaatgtacatgagtgacctaaagaaagaggaaggaagagtctacctgtttactatcaaagagggcattttgggtcagcaccaatttcttgaaggccccgagggcattgaaaacactcgatttggttcagcaattgcagctctttcagacatcaacatggatggctttaatgatgtgattgttggttcaccactagaaaatcagaattctggagctgtatacatttacaatggtcatcagggcactatccgcacaaagtattcccagaaaatcttgggatccgatggagcctttaggagccatctccagtactttgggaggtccttggatggctatggagatttaaatggggattccatcaccgatgtgtctattggtgcctttggacaagtggttcaactctggtcacaaagtattgctgatgtagctatagaagcttcattcacaccagaaaaaatcactttggtcaacaagaatgctcagataattctcaaactctgcttcagtgcaaagttcagacctactaagcaaaacaatcaagtggccattgtatataacatcacacttgatgcagatggattttcatccagagtaacctccagggggttatttaaagaaaacaatgaaaggtgcctgcagaagaatatggtagtaaatcaagcacagagttgccccgagcacatcatttatatacaggagccctctgatgttgtcaactctttggatttgcgtgtggacatcagtctggaaaaccctggcactagccctgcccttgaagcctattctgagactgccaaggtcttcagtattcctttccacaaagactgtggtgaggacggactttgcatttctgatctagtcctagatgtccgacaaataccagctgctcagttgatgggacagaagtaacatgccaggtggctgcatctcagaagtctgttgcctgcgatgtaggctaccctgctttaaagagagaacaacaggtgacttttactattaactttgacttcaatcttcaaaaccttcagaatcaggcgtctctcagtttccaagccttaagtgaaagccaagaagaaaacaaggctgataatttggtcaacctcaaaattcctctcctgtatgatgctgaaattcacttaacaagatctaccaacataaatttttatgaaatctcttcggatgggaatgttccttcaatcgtgcacagttttgaagatgttggtccaaaattcatcttctccctgaaggtaacaacaggaagtgttccagtaagcatggcaactgtaatcatccacatccctcagtataccaaagaaaagaacccactgatgtacctaactggggtgcaaacagacaaggctggtgacatcagttgtaatgcagatatcaatccactgaaaataggacaaacatcttcttctgtatctttcaaaagtgaaaatttcaggcacaccaaagaattgaactgcagaactgcttcctgtagtaatgttacctgctggttgaaagacgttcacatgaaaggagaatactttgttaatgtgactaccagaatttggaacgggactttcgcatcatcaacgttccagacagtacagctaacggcagctgcagaaatcaacacctataaccctgagatatatgtgattgaagataacactgttacgattcccctgatgataatgaaacctgatgagaaagccgaagtaccaacaggagttataataggaagtataattgctggaatccttttgctgttagctctggttgcaattttatggaagctcggcttcttcaaaagaaaatatgaaaagatgaccaaaaatccagatgagattgatgagaccacagagctcagtagctgaaccagcagacctacctgcagtgggaaccggcagcatcccagccagggtttgctg

SEQ ID NO: 10103 - DNA, 3674 bp, Homo sapiens
  source 1..3674: mol_type = unassigned DNA
gcaactacggtcccccggtcagacccaggatggggccagaacggacaggggccgcgccgctgccgctgctgctggtgttagcgctcagtcaaggcattttaaattgttgtttggcctacaatgttggtctcccagaagcaaaaatattttccggtccttcaagtgaacagtttggctatgcagtgcagcagtttataaatccaaaaggcaactggttactggttggttcaccctggagtggctttcctgagaaccgaatgggagatgtgtataaatgtcctgttgacctatccactgccacatgtgaaaaactaaatttgcaaacttcaacaagcattccaaatgttactgagatgaaaaccaacatgagcctcggcttgatcctcaccaggaacatgggaactggaggttttctcacatgtggtcctctgtgggcacagcaatgtgggaatcagtattacacaacgggtgtgtgttctgacatcagtcctgattttcagctctcagccagcttctcacctgcaactcagccctgcccttccctcatagatgttgtggttgtgtgtgatgaatcaaatagtatttatccttgggatgcagtaaagaattttttggaaaaatttgtacaaggcctggatataggccccacaaagacacaggtggggttaattcagtatgccaataatccaagagttgtgtttaacttgaacacatataaaaccaaagaagaaatgattgtagcaacatcccagacatcccaatatggtggggacctcacaaacacattcggagcaattcaatatgcaagaaaatatgcttattcagcagcttctggtgggcgacgaagtgctacgaaagtaatggtagttgtaactgacggtgaatcacatgatggttcaatgttgaaagctgtgattgatcaatgcaaccatgacaatatactgaggtttggcatagcagttcttgggtacttaaacagaaacgcccttgatactaaaaatttaataaaagaaataaaagcaatcgctagtattccaacagaaagatactttttcaatgtgtctgatgaagcagctctactagaaaaggctgggacattaggagaacaaattttcagcattgaaggtactgttcaaggaggagacaactttcagatggaaatgtcacaagtgggattcagtgcagattactcttctcaaaatgatattctgatgctgggtgcagtgggagcttttggctggagtgggaccattgtccagaagacatctcatggccatttgatctttcctaaacaagcctttgaccaaattctgcaggacagaaatcacagttcatatttaggttactctgtggctgcaatttctactggagaaagcactcactttgttgctggtgctcctcgggcaaattataccggccagatagtgctatatagtgtgaatgagaatggcaatatcacggttattcaggctcaccgaggtgaccagattggctcctattttggtagtgtgctgtgttcagttgatgtggataaagacaccattacagacgtgctcttggtaggtgcaccaatgtacatgagtgacctaaagaaagaggaaggaagagtctacctgtttactatcaaagagggcattttgggtcagcaccaatttcttgaaggccccgagggcattgaaaacactcgatttggttcagcaattgcagctctttcagacatcaacatggatggctttaatgatgtgattgttggttcaccactagaaaatcagaattctggagctgtatacatttacaatggtcatcagggcactatccgcacaaagtattcccagctgttgtgtactataatttcgtgtcaaacctgctcttttagaaaatcttgggatccgatggagcctttaggagccatctccagtactttgggaggtccttggatggctatggagatttaaatggggattccatcaccgatgtgtctattggtgcctttggacaagtggttcaactctggtcacaaagtattgctgatgtagctatagaagcttcattcacaccagaaaaaatcactttggtcaacaagaatgctcagataattctcaaactctgcttcagtgcaaagttcagacctactaagcaaaacaatcaagtggccattgtatataacatcacacttgatgcagatggattttcatccagagtaacctccagggggttatttaaagaaaacaatgaaaggtgcctgcagaagaatatggtagtaaatcaagcacagagttgccccgagcacatcatttatatacaggagccctctgatgttgtcaactctttggatttgcgtgtggacatcagtctggaaaaccctggcactagccctgcccttgaagcctattctgagactgccaaggtcttcagtattcctttccacaaagactgtggtgaggacggactttgcatttctgatctagtcctagatgtccgacaaataccagctgctcaagaacaaccctttattgtcagcaaccaaaacaaaaggttaacattttcagtaacgctgaaaaataaaagggaaagtgcatacaacactggaattgttgttgatttttcagaaaacttgttttttgcatcattctccctgccggttgatgggacagaagtaacatgccaggtggctgcatctcagaagtctgttgcctgcgatgtaggctaccctgctttaaagagagaacaacaggtgacttttactattaactttgacttcaatcttcaaaaccttcagaatcaggcgtctctcagtttccaagccttaagtgaaagccaagaagaaaacaaggctgataatttggtcaacctcaaaattcctctcctgtatgatgctgaaattcacttaacaagatctaccaacataaatttttatgaaatctcttcggatgggaatgttccttcaatcgtgcacagttttgaagatgttggtccaaaattcatcttctccctgaaggtaacaacaggaagtgttccagtaagcatggcaactgtaatcatccacatccctcagtataccaaagaaaagaacccactgatgtacctaactggggtgcaaacagacaaggctggtgacatcagttgtaatgcagatatcaatccactgaaaataggacaaacatcttcttctgtatctttcaaaagtgaaaatttcaggcacaccaaagaattgaactgcagaactgcttcctgtagtaatgttacctgctggttgaaagacgttcacatgaaaggagaatactttgttaatgtgactaccagaatttggaacgggactttcgcatcatcaacgttccagacagtacagctaacggcagctgcagaaatcaacacctataaccctgagatatatgtgattgaagataacactgttacgattcccctgatgataatgaaacctgatgagaaagccgaagtaccaacaggagttataataggaagtataattgctggaatccttttgctgttagctctggttgcaattttatggaagctcggcttcttcaaaagaaaatatgaaaagatgaccaaaaatccagatgagattgatgagaccacagagctcagtagctgaaccagcagacctacctgcagtgggaaccggcagcatcccagccagggtttgctgtttg

SEQ ID NO: 10104 - DNA, 3530 bp, Homo sapiens
  source 1..3530: mol_type = unassigned DNA
gcaactacggtcccccggtcagacccaggatggggccagaacggacaggggccgcgccgctgccgctgctgctggtgttagcgctcagtcaaggcattttaaattgttgtttggcctacaatgttggtctcccagaagcaaaaatattttccggtccttcaagtgaacagtttggctatgcagtgcagcagtttataaatccaaaaggcaactggttactggttggttcaccctggagtggctttcctgagaaccgaatgggagatgtgtataaatgtcctgttgacctatccactgccacatgtgaaaaactaaatttgcaaacttcaacaagcattccaaatgttactgagatgaaaaccaacatgagcctcggcttgatcctcaccaggaacatgggaactggaggttttctcacatgtggtcctctgtgggcacagcaatgtgggaatcagtattacacaacgggtgtgtgttctgacatcagtcctgattttcagctctcagccagcttctcacctgcaactcagccctgcccttccctcatagatgttgtggttgtgtgtgatgaatcaaatagtatttatccttgggatgcagtaaagaattttttggaaaaatttgtacaaggcctggatataggccccacaaagacacaggtggggttaattcagtatgccaataatccaagagttgtgtttaacttgaacacatataaaaccaaagaagaaatgattgtagcaacatcccagacatcccaatatggtggggacctcacaaacacattcggagcaattcaatatgcaagaaaatatgcttattcagcagcttctggtgggcgacgaagtgctacgaaagtaatggtagttgtaactgacggtgaatcacatgatggttcaatgttgaaagctgtgattgatcaatgcaaccatgacaatatactgaggtttggcatagcagttcttgggtacttaaacagaaacgcccttgatactaaaaatttaataaaagaaataaaagcaatcgctagtattccaacagaaagatactttttcaatgtgtctgatgaagcagctctactagaaaaggctgggacattaggagaacaaattttcagcattgaaggtactgttcaaggaggagacaactttcagatggaaatgtcacaagtgggattcagtgcagattactcttctcaaaatgatattctgatgctgggtgcagtgggagcttttggctggagtgggaccattgtccagaagacatctcatggccatttgatctttcctaaacaagcctttgaccaaattctgcaggacagaaatcacagttcatatttaggttactctgtggctgcaatttctactggagaaagcactcactttgttgctggtgctcctcgggcaaattataccggccagatagtgctatatagtgtgaatgagaatggcaatatcacggttattcaggctcaccgaggtgaccagattggctcctattttggtagtgtgctgtgttcagttgatgtggataaagacaccattacagacgtgctcttggtaggtgcaccaatgtacatgagtgacctaaagaaagaggaaggaagagtctacctgtttactatcaaagagggcattttgggtcagcaccaatttcttgaaggccccgagggcattgaaaacactcgatttggttcagcaattgcagctctttcagacatcaacatggatggctttaatgatgtgattgttggttcaccactagaaaatcagaattctggagctgtatacatttacaatggtcatcagggcactatccgcacaaagtattcccagaaaatcttgggatccgatggagcctttaggagccatctccagtactttgggaggtccttggatggctatggagatttaaatggggattccatcaccgatgtgtctattggtgcctttggacaagtggttcaactctggtcacaaagtattgctgatgtagctatagaagcttcattcacaccagaaaaaatcactttggtcaacaagaatgctcagataattctcaaactctgcttcagtgcaaagttcagacctactaagcaaaacaatcaagtggccattgtatataacatcacacttgatgcagatggattttcatccagagtaacctccagggggttatttaaagaaaacaatgaaaggtgcctgcagaagaatatggtagtaaatcaagcacagagttgccccgagcacatcatttatatacaggagccctctgatgttgtcaactctttggatttgcgtgtggacatcagtctggaaaaccctggcactagccctgcccttgaagcctattctgagactgccaaggtcttcagtattcctttccacaaagactgtggtgaggacggactttgcatttctgatctagtcctagatgtccgacaaataccagctgctcaagaacaaccctttattgtcagcaaccaaaacaaaaggttaacattttcagtaacgctgaaaaataaaagggaaagtgcatacaacactggaattgttgttgatttttcagaaaacttgttttttgcatcattctccctgccggttgatgggacagaagtaacatgccaggtggctgcatctcagaagtctgttgcctgcgatgtaggctaccctgctttaaagagagaacaacaggtgacttttactattaactttgacttcaatcttcaaaaccttcagaatcaggcgtctctcagtttccaagccttaagtgaaagccaagaagaaaacaaggctgataatttggtcaacctcaaaattcctctcctgtatgatgctgaaattcacttaacaaggtaacaacaggaagtgttccagtaagcatggcaactgtaatcatccacatccctcagtataccaaagaaaagaacccactgatgtacctaactggggtgcaaacagacaaggctggtgacatcagttgtaatgcagatatcaatccactgaaaataggacaaacatcttcttctgtatctttcaaaagtgaaaatttcaggcacaccaaagaattgaactgcagaactgcttcctgtagtaatgttacctgctggttgaaagacgttcacatgaaaggagaatactttgttaatgtgactaccagaatttggaacgggactttcgcatcatcaacgttccagacagtacagctaacggcagctgcagaaatcaacacctataaccctgagatatatgtgattgaagataacactgttacgattcccctgatgataatgaaacctgatgagaaagccgaagtaccaacaggagttataataggaagtataattgctggaatccttttgctgttagctctggttgcaattttatggaagctcggcttcttcaaaagaaaatatgaaaagatgaccaaaaatccagatgagattgatgagaccacagagctcagtagctgaaccagcagacctacctgcagtgggaaccggcagcatcccagccagggtttgctgtttg

SEQ ID NO: 10105 - DNA, 1846 bp, Homo sapiens
  source 1..1846: mol_type = unassigned DNA
ggtccgctcttgctgagcccagagccatcccgcgctctgcgggctgggaggcccgggccaggacgcgagtcctgcgcagccgaggttccccagcgccccctgcagccgcgcgtaggcagagacggagcccggccctgcgcctccgcaccacgcccgggaccccacccagcggcccgtacccggagaagcagcgcgagcacccgaagctcccggctggcggcagaaaccgggagtggggccgggcgagtgcgcggcatcccaggccggcccgaacgctccgcccgcggtgggccgacttcccctcctcttccctctctccttcctttagcccgctggcgccggacacgctgcgcctcatctcttggggcgttcttccccgttggccaaccgtcgcatcccgtgcaactttggggtagtggccgtttagtgttgaatgttccccaccgagagcgcatggcttgggaagcgaggcgcgaacccggcccccgaagggccgccgtccgggagacggtgatgctgttgctgtgcctgggggtcccgaccggccgcccctacaacgtggacactgagagcgcgctgctttaccagggcccccacaacacgctgttcggctactcggtcgtgctgcacagccacggggcgaaccgatggctcctagtgggtgcgcccactgccaactggctcgccaacgcttcagtgatcaatcccggggcgatttacagatgcaggatcggaaagaatcccggccagacgtgcgaacagctccagctgggtgagttgggtatgggaccaggagttagtgacctcccgaccccccatgtggaccccaccatagggcaagtcctggaaagattcacgttgcctgttacttctggtttaaagagcataaagttttcagtttcaactccatctcatcttgcctccttaatataaaagggattccctttctgttaatatcgttctcccttttccttatggcaatgattgcagtactctgacaactatgctagagaaatttcttatgataccttctcttcatctctccccgtctctccgtgtgtaaagcacattttagactctctcagcgtattaaggacaggatccagctaagccaagacttgagaattttatttccatctttgacctatcaaccctcttaaagaacaggctaaggagcatatcaggaatagcaattggaattgatcccatatcccgtcgtttaacctaaaggcctaaaaaaaaaagtgatagttttacttacaatatacaatctaaaagaaaaggaaaattggcatcttcatcgttaatgtagtataattttccattcccaaaaccgtcatccaaaactcatgttatatgggtccatctttttgcagtcatttctcaatgtctcagatttgtgacaagttgaaaaatgtgtactgatagaggggagaagtttcatgtttcaaagccaaagacaagtttgttgcacacaggcaagtggggaaagaggaaggaatattaaataacaagacctatcttgttccaaagtgttactgctatatatattgcttaacttttttccccttaaagcaaccctgggtcatggttgacattgttcctagtttatgtatgaggactgtggctcagagttgcaaatacctttttaaaagttacttagctagtgactgataggtgggaactaaagtcaaactagggtctgaatgcgtccaaagtctaagccattttcttccatgtatgtatcttcaatgcaaataaaattaagtgaatggtttaatatgttgtctgctgagctgatgggtcatctgtaaacggtgaataaaattggtacttctttatattt

SEQ ID NO: 10106 - DNA, 1403 bp, Homo sapiens
  source 1..1403: mol_type = unassigned DNA
gctcttgctgagcccagagccatcccgcgctctgcgggctgggaggcccgggccaggacgcgagtcctgcgcagccgaggttccccagcgccccctgcagccgcgcgtaggcagagacggagcccggccctgcgcctccgcaccacgcccgggaccccacccagcggcccgtacccggagaagcagcgcgagcacccgaagctcccggctggcggcagaaaccgggagtggggccgggcgagtgcgcggcatcccaggccggcccgaacgctccgcccgcggtgggccgacttcccctcctcttccctctctccttcctttagcccgctggcgccggacacgctgcgcctcatctcttggggcgttcttccccgttggccaaccgtcgcatcccgtgcaactttggggtagtggccgtttagtgttgaatgttccccaccgagagcgcatggcttgggaagcgaggcgcgaacccggcccccgaagggccgccgtccgggagacggtgatgctgttgctgtgcctgggggtcccgaccggccgcccctacaacgtggacactgagagcgcgctgctttaccagggcccccacaacacgctgttcggctactcggtcgtgctgcacagccacggggcgaaccgatggctcctagtgggtgcgcccactgccaactggctcgccaacgcttcagtgatcaatcccggggcgatttacagatgcaggatcggaaagaatcccggccagacgtgcgaacagctccagctgggtagccctaatggagaaccttgtggaaagacttgtttggaagagagagacaatcagtggttgggggtcacactttccagacagccaggagaaaatggatccatcgtgacttgtgggcatagatggaaaaatatattttacataaagaatgaaaataagctccccactggtggttgctatggagtgccccctgatttacgaacagaactgagtaaaagaatagctccgtgttatcaaggtagcatcagcaagtacagagctaggacataacagaagtgagcagaattggggtgaatgtcaacagagcatgtcagaggatatctgcagcaaaactaaaatccaacaatgcgtctttaggagctaagaaacatatgaatgcaaattcataattttctaaccaccctcactcaaaaaaaatccctcagcacgcaaagaaaaattttattggttggcaaaactttggccaagtatttgagttcaattatgggtgctaataagactttggtctttcttccttggaatgtgatgtcacagagcagcttatattacatatattcctattttgccttcggatacccaaaagataaaaaagtgaatattgattctcagttgcaataaaactcagtcttgatttctg

SEQ ID NO: 10107 - DNA, 4189 bp, Homo sapiens
  source 1..4189: mol_type = unassigned DNA
gccatcccgcgctctgcgggctgggaggcccgggccaggacgcgagtcctgcgcagccgaggttccccagcgccccctgcagccgcgcgtaggcagagacggagcccggccctgcgcctccgcaccacgcccgggaccccacccagcggcccgtacccggagaagcagcgcgagcacccgaagctcccggctggcggcagaaaccgggagtggggccgggcgagtgcgcggcatcccaggccggcccgaacgctccgcccgcggtgggccgacttcccctcctcttccctctctccttcctttagcccgctggcgccggacacgctgcgcctcatctcttggggcgttcttccccgttggccaaccgtcgcatcccgtgcaactttggggtagtggccgtttagtgttgaatgttccccaccgagagcgcatggcttgggaagcgaggcgcgaacccggcccccgaagggccgccgtccgggagacggtgatgctgttgctgtgcctgggggtcccgaccggccgcccctacaacgtggacactgagagcgcgctgctttaccagggcccccacaacacgctgttcggctactcggtcgtgctgcacagccacggggcgaaccgatggctcctagtgggtgcgcccactgccaactggctcgccaacgcttcagtgatcaatcccggggcgatttacagatgcaggatcggaaagaatcccggccagacgtgcgaacagctccagctgggtagccctaatggagaaccttgtggaaagacttgtttggaagagagagacaatcagtggttgggggtcacactttccagacagccaggagaaaatggatccatcgtgacttgtgggcatagatggaaaaatatattttacataaagaatgaaaataagctccccactggtggttgctatggagtgccccctgatttacgaacagaactgagtaaaagaatagctccgtgttatcaagattatgtgaaaaaatttggagaaaattttgcatcatgtcaagctggaatatccagtttttacacaaaggatttaattgtgatgggggccccaggatcatcttactggactggctctctttttgtctacaatataactacaaataaatacaaggcttttttagacaaacaaaatcaagtaaaatttggaagttatttaggatattcagtcggagctggtcattttcggagccagcatactaccgaagtagtcggaggagctcctcaacatgagcagattggtaaggcatatatattcagcattgatgaaaaagaactaaatatcttacatgaaatgaaaggtaaaaagcttggatcgtactttggagcttctgtctgtgctgtggacctcaatgcagatggcttctcagatctgctcgtgggagcacccatgcagagcaccatcagagaggaaggaagagtgtttgtgtacatcaactctggctcgggagcagtaatgaatgcaatggaaacaaacctcgttggaagtgacaaatatgctgcaagatttggggaatctatagttaatcttggcgacattgacaatgatggctttgaagatgttgctatcggagctccacaagaagatgacttgcaaggtgctatttatatttacaatggccgtgcagatgggatctcgtcaaccttctcacagagaattgaaggacttcagatcagcaaatcgttaagtatgtttggacagtctatatcaggacaaattgatgcagataataatggctatgtagatgtagcagttggtgcttttcggtctgattctgctgtcttgctaaggacaagacctgtagtaattgttgacgcttctttaagccaccctgagtcagtaaatagaacgaaatttgactgtgttgaaaatggatggccttctgtgtgcatagatctaacactttgtttctcatataagggcaaggaagttccaggttacattgttttgttttataacatgagtttggatgtgaacagaaaggcagagtctccaccaagattctatttctcttctaatggaacttctgacgtgattacaggaagcatacaggtgtccagcagagaagctaactgtagaacacatcaagcatttatgcggaaagatgtgcgggacatcctcaccccaattcagattgaagctgcttaccaccttggtcctcatgtcatcagtaaacgaagtacagaggaattcccaccacttcagccaattcttcagcagaagaaagaaaaagacataatgaaaaaaacaataaactttgcaaggttttgtgcccatgaaaattgttctgctgatttacaggtttctgcaaagattgggtttttgaagccccatgaaaataaaacatatcttgctgttgggagtatgaagacattgatgttgaatgtgtccttgtttaatgctggagatgatgcatatgaaacgactctacatgtcaaactacccgtgggtctttatttcattaagattttagagctggaagagaagcaaataaactgtgaagtcacagataactctggcgtggtacaacttgactgcagtattggctatatatatgtagatcatctctcaaggatagatattagctttctcctggatgtgagctcactcagcagagcggaagaggacctcagtatcacagtgcatgctacctgtgaaaatgaagaggaaatggacaatctaaagcacagcagagtgactgtagcaatacctttaaaatatgaggttaagctgactgttcatgggtttgtaaacccaacttcatttgtgtatggatcaaatgatgaaaatgagcctgaaacgtgcatggtggagaaaatgaacttaactttccatgttatcaacactggcaatagtatggctcccaatgttagtgtggaaataatggtaccaaattcttttagcccccaaactgataagctgttcaacattttggatgtccagactactactggagaatgccactttgaaaattatcaaagagtgtgtgcattagagcagcaaaagagtgcaatgcagaccttgaaaggcatagtccggttcttgtccaagactgataagaggctattgtactgcataaaagctgatccacattgtttaaatttcttgtgtaattttgggaaaatggaaagtggaaaagaagccagtgttcatatccaactggaaggccggccatccattttagaaatggatgagacttcagcactcaagtttgaaataagagcaacaggttttccagagccaaatccaagagtaattgaactaaacaaggatgagaatgttgcgcatgttctactggaaggactacatcatcaaagacccaaacgttatttcaccatagtgattatttcaagtagcttgctacttggacttattgtacttctattgatctcatatgttatgtggaaggctggcttctttaaaagacaatacaaatctatcctacaagaagaaaacagaagagacagttggagttatatcaacagtaaaagcaatgatgattaaggacttctttcaaattgagagaatggaaaacagactcaggttgtagtaaagaaatttaaaagacactgtttacaagaaaaaatgaattttgtttggacttcttttactcatgatcttgtgacatattatgtcttcatgcaaggggaaaatctcagcaatgattactctttgagatagaagaactgcaaaggtaataatacagccaaagataatctctcagcttttaaatgggtagagaaacactaaagcattcaatttattcaagaaaagtaagcccttgaagatatcttgaaatgaaagtataactgagttaaattatactggagaagtcttagacttgaaatactacttaccatatgtgcttgcctcagtaaaatgaaccccactgggtgggcagaggttcatttcaaatacatctttgatacttgttcaaaatatgttctttaaaaatataattttttagagagctgttcccaaattttctaacgagtggaccattatcactttaaagccctttatttataatacatttcctacgggctgtgttccaacaaccattttttttcagcagactatgaatattatagtattataggccaaactggcaaacttcagactgaacatgtacactggtttgagcttagtgaaattacttctgga

SEQ ID NO: 10108 - DNA, 1721 bp, Homo sapiens
  source 1..1721: mol_type = unassigned DNA
gaagctcccggctggcggcagaaaccgggagtggggccgggcgagtgcgcggcatcccaggccggcccgaacgctccgcccgcggtgggccgacttcccctcctcttccctctctccttcctttagcccgctggcgccggacacgctgcgcctcatctcttggggcgttcttccccgttggccaaccgtcgcatcccgtgcaactttggggtagtggccgtttagtgttgaatgttccccaccgagagcgcatggcttgggaagcgaggcgcgaacccggcccccgaagggccgccgtccgggagacggtgatgctgttgctgtgcctgggggtcccgaccggccgcccctacaacgtggacactgagagcgcgctgctttaccagggcccccacaacacgctgttcggctactcggtcgtgctgcacagccacggggcgaaccgatggctcctagtgggtgcgcccactgccaactggctcgccaacgcttcagtgatcaatcccggggcgatttacagatgcaggatcggaaagaatcccggccagacgtgcgaacagctccagctgggtagccctaatggagaaccttgtggaaagacttgtttggaagagagagacaatcagtggttgggggtcacactttccagacagccaggagaaaatggatccatcgtgacttgtgggcatagatggaaaaatatattttacataaagaatgaaaataagctccccactggtggttgctatggagtgccccctgatttacgaacagaactgagtaaaagaatagctccgtgttatcaagattatgtgaaaaaatttggagaaaattttgcatcatgtcaagctggaatatccagtttttacacaaaggatttaattgtgatgggggccccaggatcatcttactggactggctctctttttgtctacaatataactacaaataaatacaaggcttttttagacaaacaaaatcaagtaaaatttggaagttatttaggatattcagtcggagctggtcattttcggagccagcatactaccgaagtagtcggaggagctcctcaacatgagcagattggtaaggcatatatattcagcattgatgaaaaagaactaaatatcttacatgaaatgaaaggtaaaaagcttggatcgtactttggagcttctgtctgtgctgtggacctcaatgcagatggcttctcagatctgctcgtgggagcacccatgcagagcaccatcagagaggaaggaagagtgtttgtgtacatcaactctggctcgggagcagtaatgaatgcaatggaaacaaacctcgttggaagtgacaaatatgctgcaagatttggggaatctatagttaatcttggcgacattgacaatgatggctttgaaggtaattaaaattatcaaattggtacttgatttctgcttttaaaatggtttatggaagaaaatatgattaaagttttgtattgttttccttcctatagaagatggagccagaatggcatgctaagttttttcttttctttagtgttatatatgacttctcctcaattgtcacccattgatctttaccactgttaataatggatgatattcaaaataccttatttcagtgattctaaggcaccattgattagaaactgcattattatttatgtgtccctaaaagctacctattaagctgttacacccaccatttttctg

SEQ ID NO: 10109 - DNA, 2070 bp, Homo sapiens
  source 1..2070: mol_type = unassigned DNA
ccgggagtggggccgggcgagtgcgcggcatcccaggccggcccgaacgctccgcccgcggtgggccgacttcccctcctcttccctctctccttcctttagcccgctggcgccggacacgctgcgcctcatctcttggggcgttcttccccgttggccaaccgtcgcatcccgtgcaactttggggtagtggccgtttagtgttgaatgttccccaccgagagcgcatggcttgggaagcgaggcgcgaacccggcccccgaagggccgccgtccgggagacggtgatgctgttgctgtgcctgggggtcccgaccggccgcccctacaacgtggacactgagagcgcgctgctttaccagggcccccacaacacgctgttcggctactcggtcgtgctgcacagccacggggcgaaccgatggctcctagtgggtgcgcccactgccaactggctcgccaacgcttcagtgatcaatcccggggcgatttacagatgcaggatcggaaagaatcccggccagacgtgcgaacagctccagctgggtagccctaatggagaaccttgtggaaagacttgtttggaagagagagacaatcagtggttgggggtcacactttccagacagccaggagaaaatggatccatcgtgacttgtgggcatagatggaaaaatatattttacataaagaatgaaaataagctccccactggtggttgctatggagtgccccctgatttacgaacagaactgagtaaaagaatagctccgtgttatcaagattatgtgaaaaaatttggagaaaattttgcatcatgtcaagctggaatatccagtttttacacaaaggatttaattgtgatgggggccccaggatcatcttactggactggctctctttttgtctacaatataactacaaataaatacaaggcttttttagacaaacaaaatcaagtaaaatttggaagttatttaggatattcagtcggagctggtcattttcggagccagcatactaccgaagtagtcggaggagctcctcaacatgagcagattggtaaggcatatatattcagcattgatgaaaaagaactaaatatcttacatgaaatgaaaggtaaaaagcttggatcgtactttggagcttctgtctgtgctgtggacctcaatgcagatggcttctcagatctgctcgtgggagcacccatgcagagcaccatcagagaggaaggaagagtgtttgtgtacatcaactctggctcgggagcagtaatgaatgcaatggaaacaaacctcgttggaagtgacaaatatgctgcaagatttggggaatctatagttaatcttggcgacattgacaatgatggctttgaagatgttgctatcggagctccacaagaagatgacttgcaaggtgctatttatatttacaatggccgtgcagatgggatctcgtcaaccttctcacagagaattgaaggacttcagatcagcaaatcgttaagtatgtttggacagtctatatcaggacaaattgatgcagataataatggctatgtagatgtagcagttggtgcttttcggtctgattctgctgtcttgctaaggacaagacctgtagtaattgttgacgcttctttaagccaccctgagtcagtaaatagaacgaaatttgactgtgttgaaaatggatggccttctgtgtgcatagatctaacactttgtttctcatataagggcaaggaagttccaggttacattgttttgttttataacatgagtttggatgtgaacagaaaggcagagtctccaccaagattctatttctcttctaatggaacttctgacgtgattacaggaagcatacaggtgtccagcagagaagctaactgtagaacacatcaagcatttatgcggaaagatgtgcgggacatcctcaccccaattcagattgaagctgcttaccaccttggtcctcatgtcatcagtaaacgaagtacagaggaattcccaccacttcagccaattcttcagcagaagaaagaaaaagacataatgaaaaaaa

SEQ ID NO: 10110 - DNA, 592 bp, Homo sapiens
  source 1..592: mol_type = unassigned DNA
tgatgctgttgctgtgcctgggggtcccgaccggccgcccctacaacgtggacactgagagcgcgctgctttaccagggcccccacaacacgctgttcggctactcggtcgtgctgcacagccacggggcgaaccgatggctcctagtgggtgcgcccactgccaactggctcgccaacgcttcagtgatcaatcccggggcgatttacagatgcaggatcggaaagaatcccggccagacgtgcgaacagctccagctgggtagccctaatggagaaccttgtggaaagacttgtttggaagagagagacaatcagtggttgggggtcacactttccagacagccaggagaaaatggatccatcgtggtaggtattggaactggtccacagatccatcgtgaaatcagctatcctgggtgcagctttcacatcatttggtctacttttattttattcagacttgtgggcatagatggaaaaatatattttacataaagaatgaaaataagctccccactggtggttgctatggagtgccccctgatttacgaacagaactgagtaaaagaatagctccgtgttatcaaggt

SEQ ID NO: 10111 - DNA, 1144 bp, Homo sapiens
  source 1..1144: mol_type = unassigned DNA
agtgatcaatcccggggcgatttacagatgcaggatcggaaagaatcccggccagacgtgcgaacagctccagctgggtagccctaatggagaaccttgtggaaagacttgtttggaagagagagacaatcagtggttgggggtcacactttccagacagccaggagaaaatggatccatcgtgattatgtgaaaaaatttggagaaaattttgcatcatgtcaagctggaatatccagtttttacacaaaggtaattgttcaaaaaatagctgctataaatgtttacatatagaatcttaattcttctcatggtttggaagactgatatgttttaaagtaaaaattgtgtaacatcttcatcatgtctcttaaacttgagtattacaacttaatttttgccactcaaaattccacatatatttcaataaaatatcaatatttaggtggctatactgcataagatgaatgaaaatctatactaaagaacatttctttcatcaacaatttaatgaaaatcaaaagtagctatggttaattgtcttgttaacttaggtattgaaaatatcaacccaagtatgttattttaaatttctagttgaggggcaaaggaagaatatcagtctatatttttcattaaattatgataattgggaaatttaagaatttaatatccccttaaatcagatagacaatattcccaagatttcttactctctttctaacattctaggatatgtatgaaagggcacagttgtactcaaccccaaatctctcagttttcttaaaaacacactgtgaattcaggaatgttttttgactccatgaagatcaggcactatatcaagtttggggttgacagtgtctgcacatattaacagttatattaaaatgcttacaaagaaaatgctttcttcagtttaagttgactttttttaagtttaggattgtttaggagtatagaaatatgctaaagatatttaattgctgaaagtgttcatactataccaggcaagggcatgctcattccaatcttctcctaaattttcctctgtataacaaaatatgccccacattccattggacttttttccctaagctaacattattagaaatgttttccctaagctaacattattagtcag

SEQ ID NO: 10112 - DNA, 573 bp, Homo sapiens
  source 1..573: mol_type = unassigned DNA
gcagagctcggatcagaccccagtggtctggctgtagagcccgcgctctaatcattttgttacactgcctctcagatgcttccactctgctttcttccatgtgcaaactattgtgtgcaatcctgtatatgatgatgatagtattttatttttttctgtctgagaagactgttatttttcataaaagagagttttcttatgtgatatgaattaaggttcataaggttagttttcgaagttgcattctttgtatcaagaatttatttttccattgtttaaattattggatagatgttgctatcggagctccacaagaagatgacttgcaaggtgctatttatatttacaatggccgtgcagatgggatctcgtcaaccttctcacagagaattgaaggacttcagatcagcaaatcgttaagtatgtttggacagtctatatcaggacaaattgatgcagataataatggctatgtagatgtagcagttggtgcttttcggtctgattctgctgtcttgctaaggacaagacctgtagtaattgttgacgcttctttaagccaccctgagtcag

SEQ ID NO: 10113 - DNA, 720 bp, Homo sapiens
  source 1..720: mol_type = unassigned DNA
tgagaaaaaaaggaatatgaaacatgcaagacttttattagcaacaatttttatatttttgaaatttttatataaagattaagcaaataactaaagattttaatgttgttaatagaaacctagaggaaagttcataaatctttataaaagcaatttttaaaatttgtatttttaattgttccctctttcatatttcaggttagtctttaaaaagctgtttaataaagagaattccagatattatttccagtagtccatataactttaactattatcacttcaaaaataacaatagatgtatttcagtaattagattaattgcaattctctatatttttgcagttttgttttataacatgagtttggatgtgaacagaaaggcagagtctccaccaagattctatttctcttctaatggaacttctgacgtgattacaggaagcatacaggtgtccagcagagaagctaactgtagaacacatcaagcatttatgcggaaagatgtgcgggacatcctcaccccaattcagattgaagctgcttaccaccttggtcctcatgtcatcagtaaacgaagtacagaggaattcccaccacttcagccaattcttcagcagaagaaagaaaaagacataatgaaaaaaacaataaactttgcaaggttttgtgcccatgaaaattgttctgctgatttacaggtttctgcaaagattgggtttt

SEQ ID NO: 10114 - DNA, 1004 bp, Homo sapiens
  source 1..1004: mol_type = unassigned DNA
atagatgtatttcagtaattagattaattgcaattctctatatttttgcagttttgttttataacatgagtttggatgtgaacagaaaggcagagtctccaccaagattctatttctcttctaatggaacttctgacgtgattacaggaagcatacaggtgtccagcagagaagctaactgtagaacacatcaagcatttatgcggaaagatgtgcgggacatcctcaccccaattcagattgaagctgcttaccaccttggtcctcatgtcatcagtaaacgaagtacagaggaattcccaccacttcagccaattcttcagcagaagaaagaaaaagacataatgaaaaaaacaataaactttgcaaggttttgtgcccatgaaaattgttctgctgatttacaggtttctgcaaagattgggtttttgaagccccatgaaaataaaacatatcttgctgttgggagtatgaagacattgatgttgaatgtgtccttgtttaatgctggagatgatgcatatgaaacgactctacatgtcaaactacccgtgggtctttatttcattaagattttagagctggaagagaagcaaataaactgtgaagtcacagataactctggcgtggtacaacttgactgcagtattggctatatatatgtagatcatctctcaaggatagatattagctttctcctggatgtgagctcactcagcagagcggaagaggacctcagtatcacagtgcatgctacctgtgaaaatgaagaggaaatggacaatctaaagcacagcagagtgactgtagcaatacctttaaaatatgaggttaagctgactgttcatgggtttgtaaacccaacttcatttgtgtatggatcaaatgatgaaaatgagcctgaaacgtgcatggtggagaaaatgaacttaactttccatgtaagaaaagttaattgtgttaatatttgtaacaacctaaaaggatgtcactgatgcattgct

SEQ ID NO: 10115 - DNA, 393 bp, Homo sapiens
  source 1..393: mol_type = unassigned DNA
tacttctgggatgatattcttttcaataaccatccttaaacatatgttacaaactttttatttccttcctgtccaaaacagttgtttcatttttcccattaggaagagaagcaaataaactgtgaagtcacagataactctggcgtggtacaacttgactgcagtattggctatatatatgtagatcatctctcaaggatagatattagctttctcctggatgtgagctcactcagcagagcggaagaggacctcagtatcacagtgcatgctacctggtataatttattgttaataaaatgaactagaaatatacccccatattctgaggggggggaattaggagaaccgtaaaactgtgttccattaattgtaagagaaaacttctcttac

SEQ ID NO: 10116 - DNA, 4996 bp, Homo sapiens
  source 1..4996: mol_type = unassigned DNA
gaagcagacatagggtggaactacctggcatagaggtgggaatatgagggcaaagctgaagagggagctagggacagtggtctgcgtctctaaggaatgcctgcccctgggtgtcctgtacacatctgttctttaaccatgggatattctgggagtccaggaccaatgggcctatctcttcatctcccaggtcaccatccttaatggctcagacattcgatccctctacaacttctcaggggaacagatggcctcctactttggctatgcagtggccgccacagacgtcaatggggacgggctggatgacttgctggtgggggcacccctgctcatggatcggacccctgacgggcggcctcaggaggtgggcagggtctacgtctacctgcagcacccagccggcatagagcccacgcccacccttaccctcactggccatgatgagtttggccgatttggcagctccttgacccccctgggggacctggaccaggatggctacaatgatgtggccatcggggctccctttggtggggagacccagcagggagtagtgtttgtatttcctgggggcccaggagggctgggctctaagccttcccaggttctgcagcccctgtgggcagccagccacaccccagacttctttggctctgcccttcgaggaggccgagacctggatggcaatggatatcctggtgagttgtgcctgaggccccttttcaccttaaaattccctggtcactgacccctactctctcttctgcacctttccttaagttcctgggtgcagttctggctaattccaacagagggcgctgtcttctcacttcaacctccctgagcgttgaaaccaggaggggttaggaagaaaggatcctgatctggggcttgctgtaagaggtgatttcttgacttcttacagatctgattgtggggtcctttggtgtggacaaggctgtggtatacaggggccgccccatcgtgtccgctagtgcctccctcaccatcttccccgccatgttcaacccagaggagcggagctgcagcttagaggggaaccctgtggcctgcatcaaccttagcttctgcctcaatgcttctggaaaacacgttgctgactccattggtttcacagtggaacttcagctggactggcagaagcagaagggaggggtacggcgggcactgttcctggcctccaggcaggcaaccctgacccagaccctgctcatccagaatggggctcgagaggattgcagagagatgaagatctacctcagggtatggcccagagggcggggtgtggactggccagggagggtggccacacagaactgagggcacctcctgaagggaaaaagactgggggactccagtgaagggcttgggactcttgtaggggctgagaaagggagaccttctgtcagaggagctgggaagcaggctgccagggcctctgaaacaatgaggatggtcggaattgggccctaagcagacaaagggagatgagagaggctgaggagcagggccactaagtctccagagtcccctgactccgtgaactctctcctctggccccagaacgagtcagaatttcgagacaaactctcgccgattcacatcgctctcaacttctccttggacccccaagccccagtggacagccacggcctcaggccagccctacattatcagagcaagagccggatagaggacaaggctcagatcttgctggactgtggagaagacaacatctgtgtgcctgacctgcagctggaagtgtttggggagcagaaccatgtgtacctgggtgacaagaatgccctgaacctcactttccatgcccagaatgtgggtgagggtggcgcctatgaggctgagcttcgggtcaccgcccctccagaggctgagtactcaggactcgtcagacacccagggaacttctccagcctgagctgtgactactttgccgtgaaccagagccgcctgctggtgtgtgacctgggcaaccccatgaaggcaggagccagtctgtggggtggccttcggtttacagtccctcatctccgggacactaagaaaaccatccagtttgacttccagatcctcagcaagaatctcaacaactcgcaaagcgacgtggtttcctttcggctctccgtggaggctcaggcccaggtcaccctgaacggtgtctccaagcctgaggcagtgctattcccagtaagcgactggcatccccgagaccagcctcagaaggaggaggacctgggacctgctgtccaccatgtctatgagctcatcaaccaaggccccagctccattagccagggtgtgctggaactcagctgtccccaggctctggaaggtcagcagctcctatatgtgaccagagttacgggactcaactgcaccaccaatcaccccattaacccaaagggcctggaggtgagatcctgaacactggcatggggaagaggagcagattcagaggaccaaggctgaggggttggggaaggttgctgggggcctgcaagaggcaatgaggatgtgcctatagctagggttgagggtcacaaggcccaaagttacctcaaaatcctctggaggaaaaaggactttcatccactgtgtttctttctgcctgaactatcccttctttgtttcccggcatacccctagggcccagttatgtgccacctcctctaggaagccttcttcaaaccttttcctctgggcccgaatgcctgttttatagttcatttactcattaacatctaattaaataagtgactgtactgaacactgttaggcccaggaaatattgcaccaaacagaactgacaaggtctccacgttcatggaacttacattctagtgaagggtgatagacatagaaaagaaaaagagaaggagaaaaattaacagggattgaaaggtgatgaagtgaagagttaataagctgtagggacactatttaaattggatcatagaaaaacctcttgaagacgtcacagctgaactgaggcctgaaagataaggttgaacctgtctataagactcagggatgagcattccaaaccaagggaacatccagtgcaaaaacaggaacacagacctaattatttacttaagcatctcctccagtgtgatctccaagaaccaagttttcctcatttccatattttaaccctgagctcagtgccttgcgcataggaggtggacagttggatgaatcaataaagagatagatgaaagaataggttgaagctgctctggaacccaggtgcaagctgacttagaagctgtaatgagatgggaaaggggcccaacactttcttttatagttggatcccgagggttccctgcaccaccagcaaaaacgggaagctccaagccgcagctctgcttcctcgggacctcagatcctggtaagtcaggcagggaatgaggtgtggaccaaagtgttgagtactctggggttctcagggccatcacaagggcagaacaccaggttcaagcttctttcttcctagaaatgcccggaggctgagtgtttcaggctgcgctgtgagctcgggcccctgcaccaacaagagagccaaagtctgcagttgcatttccgagtctgggccaagactttcttgcagcgggagcaccagccatttagcctgcagtgtgaggctgtgtacaaagccctgaagatgccctaccgaatcctgcctcggcagctgccccaaaaagagcgtcaggtggccacagctgtgcaatggaccaaggcagaaggcagctatggcgtcccactgtggatcatcatcctagccatcctgtttggcctcctgctcctaggtctactcatctacatcctctacaagcttggattcttcaaacgctccctcccatatggcaccgccatggaaaaagctcagctcaagcctccagccacctctgatgcctgagtcctcccaatttcagactcccattcctgaagaaccagtccccccaccctcattctactgaaaaggaggggtctgggtacttcttgaaggtgctgacggccagggagaagctcctctccccagcccagagacatacttgaagggccagagccaggggggtgaggagctggggatccctcccccccatgcactgtgaaggacccttgtttacacataccctcttcatggatgggggaactcagatccagggacagaggccccagcctccctgaagcctttgcattttggagagtttcctgaaacaacttggaaagataactaggaaatccattcacagttctttgggccagacatgccacaaggacttcctgtccagctccaacctgcaaagatctgtcctcagccttgccagagatccaaaagaagcccccagctaagaacctggaacttggggagttaagacctggcagctctggacagccccaccctggtgggccaacaaagaacactaactatgcatggtgccccaggaccagctcaggacagatgccacacaaggatagatgctggcccagggcccagagcccagctccaaggggaatcagaactcaaatggggccagatccagcctggggtctggagttgatctggaacccagactcagacattggcacctaatccaggcagatccaggactatatttgggcctgctccagacctgatcctggaggcccagttcaccctgatttaggagaagccaggaatttcccaggaccctgaaggggccatgatggcaacagatctggaacctcagcctggccagacacaggccctccctgttccccagagaaaggggagcccactgtcctgggcctgcagaatttgggttctgcctgccagctgcactgatgctgcccctcatctctctgcccaacccttccctcaccttggcaccagacacccaggacttatttaaactctgttgcaagtgcaataaatctgacccagtgcccccactgaccagaactagaa

SEQ ID NO: 10117 - DNA, 4444 bp, Homo sapiens
  source 1..4444: mol_type = unassigned DNA
agtccagacaaccggcttccagctggggctggggaaagggggttggaggggtgcgccccccccccacgccccttaggggtgggggacgcgggctcagagttccagggacccaggaatgcccccccgccagccccctcggcaggcggggggagggctcagccgggagtttggcaaactcctccccgcgttgagtcattcgcctctgggaggtttaggaagcggctccgggtcggtggccccaggacagggaagagcgggcgctatggggagccggacgccagagtcccctctccacgccgtgcagctgcgctggggcccccggcgccgacccccgctgctgccgctgctgttgctgctgctgccgccgccacccagggtcgggggcttcaacttagacgcggaggccccagcagtactctcggggcccccgggctccttcttcggattctcagtggagttttaccggccgggaacagacggggtcagtgtgctggtgggagcacccaaggctaataccagccagccaggagtgctgcagggtggtgctgtctacctctgtccttggggtgccagccccacacagtgcacccccattgaatttgacagcaaaggctctcggctcctggagtcctcactgtccagctcagagggagaggagcctgtggagtacaagtccttgcagtggttcggggcaacagttcgagcccatggctcctccatcttggcatgcgctccactgtacagctggcgcacagagaaggagccactgagcgaccccgtgggcacctgctacctctccacagataacttcacccgaattctggagtatgcaccctgccgctcagatttcagctgggcagcaggacagggttactgccaaggaggcttcagtgccgagttcaccaagactggccgtgtggttttaggtggaccaggaagctatttctggcaaggccagatcctgtctgccactcaggagcagattgcagaatcttattaccccgagtacctgatcaacctggttcaggggcagctgcagactcgccaggccagttccatctatgatgacagctacctaggatactctgtggctgttggtgaattcagtggtgatgacacagaagactttgttgctggtgtgcccaaagggaacctcacttacggctatgtcaccatccttaatggctcagacattcgatccctctacaacttctcaggggaacagatggcctcctactttggctatgcagtggccgccacagacgtcaatggggacgggctggatgacttgctggtgggggcacccctgctcatggatcggacccctgacgggcggcctcaggaggtgggcagggtctacgtctacctgcagcacccagccggcatagagcccacgcccacccttaccctcactggccatgatgagtttggccgatttggcagctccttgacccccctgggggacctggaccaggatggctacaatgatgtggccatcggggctccctttggtggggagacccagcagggagtagtgtttgtatttcctgggggcccaggagggctgggctctaagccttcccaggttctgcagcccctgtgggcagccagccacaccccagacttctttggctctgcccttcgaggaggccgagacctggatggcaatggatatcctgatctgattgtggggtcctttggtgtggacaaggctgtggtatacaggggccgccccatcgtgtccgctagtgcctccctcaccatcttccccgccatgttcaacccagaggagcggagctgcagcttagaggggaaccctgtggcctgcatcaaccttagcttctgcctcaatgcttctggaaaacacgttgctgactccattggtttcacagtggaacttcagctggactggcagaagcagaagggaggggtacggcgggcactgttcctggcctccaggcaggcaaccctgacccagaccctgctcatccagaatggggctcgagaggattgcagagagatgaagatctacctcaggaacgagtcagaatttcgagacaaactctcgccgattcacatcgctctcaacttctccttggacccccaagccccagtggacagccacggcctcaggccagccctacattatcagagcaagagccggatagaggacaaggctcagatcttgctggactgtggagaagacaacatctgtgtgcctgacctgcagctggaagtgtttggggagcagaaccatgtgtacctgggtgacaagaatgccctgaacctcactttccatgcccagaatgtgggtgagggtggcgcctatgaggctgagcttcgggtcaccgcccctccagaggctgagtactcaggactcgtcagacacccagggaacttctccagcctgagctgtgactactttgccgtgaaccagagccgcctgctggtgtgtgacctgggcaaccccatgaaggcaggagccagtctgtggggtggccttcggtttacagtccctcatctccgggacactaagaaaaccatccagtttgacttccagatcctcagcaagaatctcaacaactcgcaaagcgacgtggtttcctttcggctctccgtggaggctcaggcccaggtcaccctgaacggtgtctccaagcctgaggcagtgctattcccagtaagcgactggcatccccgagaccagcctcagaaggaggaggacctgggacctgctgtccaccatgtctatgagctcatcaaccaaggccccagctccattagccagggtgtgctggaactcagctgtccccaggctctggaaggtcagcagctcctatatgtgaccagagttacgggactcaactgcaccaccaatcaccccattaacccaaagggcctggagttggatcccgagggttccctgcaccaccagcaaaaacgggaagctccaagccgcagctctgcttcctcgggacctcagatcctgaaatgcccggaggctgagtgtttcaggctgcgctgtgagctcgggcccctgcaccaacaagagagccaaagtctgcagttgcatttccgagtctgggccaagactttcttgcagcgggagcaccagccatttagcctgcagtgtgaggctgtgtacaaagccctgaagatgccctaccgaatcctgcctcggcagctgccccaaaaagagcgtcaggtggccacagctgtgcaatggaccaaggcagaaggcagctatggcgtcccactgtggatcatcatcctagccatcctgtttggcctcctgctcctaggtctactcatctacatcctctacaagcttggattcttcaaacgctccctcccatatggcaccgccatggaaaaagctcagctcaagcctccagccacctctgatgcctgagtcctcccaatttcagactcccattcctgaagaaccagtccccccaccctcattctactgaaaaggaggggtctgggtacttcttgaaggtgctgacggccagggagaagctcctctccccagcccagagacatacttgaagggccagagccaggggggtgaggagctggggatccctcccccccatgcactgtgaaggacccttgtttacacataccctcttcatggatgggggaactcagatccagggacagaggccccagcctccctgaagcctttgcattttggagagtttcctgaaacaacttggaaagataactaggaaatccattcacagttctttgggccagacatgccacaaggacttcctgtccagctccaacctgcaaagatctgtcctcagccttgccagagatccaaaagaagcccccagctaagaacctggaacttggggagttaagacctggcagctctggacagccccaccctggtgggccaacaaagaacactaactatgcatggtgccccaggaccagctcaggacagatgccacacaaggatagatgctggcccagggcccagagcccagctccaaggggaatcagaactcaaatggggccagatccagcctggggtctggagttgatctggaacccagactcagacattggcacctaatccaggcagatccaggactatatttgggcctgctccagacctgatcctggaggcccagttcaccctgatttaggagaagccaggaatttcccaggaccctgaaggggccatgatggcaacagatctggaacctcagcctggccagacacaggccctccctgttccccagagaaaggggagcccactgtcctgggcctgcagaatttgggttctgcctgccagctgcactgatgctgcccctcatctctctgcccaacccttccctcaccttggcaccagacacccaggacttatttaaactctgttgcaagtgcaataaatctgacccagtgcccccactgaccagaactagaa

SEQ ID NO: 10118 - DNA, 757 bp, Homo sapiens
  source 1..757: mol_type = unassigned DNA
aacgggaagctccaagccgcagctctgcttcctcgggacctcagatcctgcgggagcaccagccatttagcctgcagtgtgaggctgtgtacaaagccctgaagatgccctaccgaatcctgcctcggcagctgccccaaaaagagcgtcaggtggccacagctgtgcaatggaccaaggcagaaggcagctatggcgtcccactgtggatcatcatcctagccatcctgtttggcctcctgctcctaggtctactcatctacatcctctacaagcttggattcttcaaacgctccctcccatatggcaccgccatggaaaaagctcagctcaagcctccagccacctctgatgcctgagtcctcccaatttcagactcccattcctgaagaaccagtccccccaccctcattctactgaaaaggaggggtctgggtacttcttgaaggtgctgacggccagggagaagctcctctccccagcccagagacatacttgaagggccagagccaggggggtgaggagctggggatccctcccccccatgcactgtgaaggacccttgtttacacataccctcttcatggatgggggaactcagatccagggacagaggccccagcctccctgaagcctttgcattttggagagtttcctgaaacaacttggaaagataactaggaaatccattcacagttctttgggccagacatgccacaaggacttcctgtccagctccaacctgcaaagatctgtc

SEQ ID NO: 10119 - DNA, 505 bp, Homo sapiens
  source 1..505: mol_type = unassigned DNA
gagagagactcaggaagaatgagcccaaaatagggaaagatcacaaccccagccagacgatggggaaccctatgtcctctggatcccaagagaggatgtgctaaccaactttcccctacccacagcgggagcaccagccatttagcctgcagtgtgaggctgtgtacaaagccctgaagatgccctaccgaatcctgcctcggcagctgccccaaaaagagcgtcaggtggccacagctgtgcaatggaccaaggcagaaggcagctatggcgtcccactgtggatcatcatcctagccatcctgtttggcctcctgctcctaggtctactcatctacatcctctacaagcttggattcttcaaacgctccctcccatatggcaccgccatggaaaaagctcagctcaagcctccagccacctctgatgcctgagtcctcccaatttcagactcccattcctgaagaaccagtccccccaccctcattctactgaaaaggagggg

SEQ ID NO: 10120 - DNA, 588 bp, Homo sapiens
  source 1..588: mol_type = unassigned DNA
aacgggaagctccaagccgcagctctgcttcctcgggacctcagatcctggtaagtcaggcagggaatgaggtgtggaccaaagtgttgagtactctggggttctcagggccatcacaagggcagaacaccaggttcaagcttctttcttcctagaaatgcccggaggctgagtgtttcaggctgcgctgtgagctcgggcccctgcaccaacaagagagccaaagtctgcagttgcatttccgagtctgggccaagactttcttgcagcgggagcaccagccatttagcctgcagtgtgaggctgtgtacaaagccctgaagatgccctaccgaatcctgcctcggcagctgccccaaaaagagcgtcaggtggccacagctgtgcaatggaccaaggcagaaggcagctatggcgtcccactgtggatcatcatcctagccatcctgtttggcctcctgctcctaggtctactcatctacatcctctacaaggtcagccacatcctgcttgtgacttggccaccctctcatcaggctctgcccttgacctggcacagtcccaagtatctacctctagaccagttca

SEQ ID NO: 10121 - DNA, 1333 bp, Homo sapiens
  source 1..1333: mol_type = unassigned DNA
aaagggcctggaggtgagatcctgaacactggcatggggaagaggagcagattcagaggaccaaggctgaggggttggggaaggttgctgggggcctgcaagaggcaatgaggatgtgcctatagctagggttgagggtcacaaggcccaaagttacctcaaaatcctctggaggaaaaaggactttcatccactgtgtttctttctgcctgaactatcccttctttgtttcccggcatacccctagggcccagttatgtgccacctcctctaggaagccttcttcaaaccttttcctctgggcccgaatgcctgttttatagttcatttactcattaacatctaattaaataagtgactgtactgaacactgttaggcccaggaaatattgcaccaaacagaactgacaaggtctccacgttcatggaacttacattctagtgaagggtgatagacatagaaaagaaaaagagaaggagaaaaattaacagggattgaaaggtgatgaagtgaagagttaataagctgtagggacactatttaaattggatcatagaaaaacctcttgaagacgtcacagctgaactgaggcctgaaagataaggttgaacctgtctataagactcagggatgagcattccaaaccaagggaacatccagtgcaaaaacaggaacacagacctaattatttacttaagcatctcctccagtgtgatctccaagaaccaagttttcctcatttccatattttaaccctgagctcagtgccttgcgcataggaggtggacagttggatgaatcaataaagagatagatgaaagaataggttgaagctgctctggaacccaggtgcaagctgacttagaagctgtaatgagatgggaaaggggcccaacactttcttttatagttggatcccgagggttccctgcaccaccagcaaaaacgggaagctccaagccgcagctctgcttcctcgggacctcagatcctgaaatgcccggaggctgagtgtttcaggctgcgctgtgagctcgggcccctgcaccaacaagagagccaaagtctgcagttgcatttccgagtctgggccaagactttcttgcagcgggagcaccagccatttagcctgcagtgtgaggctgtgtacaaagccctgaagatgccctaccgaatcctgcctcggcagctgccccaaaaagagcgtcaggtggccacagctgtgcaatggaccaaggcagaaggcagctatggcgtcccactgtggatcatcatcctagccatcctgtttggcctcctgctcctaggtctactcatctacatcctctacaa

SEQ ID NO: 10122 - DNA, 568 bp, Homo sapiens
  source 1..568: mol_type = unassigned DNA
cagaatgtgggtgagggtggcgcctatgaggctgagcttcgggtcaccgcccctccagaggctgagtactcaggactcgtcagacacccaggggtgagatgagactctcgagtgggatttgggaggatacccctctagaggggacaccaaaacctgaccagtgcccaccccatctccagaacttctccagcctgagctgtgactactttgccgtgaaccagagccgcctgctggtgtgtgacctgggcaaccccatgaaggcaggagccagtctgtggggtggccttcggtttacagtccctcatctccgggacactaagaaaaccatccagtttgacttccagatcctcaggtagggagtgagtgtgtctaggctggggctgagctggggacggaagggagggctgggcgccattctcactggctgcactccagcacctcagtcttgcctccatcccacagcaagaatctcaacaactcgcaaagcgacgtggtttcctttcggctctccgtggaggctcaggcccaggtcaccctgaacgggtcagtgccaggcaaaatggggtct

SEQ ID NO: 10123 - DNA, 354 bp, Homo sapiens
  source 1..354: mol_type = unassigned DNA
gggagaagggacctgggaagacagaggcctgggtattgggggggcagggccatggaaagagaagagcctacagcccaggaatgggtctaaacttcccctctcaaggctgccctgctccccaggctcagatcttgctggactgtggagaagacaacatctgtgtgcctgacctgcagctggaagtgtttggggagcagaaccatgtgtacctgggtgacaagaatgccctgaacctcactttccatgcccagaatgtgggtgagggtggcgcctatgaggctgagcttcgggtcaccgcccctccagaggctgagtactcaggactcgtcagacacccagggaacttctccagcc

SEQ ID NO: 10124 - DNA, 582 bp, Homo sapiens
  source 1..582: mol_type = unassigned DNA
atgcagaggacacacattctggcgcttgggcatcagtttcctgtgtccaggttacagaggagtcctaattctattgaccccacattcactcttggcaggggccgccccatcgtgtccgctagtgcctccctcaccatcttccccgccatgttcaacccagaggagcggagctgcagcttagaggggaaccctgtggcctggtgagctggtgcccaggaaattgcagagacctgagcctgggagtgggcaggggcaccaagtctgccttaaaaaggggaaaatggtggtgtcctagtctgggtctggctgggagataggtagaggataggatgtctgttccagttggattcaccagctttcttcttggtctctctccagcatcaaccttagcttctgcctcaatgcttctggaaaacacgttgctgactccattggtttcacagtggaacttcagctggactggcagaagcagaagggaggggtacggcgggcactgttcctggcctccaggcaggcaaccctgacccagaccctgctcatccagaatggggctcgagaggattgcagagagatgaagatcta

SEQ ID NO: 10125 - DNA, 536 bp, Homo sapiens
  source 1..536: mol_type = unassigned DNA
ttccttaagttcctgggtgcagttctggctaattccaacagagggcgctgtcttctcacttcaacctccctgagcgttgaaaccaggaggggttaggaagaaaggatcctgatctggggcttgctgtaagaggtgatttcttgacttcttacagatctgattgtggggtcctttggtgtggacaaggctgtggtatacaggtatgagctccaaagggagatgaggggacaacctgggtggactggaactggaaatttctcaacagagctgaggttgggaaaatcaatgcagaggacacacattctggcgcttgggcatcagtttcctgtgtccaggttacagaggagtcctaattctattgaccccacattcactcttggcaggggccgccccatcgtgtccgctagtgcctccctcaccatcttccccgccatgttcaacccagaggagcggagctgcagcttagaggggaaccctgtggcctgcatcaaccttagcttctgcctcaatgcttctggaaaacacgttgctgactc

SEQ ID NO: 10126 - DNA, 1240 bp, Homo sapiens
  source 1..1240: mol_type = unassigned DNA
aggacagggaagagcgggcgctatggggagccggacgccagagtcccctctccacgccgtgcagctgcgctggggcccccggcgccgacccccgctgctgccgctgctgttgctgctgctgccgccgccacccagggtcgggggcttcaacttagacgcggaggccccagcagtactctcggggcccccgggctccttcttcggattctcagtggagttttaccggccgggaacagacgggctctcggctcctggagtcctcactgtccagctcagagggagaggagcctgtggagtacaagtccttgcagtggttcggggcaacagttcgagcccatggctcctccatcttggcatgcgctccactgtacagctggcgcacagagaaggagccactgagcgaccccgtgggcacctgctacctctccacagataacttcacccgaattctggagtatgcaccctgccgctcagatttcagctgggcagcaggacagggttactgccaaggaggcttcagtgccgagttcaccaagactggccgtgtggttttaggtggaccaggaagctatttctggcaaggccagatcctgtctgccactcaggagcagattgcagaatcttattaccccgagtacctgatcaacctggttcaggggcagctgcagactcgccaggccagttccatctatgatgacagctacctaggatactctgtggctgttggtgaattcagtggtgatgacacagaagactttgttgctggtgtgcccaaagggaacctcacttacggctatgtcaccatccttaatggctcagacattcgatccctctacaacttctcaggggaacagatggcctcctactttggctatgcagtggccgccacagacgtcaatggggacgggctggatgacttgctggtgggggcacccctgctcatggatcggacccctgacgggcggcctcaggaggtgggcagggtctacgtctacctgcagcacccagccggcatagagcccacgcccacccttaccctcactggccatgatgagtttggccgatttggcagctccttgacccccctgggggacctggaccaggatggctacaatgatgtggccatcggggctccctttggtggggagacccagcagggagtagtgtttgtatttcctgggggcccaggagggctgggctctaagccttcccaggttctgcagcccctgtgggcagccag

SEQ ID NO: 10127 - DNA, 1013 bp, Homo sapiens
  source 1..1013: mol_type = unassigned DNA
gctgctgccgctgctgttgctgctgctgccgccgccacccagggtcgggggcttcaacttagacgcggaggccccagcagtactctcggggcccccgggctccttcttcggattctcagtggagttttaccggccgggaacagacggggtcagtgtgctggtgggagcacccaaggctaataccagccagccaggagtgctgcagggtggtgctgtctacctctgtccttggggtgccagccccacacagtgcacccccattgaatttgacagcaaaggcatgcgctccactgtacagctggcgcacagagaaggagccactgagcgaccccgtgggcacctgctacctctccacagataacttcacccgaattctggagtatgcaccctgccgctcagatttcagctgggcagcaggacagggttactgccaaggaggcttcagtgccgagttcaccaagactggccgtgtggttttaggtggaccaggaagctatttctggcaaggccagatcctgtctgccactcaggagcagattgcagaatcttattaccccgagtacctgatcaacctggttcaggggcagctgcagactcgccaggccagttccatctatgatgacagctacctaggatactctgtggctgttggtgaattcagtggtgatgacacagaagactttgttgctggtgtgcccaaagggaacctcacttacggctatgtcaccatccttaatggctcagacattcgatccctctacaacttctcaggggaacagatggcctcctactttggctatgcagtggccgccacagacgtcaatggggacgggctggatgacttgctggtgggggcacccctgctcatggatcggacccctgacgggcggcctcaggaggtgggcagggtctacgtctacctgcagcacccagccggcatagagcccacgcccacccttaccctcactggccatgatgagtttggccgatttggcagctccttgacccccctg

SEQ ID NO: 10128 - DNA, 547 bp, Homo sapiens
  source 1..547: mol_type = unassigned DNA
ctaacttcaggagctctccctcttcagcctacccatctcctattcctctggaccctgccttctctcccctccattctcaccactggccctcacagacccctcctcactctcctcttccgtcccctcggacctgtcctctctgctgcttccatcccctatacctcctgggccactcctccccgcctcagtatacctggtcttcttggaaaatacccccagctcttgtgacctctaccataatccttcactttgggccttcttgcctagtgagaaagctgaggaagctcctctctccactcctgctgcctgatttccaagactcacattttcctcctacacgccccaaggctgggtggctgggcagccggatgcctgggtcttggcccagggaggggatttggcttgggaggagagtatataggctagatgagagaccctgaggctccacaggaccttggcgctccagaagctatacatctaatctcagcagggtcagtgtgctggtgggagcacccaaggctaataccagccagccaggagtgctgca

SEQ ID NO: 10129 - DNA, 3935 bp, Homo sapiens
  source 1..3935: mol_type = unassigned DNA
ctcgcgcagggatcgtcccatggccggggctcggagccgcgacccttggggggcctccgggatttgctacctttttggctccctgctcgtcgaactgctcttctcacgggctgtcgccttcaatctggacgtgatgggtgccttgcgcaaggagggcgagccaggcagcctcttcggcttctctgtggccctgcaccggcagttgcagccccgaccccagagctggctgctggtgggtgctccccaggccctggctcttcctgggcagcaggcgaatcgcactggaggcctcttcgcttgcccgttgagcctggaggagactgactgctacagagtggacatcgaccagggagctgatatgcaaaaggaaagcaaggagaaccagtggttgggagtcagtgttcggagccaggggcctgggggcaagattgttacctgtgcacaccgatatgaggcaaggcagcgagtggaccagatcctggagacgcgggatatgattggtcgctgctttgtgctcagccaggacctggccatccgggatgagttggatggtggggaatggaagttctgtgagggacgcccccaaggccatgaacaatttgggttctgccagcagggcacagctgccgccttctcccctgatagccactacctcctctttggggccccaggaacctataattggaagggcacggccagggtggagctctgtgcacagggctcagcggacctggcacacctggacgacggtccctacgaggcggggggagagaaggagcaggacccccgcctcatcccggtccctgccaacagctactttggcttctctattgactcggggaaaggtctggtgcgtgcagaagagctgagctttgtggctggagccccccgcgccaaccacaagggtgctgtggtcatcctgcgcaaggacagcgccagtcgcctggtgcccgaggttatgctgtctggggagcgcctgacctccggctttggctactcactggctgtggctgacctcaacagtgatggctggccagacctgatagtgggtgccccctacttctttgagcgccaagaagagctggggggtgctgtgtatgtgtacttgaaccaggggggtcactgggctgggatctcccctctccggctctgcggctcccctgactccatgttcgggatcagcctggctgtcctgggggacctcaaccaagatggctttccagatattgcagtgggtgccccctttgatggtgatgggaaagtcttcatctaccatgggagcagcctgggggttgtcgccaaaccttcacaggtgctggagggcgaggctgtgggcatcaagagcttcggctactccctgtcaggcagcttggatatggatgggaaccaataccctgacctgctggtgggctccctggctgacaccgcagtgctcttcagggccagacccatcctccatgtctcccatgaggtctctattgctccacgaagcatcgacctggagcagcccaactgtgctggcggccactcggtctgtgtggacctaagggtctgtttcagctacattgcagtccccagcagctatagccctactgtggccctggactatgtgttagatgcggacacagaccggaggctccggggccaggttccccgtgtgacgttcctgagccgtaacctggaagaacccaagcaccaggcctcgggcaccgtgtggctgaagcaccagcatgaccgagtctgtggagacgccatgttccagctccaggaaaatgtcaaagacaagcttcgggccattgtagtgaccttgtcctacagtctccagacccctcggctccggcgacaggctcctggccaggggctgcctccagtggcccccatcctcaatgcccaccagcccagcacccagcgggcagagatccacttcctgaagcaaggctgtggtgaagacaagatctgccagagcaatctgcagctggtccgcgcccgcttctgtacccgggtcagcgacacggaattccaacctctgcccatggatgtggatggaacaacagccctgtttgcactgagtgggcagccagtcattggcctggagctgatggtcaccaacctgccatcggacccagcccagccccaggctgatggggatgatgcccatgaagcccagctcctggtcatgcttcctgactcactgcactactcaggggtccgggccctggaccctgcggagaagccactctgcctgtccaatgagaatgcctcccatgttgagtgtgagctggggaaccccatgaagagaggtgcccaggtcaccttctacctcatccttagcacctccgggatcagcattgagaccacggaactggaggtagagctgctgttggccacgatcagtgagcaggagctgcatccagtctctgcacgagcccgtgtcttcattgagctgccactgtccattgcaggaatggccattccccagcaactcttcttctctggtgtggtgaggggcgagagagccatgcagtctgagcgggatgtgggcagcaaggtcaagtatgaggtcacggtttccaaccaaggccagtcgctcagaaccctgggctctgccttcctcaacatcatgtggcctcatgagattgccaatgggaagtggttgctgtacccaatgcaggttgagctggagggcgggcaggggcctgggcagaaagggctttgctctcccaggcccaacatcctccacctggatgtggacagtagggataggaggcggcgggagctggagccacctgagcagcaggagcctggtgagcggcaggagcccagcatgtcctggtggccagtgtcctctgctgagaagaagaaaaacatcaccctggactgcgcccggggcacggccaactgtgtggtgttcagctgcccactctacagctttgaccgcgcggctgtgctgcatgtctggggccgtctctggaacagcacctttctggaggagtactcagctgtgaagtccctggaagtgattgtccgggccaacatcacagtgaagtcctccataaagaacttgatgctccgagatgcctccacagtgatcccagtgatggtatacttggaccccatggctgtggtggcagaaggagtgccctggtgggtcatcctcctggctgtactggctgggctgctggtgctagcactgctggtgctgctcctgtggaagatgggattcttcaaacgggcgaagcaccccgaggccaccgtgccccagtaccatgcggtgaagattcctcgggaagaccgacagcagttcaaggaggagaagacgggcaccatcctgaggaacaactggggcagcccccggcgggagggcccggatgcacaccccatcctggctgctgacgggcatcccgagctgggccccgatgggcatccagggccaggcaccgcctaggttcccatgtcccagcctggcctgtggctgccctccatcccttccccagagatggctccttgggatgaagagggtagagtgggctgctggtgtcgcatcaagatttggcaggatcggcttcctcaggggcacagacctctcccacccacaagaactcctcccacccaacttccccttagagtgctgtgagatgagagtgggtaaatcagggacagggccatggggtagggtgagaagggcaggggtgtcctgatgcaaaggtggggagaagggatcctaatcccttcctctcccattcaccctgtgtaacaggaccccaaggacctgcctccccggaagtgccttaacctagagggtcggggaggaggttgtgtcactgactcaggctgctccttctctagtttcccctctcatctgaccttagtttgctgccatcagtctagtggtttcgtggtttcgtctatttattaaaaaatatttgagaacaaaa

SEQ ID NO: 10130 - DNA, 4120 bp, Homo sapiens
  source 1..4120: mol_type = unassigned DNA
gccggagctgcggctgctgtagttgtcctagccggtgctggggcggcggggtggcggagcggcgggcgggcgggagggctggcggggcgaacgtctgggagacgtctgaaagaccaacgagactttggagaccagagacgcgcctggggggacctggggcttggggcgtgcgagatttcccttgcattcgctgggagctcgcgcagggatcgtcccatggccggggctcggagccgcgacccttggggggcctccgggatttgctacctttttggctccctgctcgtcgaactgctcttctcacgggctgtcgccttcaatctggacgtgatgggtgccttgcgcaaggagggcgagccaggcagcctcttcggcttctctgtggccctgcaccggcagttgcagccccgaccccagagctggctgctggtgggtgctccccaggccctggctcttcctgggcagcaggcgaatcgcactggaggcctcttcgcttgcccgttgagcctggaggagactgactgctacagagtggacatcgaccagggagctgatatgcaaaaggaaagcaaggagaaccagtggttgggagtcagtgttcggagccaggggcctgggggcaagattgttacctgtgcacaccgatatgaggcaaggcagcgagtggaccagatcctggagacgcgggatatgattggtcgctgctttgtgctcagccaggacctggccatccgggatgagttggatggtggggaatggaagttctgtgagggacgcccccaaggccatgaacaatttgggttctgccagcagggcacagctgccgccttctcccctgatagccactacctcctctttggggccccaggaacctataattggaaggggttgctttttgtgaccaacattgatagctcagaccccgaccagctggtgtataaaactttggaccctgctgaccggctcccaggaccagccggagacttggccctcaatagctacttaggcttctctattgactcggggaaaggtctggtgcgtgcagaagagctgagctttgtggctggagccccccgcgccaaccacaagggtgctgtggtcatcctgcgcaaggacagcgccagtcgcctggtgcccgaggttatgctgtctggggagcgcctgacctccggctttggctactcactggctgtggctgacctcaacagtgatggctggccagacctgatagtgggtgccccctacttctttgagcgccaagaagagctggggggtgctgtgtatgtgtacttgaaccaggggggtcactgggctgggatctcccctctccggctctgcggctcccctgactccatgttcgggatcagcctggctgtcctgggggacctcaaccaagatggctttccagatattgcagtgggtgccccctttgatggtgatgggaaagtcttcatctaccatgggagcagcctgggggttgtcgccaaaccttcacaggtgctggagggcgaggctgtgggcatcaagagcttcggctactccctgtcaggcagcttggatatggatgggaaccaataccctgacctgctggtgggctccctggctgacaccgcagtgctcttcagggccagacccatcctccatgtctcccatgaggtctctattgctccacgaagcatcgacctggagcagcccaactgtgctggcggccactcggtctgtgtggacctaagggtctgtttcagctacattgcagtccccagcagctatagccctactgtggccctggactatgtgttagatgcggacacagaccggaggctccggggccaggttccccgtgtgacgttcctgagccgtaacctggaagaacccaagcaccaggcctcgggcaccgtgtggctgaagcaccagcatgaccgagtctgtggagacgccatgttccagctccaggaaaatgtcaaagacaagcttcgggccattgtagtgaccttgtcctacagtctccagacccctcggctccggcgacaggctcctggccaggggctgcctccagtggcccccatcctcaatgcccaccagcccagcacccagcgggcagagatccacttcctgaagcaaggctgtggtgaagacaagatctgccagagcaatctgcagctggtccgcgcccgcttctgtacccgggtcagcgacacggaattccaacctctgcccatggatgtggatggaacaacagccctgtttgcactgagtgggcagccagtcattggcctggagctgatggtcaccaacctgccatcggacccagcccagccccaggctgatggggatgatgcccatgaagcccagctcctggtcatgcttcctgactcactgcactactcaggggtccgggccctggaccctgcggagaagccactctgcctgtccaatgagaatgcctcccatgttgagtgtgagctggggaaccccatgaagagaggtgcccaggtcaccttctacctcatccttagcacctccgggatcagcattgagaccacggaactggaggtagagctgctgttggccacgatcagtgagcaggagctgcatccagtctctgcacgagcccgtgtcttcattgagctgccactgtccattgcaggaatggccattccccagcaactcttcttctctggtgtggtgaggggcgagagagccatgcagtctgagcgggatgtgggcagcaaggtcaagtatgaggtcacggtttccaaccaaggccagtcgctcagaaccctgggctctgccttcctcaacatcatgtggcctcatgagattgccaatgggaagtggttgctgtacccaatgcaggttgagctggagggcgggcaggggcctgggcagaaagggctttgctctcccaggcccaacatcctccacctggatgtggacagtagggataggaggcggcgggagctggagccacctgagcagcaggagcctggtgagcggcaggagcccagcatgtcctggtggccagtgtcctctgctgagaagaagaaaaacatcaccctggactgcgcccggggcacggccaactgtgtggtgttcagctgcccactctacagctttgaccgcgcggctgtgctgcatgtctggggccgtctctggaacagcacctttctggaggagtactcagctgtgaagtccctggaagtgattgtccgggccaacatcacagtgaagtcctccataaagaacttgatgctccgagatgcctccacagtgatcccagtgatggtatacttggaccccatggctgtggtggcagaaggagtgccctggtgggtcatcctcctggctgtactggctgggctgctggtgctagcactgctggtgctgctcctgtggaagatgggattcttcaaacgggcgaagcaccccgaggccaccgtgccccagtaccatgcggtgaagattcctcgggaagaccgacagcagttcaaggaggagaagacgggcaccatcctgaggaacaactggggcagcccccggcgggagggcccggatgcacaccccatcctggctgctgacgggcatcccgagctgggccccgatgggcatccagggccaggcaccgcctaggttcccatgtcccagcctggcctgtggctgccctccatcccttccccagagatggctccttgggatgaagagggtagagtgggctgctggtgtcgcatcaagatttggcaggatcggcttcctcaggggcacagacctctcccacccacaagaactcctcccacccaacttccccttagagtgctgtgagatgagagtgggtaaatcagggacagggccatggggtagggtgagaagggcaggggtgtcctgatgcaaaggtggggagaagggatcctaatcccttcctctcccattcaccctgtgtaacaggaccccaaggacctgcctccccggaagtgccttaacctagagggtcggggaggaggttgtgtcactgactcaggctgctccttctctagtttcccctctcatctgaccttagtttgctgccatcagtctagtggtttcgtggtttcgtctatttattaaaaaatatttgagaacaaaa

SEQ ID NO: 10131 - DNA, 1965 bp, Homo sapiens
  source 1..1965: mol_type = unassigned DNA
tgtcaaagacaagcttcgggccattgtagtgaccttgtcctacagtctccagacccctcggctccggcgacaggctcctggccaggggctgcctccagtggcccccatcctcaatgcccaccagcccagcacccagcgggcagagatccacttcctgaagcaaggctgtggtgaagacaagatctgccagagcaatctgcagctggtccgcgcccgcttctgtacccgggtcagcgacacggaattccaacctctgcccatgagaagccactctgcctgtccaatgagaatgcctcccatgttgagtgtgagctggggaaccccatgaagagaggtgcccaggtcaccttctacctcatccttagcacctccgggatcagcattgagaccacggaactggaggtagagctgctgttggccacgatcagtgagcaggagctgcatccagtctctgcacgagcccgtgtcttcattgagctgccactgtccattgcaggaatggccattccccagcaactcttcttctctggtgtggtgaggggcgagagagccatgcagtctgagcgggatgtgggcagcaaggtcaagtatgaggtcacggtttccaaccaaggccagtcgctcagaaccctgggctctgccttcctcaacatcatgtggcctcatgagattgccaatgggaagtggttgctgtacccaatgcaggttgagctggagggcgggcaggggcctgggcagaaagggctttgctctcccaggcccaacatcctccacctggatgtggacagtagggataggaggcggcgggagctggagccacctgagcagcaggagcctggtgagcggcaggagcccagcatgtcctggtggccagtgtcctctgctgagaagaagaaaaacatcaccctggactgcgcccggggcacggccaactgtgtggtgttcagctgcccactctacagctttgaccgcgcggctgtgctgcatgtctggggccgtctctggaacagcacctttctggaggagtactcagctgtgaagtccctggaagtgattgtccgggccaacatcacagtgaagtcctccataaagaacttgatgctccgagatgcctccacagtgatcccagtgatggtatacttggaccccatggctgtggtggcagaaggagtgccctggtgggtcatcctcctggctgtactggctgggctgctggtgctagcactgctggtgctgctcctgtggaagatgggattcttcaaacgggcgaagcaccccgaggccaccgtgccccagtaccatgcggtgaagattcctcgggaagaccgacagcagttcaaggaggagaagacgggcaccatcctgaggaacaactggggcagcccccggcgggagggcccggatgcacaccccatcctggctgctgacgggcatcccgagctgggccccgatgggcatccagggccaggcaccgcctaggttcccatgtcccagcctggcctgtggctgccctccatcccttccccagagatggctccttgggatgaagagggtagagtgggctgctggtgtcgcatcaagatttggcaggatcggcttcctcaggggcacagacctctcccacccacaagaactcctcccacccaacttccccttagagtgctgtgagatgagagtgggtaaatcagggacagggccatggggtagggtgagaagggcaggggtgtcctgatgcaaaggtggggagaagggatcctaatcccttcctctcccattcaccctgtgtaacaggaccccaaggacctgcctccccggaagtgccttaacctagagggtcggggaggaggttgtgtcactgactcaggctgctccttctctagtttcccctctcatctgaccttagtttgctgccatcagtctagtggtttcgtggtttcgtctatttattaaaaaatatttgagaac

SEQ ID NO: 10132 - DNA, 4084 bp, Homo sapiens
  source 1..4084: mol_type = unassigned DNA
tgctgtagttgtcctagccggtgctggggcggcggggtggcggagcggcgggcgggcgggagggctggcggggcgaacgtctgggagacgtctgaaagaccaacgagactttggagaccagagacgcgcctggggggacctggggcttggggcgtgcgagatttcccttgcattcgctgggagctcgcgcagggatcgtcccatggccggggctcggagccgcgacccttggggggcctccgggatttgctacctttttggctccctgctcgtcgaactgctcttctcacgggctgtcgccttcaatctggacgtgatgggtgccttgcgcaaggagggcgagccaggcagcctcttcggcttctctgtggccctgcaccggcagttgcagccccgaccccagagctggctgctggtgggtgctccccaggccctggctcttcctgggcagcaggcgaatcgcactggaggcctcttcgcttgcccgttgagcctggaggagactgactgctacagagtggacatcgaccagggagctgatatgcaaaaggaaagcaaggagaaccagtggttgggagtcagtgttcggagccaggggcctgggggcaagattgttacctgtgcacaccgatatgaggcaaggcagcgagtggaccagatcctggagacgcgggatatgattggtcgctgctttgtgctcagccaggacctggccatccgggatgagttggatggtggggaatggaagttctgtgagggacgcccccaaggccatgaacaatttgggttctgccagcagggcacagctgccgccttctcccctgatagccactacctcctctttggggccccaggaacctataattggaaggggttgctttttgtgaccaacattgatagctcagaccccgaccagctggtgtataaaactttggaccctgctgaccggctcccaggaccagccggagacttggccctcaatagctacttaggcttctctattgactcggggaaaggtctggtgcgtgcagaagagctgagctttgtggctggagccccccgcgccaaccacaagggtgctgtggtcatcctgcgcaaggacagcgccagtcgcctggtgcccgaggttatgctgtctggggagcgcctgacctccggctttggctactcactggctgtggctgacctcaacagtgatggctggccagacctgatagtgggtgccccctacttctttgagcgccaagaagagctggggggtgctgtgtatgtgtacttgaaccaggggggtcactgggctgggatctcccctctccggctctgcggctcccctgactccatgttcgggatcagcctggctgtcctgggggacctcaaccaagatggctttccagatattgcagtgggtgccccctttgatggtgatgggaaagtcttcatctaccatgggagcagcctgggggttgtcgccaaaccttcacaggtgctggagggcgaggctgtgggcatcaagagcttcggctactccctgtcaggcagcttggatatggatgggaaccaataccctgacctgctggtgggctccctggctgacaccgcagtgctcttcagggccagacccatcctccatgtctcccatgaggtctctattgctccacgaagcatcgacctggagcagcccaactgtgctggcggccactcggtctgtgtggacctaagggtctgtttcagctacattgcagtccccagcagctatagccctactgtggatgcggacacagaccggaggctccggggccaggttccccgtgtgacgttcctgagccgtaacctggaagaacccaagcaccaggcctcgggcaccgtgtggctgaagcaccagcatgaccgagtctgtggagacgccatgttccagctccaggaaaatgtcaaagacaagcttcgggccattgtagtgaccttgtcctacagtctccagacccctcggctccggcgacaggctcctggccaggggctgcctccagtggcccccatcctcaatgcccaccagcccagcacccagcgggcagagatccacttcctgaagcaaggctgtggtgaagacaagatctgccagagcaatctgcagctggtccgcgcccgcttctgtacccgggtcagcgacacggaattccaacctctgcccatggatgtggatggaacaacagccctgtttgcactgagtgggcagccagtcattggcctggagctgatggtcaccaacctgccatcggacccagcccagccccaggctgatggggatgatgcccatgaagcccagctcctggtcatgcttcctgactcactgcactactcaggggtccgggccctggaccctgcggagaagccactctgcctgtccaatgagaatgcctcccatgttgagtgtgagctggggaaccccatgaagagaggtgcccaggtcaccttctacctcatccttagcacctccgggatcagcattgagaccacggaactggaggtagagctgctgttggccacgatcagtgagcaggagctgcatccagtctctgcacgagcccgtgtcttcattgagctgccactgtccattgcaggaatggccattccccagcaactcttcttctctggtgtggtgaggggcgagagagccatgcagtctgagcgggatgtgggcagcaaggtcaagtatgaggtcacggtttccaaccaaggccagtcgctcagaaccctgggctctgccttcctcaacatcatgtggcctcatgagattgccaatgggaagtggttgctgtacccaatgcaggttgagctggagggcgggcaggggcctgggcagaaagggctttgctctcccaggcccaacatcctccacctggatgtggacagtagggataggaggcggcgggagctggagccacctgagcagcaggagcctggtgagcggcaggagcccagcatgtcctggtggccagtgtcctctgctgagaagaagaaaaacatcaccctggactgcgcccggggcacggccaactgtgtggtgttcagctgcccactctacagctttgaccgcgcggctgtgctgcatgtctggggccgtctctggaacagcacctttctggaggagtactcagctgtgaagtccctggaagtgattgtccgggccaacatcacagtgaagtcctccataaagaacttgatgctccgagatgcctccacagtgatcccagtgatggtatacttggaccccatggctgtggtggcagaaggagtgccctggtgggtcatcctcctggctgtactggctgggctgctggtgctagcactgctggtgctgctcctgtggaagatgggattcttcaaacgggcgaagcaccccgaggccaccgtgccccagtaccatgcggtgaagattcctcgggaagaccgacagcagttcaaggaggagaagacgggcaccatcctgaggaacaactggggcagcccccggcgggagggcccggatgcacaccccatcctggctgctgacgggcatcccgagctgggccccgatgggcatccagggccaggcaccgcctaggttcccatgtcccagcctggcctgtggctgccctccatcccttccccagagatggctccttgggatgaagagggtagagtgggctgctggtgtcgcatcaagatttggcaggatcggcttcctcaggggcacagacctctcccacccacaagaactcctcccacccaacttccccttagagtgctgtgagatgagagtgggtaaatcagggacagggccatggggtagggtgagaagggcaggggtgtcctgatgcaaaggtggggagaagggatcctaatcccttcctctcccattcaccctgtgtaacaggaccccaaggacctgcctccccggaagtgccttaacctagagggtcggggaggaggttgtgtcactgactcaggctgctccttctctagtttcccctctcatctgaccttagtttgctgccatcagtctagtggtttcgtggtttcgtctatttattaaaaaatatttgagaac

SEQ ID NO: 10133 - DNA, 3763 bp, Homo sapiens
  source 1..3763: mol_type = unassigned DNA
gacacagagtgagtagacaaggcttcacatactgggagatctggctgggcttcaagagagggggttggtggtggtgtggctaagttccaaatgttggcctgaagccagtgctcaaagaaagggggcccttgagacagtccaaatggctccctttgccactcccatggttcaagctttgactacaaccagaattcagaggcaggcagaaggattccagtgctggagagaatgtggaacaaggagatctccatttgagggcaaggaaacctgtgcacaccgatatgaggcaaggcagcgagtggaccagatcctggagacgcgggatatgattggtcgctgctttgtgctcagccaggacctggccatccgggatgagttggatggtggggaatggaagttctgtgagggacgcccccaaggccatgaacaatttgggttctgccagcagggcacagctgccgccttctcccctgatagccactacctcctctttggggccccaggaacctataattggaagggcacggccagggtggagctctgtgcacagggctcagcggacctggcacacctggacgacggtccctacgaggcggggggagagaaggagcaggacccccgcctcatcccggtccctgccaacagctactttggcttctctattgactcggggaaaggtctggtgcgtgcagaagagctgagctttgtggctggagccccccgcgccaaccacaagggtgctgtggtcatcctgcgcaaggacagcgccagtcgcctggtgcccgaggttatgctgtctggggagcgcctgacctccggctttggctactcactggctgtggctgacctcaacagtgatggctggccagacctgatagtgggtgccccctacttctttgagcgccaagaagagctggggggtgctgtgtatgtgtacttgaaccaggggggtcactgggctgggatctcccctctccggctctgcggctcccctgactccatgttcgggatcagcctggctgtcctgggggacctcaaccaagatggctttccagatattgcagtgggtgccccctttgatggtgatgggaaagtcttcatctaccatgggagcagcctgggggttgtcgccaaaccttcacaggtgctggagggcgaggctgtgggcatcaagagcttcggctactccctgtcaggcagcttggatatggatgggaaccaataccctgacctgctggtgggctccctggctgacaccgcagtgctcttcagggccagacccatcctccatgtctcccatgaggtctctattgctccacgaagcatcgacctggagcagcccaactgtgctggcggccactcggtctgtgtggacctaagggtctgtttcagctacattgcagtccccagcagctatagccctactgtggccctggactatgtgttagatgcggacacagaccggaggctccggggccaggttccccgtgtgacgttcctgagccgtaacctggaagaacccaagcaccaggcctcgggcaccgtgtggctgaagcaccagcatgaccgagtctgtggagacgccatgttccagctccaggaaaatgtcaaagacaagcttcgggccattgtagtgaccttgtcctacagtctccagacccctcggctccggcgacaggctcctggccaggggctgcctccagtggcccccatcctcaatgcccaccagcccagcacccagcgggcagagatccacttcctgaagcaaggctgtggtgaagacaagatctgccagagcaatctgcagctggtccgcgcccgcttctgtacccgggtcagcgacacggaattccaacctctgcccatggatgtggatggaacaacagccctgtttgcactgagtgggcagccagtcattggcctggagctgatggtcaccaacctgccatcggacccagcccagccccaggctgatggggatgatgcccatgaagcccagctcctggtcatgcttcctgactcactgcactactcaggggtccgggccctggaccctgcggagaagccactctgcctgtccaatgagaatgcctcccatgttgagtgtgagctggggaaccccatgaagagaggtgcccaggtcaccttctacctcatccttagcacctccgggatcagcattgagaccacggaactggaggtagagctgctgttggccacgatcagtgagcaggagctgcatccagtctctgcacgagcccgtgtcttcattgagctgccactgtccattgcaggaatggccattccccagcaactcttcttctctggtgtggtgaggggcgagagagccatgcagtctgagcgggatgtgggcagcaaggtcaagtatgaggtcacggtttccaaccaaggccagtcgctcagaaccctgggctctgccttcctcaacatcatgtggcctcatgagattgccaatgggaagtggttgctgtacccaatgcaggttgagctggagggcgggcaggggcctgggcagaaagggctttgctctcccaggcccaacatcctccacctggatgtggacagtagggataggaggcggcgggagctggagccacctgagcagcaggagcctggtgagcggcaggagcccagcatgtcctggtggccagtgtcctctgctgagaagaagaaaaacatcaccctggactgcgcccggggcacggccaactgtgtggtgttcagctgcccactctacagctttgaccgcgcggctgtgctgcatgtctggggccgtctctggaacagcacctttctggaggagtactcagctgtgaagtccctggaagtgattgtccgggccaacatcacagtgaagtcctccataaagaacttgatgctccgagatgcctccacagtgatcccagtgatggtatacttggaccccatggctgtggtggcagaaggagtgccctggtgggtcatcctcctggctgtactggctgggctgctggtgctagcactgctggtgctgctcctgtggaagatgggattcttcaaacgggcgaagcaccccgaggccaccgtgccccagtaccatgcggtgaagattcctcgggaagaccgacagcagttcaaggaggagaagacgggcaccatcctgaggaacaactggggcagcccccggcgggagggcccggatgcacaccccatcctggctgctgacgggcatcccgagctgggccccgatgggcatccagggccaggcaccgcctaggttcccatgtcccagcctggcctgtggctgccctccatcccttccccagagatggctccttgggatgaagagggtagagtgggctgctggtgtcgcatcaagatttggcaggatcggcttcctcaggggcacagacctctcccacccacaagaactcctcccacccaacttccccttagagtgctgtgagatgagagtgggtaaatcagggacagggccatggggtagggtgagaagggcaggggtgtcctgatgcaaaggtggggagaagggatcctaatcccttcctctcccattcaccctgtgtaacaggaccccaaggacctgcctccccggaagtgccttaacctagagggtcggggaggaggttgtgtcactgactcaggctgctccttctctagtttcccctctcatctgaccttagtttgctgccatcagtctagtggtttcgtggtttcgtctatttattaaaaaatatttgagaac

SEQ ID NO: 10134 - DNA, 3930 bp, Homo sapiens
  source 1..3930: mol_type = unassigned DNA
tcgctgggagctcgcgcagggatcgtcccatggccggggctcggagccgcgacccttggggggcctccgggatttgctacctttttggctccctgctcgtcgaactgctcttctcacgggctgtcgccttcaatctggacgtgatgggtgccttgcgcaaggagggcgagccaggcagcctcttcggcttctctgtggccctgcaccggcagttgcagccccgaccccagagctggctgctggtgggtgctccccaggccctggctcttcctgggcagcaggcgaatcgcactggaggcctcttcgcttgcccgttgagcctggaggagactgactgctacagagtggacatcgaccagggagctgatatgcaaaaggaaagcaaggagaaccagtggttgggagtcagtgttcggagccaggggcctgggggcaagattgttacctgtgcacaccgatatgaggcaaggcagcgagtggaccagatcctggagacgcgggatatgattggtcgctgctttgtgctcagccaggacctggccatccgggatgagttggatggtggggaatggaagttctgtgagggacgcccccaaggccatgaacaatttgggttctgccagcagggcacagctgccgccttctcccctgatagccactacctcctctttggggccccaggaacctataattggaagggcacggccagggtggagctctgtgcacagggctcagcggacctggcacacctggacgacggtccctacgaggcggggggagagaaggagcaggacccccgcctcatcccggtccctgccaacagctactttgggttgctttttgtgaccaacattgatagctcagaccccgaccagctggtgtataaaactttggaccctgctgaccggctcccaggaccagccggagacttggccctcaatagctacttaggcttctctattgactcggggaaaggtctggtgcgtgcagaagagctgagctttgtggctggagccccccgcgccaaccacaagggtgctgtggtcatcctgcgcaaggacagcgccagtcgcctggtgcccgaggttatgctgtctggggagcgcctgacctccggctttggctactcactggctgtggctgacctcaacagtgatggctggccagacctgatagtgggtgccccctacttctttgagcgccaagaagagctggggggtgctgtgtatgtgtacttgaaccaggggggtcactgggctgggatctcccctctccggctctgcggctcccctgactccatgttcgggatcagcctggctgtcctgggggacctcaaccaagatggctttccagatattgcagtgggtgccccctttgatggtgatgggaaagtcttcatctaccatgggagcagcctgggggttgtcgccaaaccttcacaggtgctggagggcgaggctgtgggcatcaagagcttcggctactccctgtcaggcagcttggatatggatgggaaccaataccctgacctgctggtgggctccctggctgacaccgcagtgctcttcagggccagacccatcctccatgtctcccatgaggtctctattgctccacgaagcatcgacctggagcagcccaactgtgctggcggccactcggtctgtgtggacctaagggtctgtttcagctacattgcagtccccagcagctatagccctactgtggccctggactatgtgttagatgcggacacagaccggaggctccggggccaggttccccgtgtgacgttcctgagccgtaacctggaagaacccaagcaccaggcctcgggcaccgtgtggctgaagcaccagcatgaccgagtctgtggagacgccatgttccagctccaggaaaatgtcaaagacaagcttcgggccattgtagtgaccttgtcctacagtctccagacccctcggctccggcgacaggctcctggccaggggctgcctccagtggcccccatcctcaatgcccaccagcccagcacccagcgggcagagatccacttcctgaagcaaggctgtggtgaagacaagatctgccagagcaatctgcagctggtccgcgcccgcttctgtacccgggtcagcgacacggaattccaacctctgcccatggatgtggatggaacaacagccctgtttgcactgagtgggcagccagtcattggcctggagctgatggtcaccaacctgccatcggacccagcccagccccaggctgatggggatgatgcccatgaagcccagctcctggtcatgcttcctgactcactgcactactcaggggtccgggccctggaccctgcggagaagccactctgcctgtccaatgagaatgcctcccatgttgagtgtgagctggggaaccccatgaagagaggtgcccaggtcaccttctacctcatccttagcacctccgggatcagcattgagaccacggaactggaggtagagctgctgttggccacgatcagtgagcaggagctgcatccagtctctgcacgagcccgtgtcttcattgagctgccactgtccattgcaggaatggccattccccagcaactcttcttctctggtgtggtgaggggcgagagagccatgcagtctgagcgggatgtgggcagcaaggtcaagtatgaggtcacggtttccaaccaaggccagtcgctcagaaccctgggctctgccttcctcaacatcatgtggcctcatgagattgccaatgggaagtggttgctgtacccaatgcaggttgagctggagggcgggcaggggcctgggcagaaagggctttgctctcccaggcccaacatcctccacctggatgtggacagtagggataggaggcggcgggagctggagccacctgagcagcaggagcctggtgagcggcaggagcccagcatgtcctggtggccagtgtcctctgctgagaagaagaaaaacatcaccctggactgcgcccggggcacggccaactgtgtggtgttcagctgcccactctacagctttgaccgcgcggctgtgctgcatgtctggggccgtctctggaacagcacctttctggaggagtactcagctgtgaagtccctggaagtgattgtccgggccaacatcacagtgaagtcctccataaagaacttgatgctccgagatgcctccacagtgatcccagtgatggtatacttggaccccatggctgtggtggcagaaggagtgccctggtgggtcatcctcctggctgtactggctgggctgctggtgctagcactgctggtgctgctcctgtggaagatgggattcttcaaacgggcgaagcaccccgaggccaccgtgccccagtaccatgcggtgaagattcctcgggaagaccgacagcagttcaaggaggagaagacgggcaccatcctgaggaacaactggggcagcccccggcgggagggcccggatgcacaccccatcctggctgctgacgggcatcccgagctgggccccgatgggcatccagggccaggcaccgcctaggttcccatgtcccagcctggcctgtggctgccctccatcccttccccagagatggctccttgggatgaagagggtagagtgggctgctggtgtcgcatcaagatttggcaggatcggcttcctcaggggcacagacctctcccacccacaagaactcctcccacccaacttccccttagagtgctgtgagatgagagtgggtaaatcagggacagggccatggggtagggtgagaagggcaggggtgtcctgatgcaaaggtggggagaagggatcctaatcccttcctctcccattcaccctgtgtaacaggaccccaaggacctgcctccccggaagtgccttaacctagagg

SEQ ID NO: 10135 - DNA, 817 bp, Homo sapiens
  source 1..817: mol_type = unassigned DNA
gctgtgctgcatgtctggggccgtctctggaacagcacctttctggaggagtactcagctgtgaagtccctggaagtgattgtccgggccaacatcacagtgaagtcctccataaagaacttgatgctccgagatgcctccacagtgatcccagtgatggtatacttggaccccatggctgtggtggcagaaggagtgccctggtgggtcatcctcctggctgtactggctgggctgctggtgctagcactgctggtgctgctcctgtggaagtgtggcttcttccatcggagcagccagagctcatcttttcccaccaactatcaccgggcctgtctggctgtgcagccttcagccatggaagttgggggtccagggactgtgggatgggattcttcaaacgggcgaagcaccccgaggccaccgtgccccagtaccatgcggtgaagattcctcgggaagaccgacagcagttcaaggaggagaagacgggcaccatcctgaggaacaactggggcagcccccggcgggagggcccggatgcacaccccatcctggctgctgacgggcatcccgagctgggccccgatgggcatccagggccaggcaccgcctaggttcccatgtcccagcctggcctgtggctgccctccatcccttccccagagatggctccttgggatgaagagggtagagtgggctgctggtgtcgcatcaagatttggcaggatcggcttcctcaggggcacagacctctcccacccacaagaactcctcccacccaacttccccttagagtgctgtgagatgagagtgg

SEQ ID NO: 10136 - DNA, 1040 bp, Homo sapiens
  source 1..1040: mol_type = unassigned DNA
agcttcgggccattgtagtgaccttgtcctacagtctccagacccctcggctccggcgacaggctcctggccaggggctgcctccagtggcccccatcctcaatgcccaccagcccagcacccagcgggcagagatccacttcctgaagcaaggctgtggtgaagacaagatctgccagagcaatctgcagctggtccgcgcccgcttctgtacccgggtcagcgacacggaattccaacctctgcccatgtgaggggggcagagagcagggtgggggtgggagggcaagagttcaaggattgagagaaagccctctcaggaggaccagtcagagggaagggctgagcctgcagaaaaggcagaaggtggaagaggacctgccgatggacttggagactgagatgagggtcagtgatggggccacgggggctcccatggcaaggaatagcaatccttcacagtacactaataatatgcagtctacatacatctcattggttagtcttcaaacctctgtgaggtaggaattatattagtctcattttatagatggagaactgaagcctagagaggttaagttacttggccaaggtaagtaatggtggagctgagatgagaacggaggtcccctgactcccagtcgtgtgtacagaggcctgaggcttggacgggtgtgatggggacctggggtgggaagagaggctcagggagtgaaggcaggtactgggggagcagactgggcgggggaatggtagggggaggtgttcagaacttagcaggagtggggtctgactctccagggatgtggatggaacaacagccctgtttgcactgagtgggcagccagtcattggcctggagctgatggtcaccaacctgccatcggacccagcccagccccaggctgatggggatgatgcccatgaagcccagctcctggtcatgcttcctgactcactgcactactcaggggtccgggccctggaccctgcggagaagccactctgcctgtccaatgagaatgcctcccatgttgagt

SEQ ID NO: 10137 - DNA, 296 bp, Homo sapiens
  source 1..296: mol_type = unassigned DNA
gtatgtagagtgcctgggattttgtagcctctcaataaaatagaaaacatacctgagtgactggggggagttgaggcctggatcttgtctgcaaggcccccagccagcgtgactgccttttccctgtgccctgcagatattgcagtgggtgccccctttgatggtgatgggaaagtcttcatctaccatgggagcagcctgggggttgtcgccaaaccttcacaggtgctggagggcgaggctgtgggcatcaagagcttcggctactccctgtcaggcagcttggatatggatgg

SEQ ID NO: 10138 - DNA, 558 bp, Homo sapiens
  source 1..558: mol_type = unassigned DNA
accgctgtgtcacgtgaggttgggaaccgccctcttgagaccttgggtgaagatcttggcggggaagagaggtagagggttgcggagggcaggtgaagtgttctttattgggagcttagtttttgccactcccatggttcaagctttgactacaaccagaattcagaggcaggcagaaggattccagtgctggagaggcttctctattgactcggggaaaggtctggtgcgtgcagaagagctgagctttgtggctggagccccccgcgccaaccacaagggtgctgtggtcatcctgcgcaaggacagcgccagtcgcctggtgcccgaggttatgctgtctggggagcgcctgacctccggctttggctactcactggctgtggctgacctcaacagtgatggatattgcagtgggtgccccctttgatggtgatgggaaagtcttcatctaccatgggagcagcctgggggttgtcgccaaaccttcacaggtgctggagggcgaggctgtgggcatcaagagcttcggctactccctgtcaggcagcttggata

SEQ ID NO: 10139 - DNA, 707 bp, Homo sapiens
  source 1..707: mol_type = unassigned DNA
agagaaggagcaggacccccgcctcatcccggtccctgccaacagctactttggtagggacctctccccggcccagaactgctctaaccctctgctcctctctcttgtcctctctctccatgctcccatccttctgtctctgtttctgtctctcaccttgtctctctctgtctttctgtctctggctgtgatctctctggtctctttttctctctccacctcttcttcttccaccattttctggcctttctgtggctctgtctccctactctgtggcccctactctggatgtcccctccctggtgtctcaccccaccccccacagggttgctttttgtgaccaacattgatagctcagaccccgaccagctggtgtataaaactttggaccctgctgaccggctcccaggaccagccggagacttggccctcaatagctacttaggcttctctattgactcggggaaaggtctggtgcgtgcagaagagctgagctttgtggctggagccccccgcgccaaccacaagggtgctgtggtcatcctgcgcaaggacagcgccagtcgcctggtgcccgaggttatgctgtctggggagcgcctgacctccggctttggctactcactggctgtggctgacctcaacagtgatggctggccagacctgatagtgggtgccccctacttctttgagcgccaagaagagct

SEQ ID NO: 10140 - DNA, 576 bp, Homo sapiens
  source 1..576: mol_type = unassigned DNA
agctttgactacaaccagaattcagaggcaggcagaaggattccagtgctggagagacctgtgcacaccgatatgaggcaaggcagcgagtggaccagatcctggagacgcgggatatgattggtcgctgctttgtgctcagccaggacctggccatccgggatgagttggatggtggggaatggaagttctgtgagggacgcccccaaggccatgaacaatttgggttctgccagcagggcacagctgccgccttctcccctgatagccactacctcctctttggggccccaggaacctataattggaaggggttgctttttgtgaccaacattgatagctcagaccccgaccagctggtgtataaaactttggaccctgctgaccggctcccaggaccagccggagacttggccctcaatagctacttaggcttctctattgactcggggaaaggtctggtgcgtgcagaagagctgagctttgtggctggagccccccgcgccaaccacaagggtgctgtggtcatcctgcgcaaggacagcgccagtcgcctggtgcccgaggttatgctgt

SEQ ID NO: 10141 - DNA, 972 bp, Homo sapiens
  source 1..972: mol_type = unassigned DNA
aaagaccggagcggtcaagctgtttccccactgaattccctcaatcacatttatgttcttttcctcccagccactcccatggttcaagctttgactacaaccagaattcagaggcaggcagaaggattccagtgctggagagacctgtgcacaccgatatgaggcaaggcagcgagtggaccagatcctggagacgcgggatatgattggtcgctgctttgtgctcagccaggacctggccatccgggatgagttggatggtggggaatggaagttctgtgagggacgcccccaaggccatgaacaatttgggttctgccagcagggcacagctgccgccttctcccctgatagccactacctcctctttggggccccaggaacctataattggaagggtgagtcactcctcgggaaggggagaaggggaccaaaacctcctcttacctcagagacagggttggggatggcacatggccaagcatgaccacatgtgcactgctgtatggccccagggcactgccatgccttccaccccattgagctagtgcacacatgaatggggggtgcctcctttccctcgcacggccaagtgttcctcaacatgctggcatgggccccaagtgcacgctgggcctgcagctggggcctgcatgctccaacacactagcccacacctcatcactgccattcccgtctccgcacgctgctgctggctgagctgacactcgggttgctttttgtgaccaacattgatagctcagaccccgaccagctggtgtataaaactttggaccctgctgaccggctcccaggaccagccggagacttggccctcaatagctacttagggggactttccctgaggggatggatggtgggcacatattgaagaaagggctaatgttgttggcttctctattgactcggggaaaggtctggtgcgtgcagaagagctgagctttgtggctg

SEQ ID NO: 10142 - DNA, 573 bp, Homo sapiens
  source 1..573: mol_type = unassigned DNA
gagacagtccaaatggctccctttgccactcccatggttcaagctttgactacaaccagaattcagaggcaggcagaaggattccagtgctggagaggctgctggtgggtgctccccaggccctggctcttcctgggcagcaggcgaatcgcactggaggcctcttcgcttgcccgttgagcctggaggagactgactgctacagagtggacatcgaccagggagctgatatgcaaaaggaaagcaaggagaaccagtggttgggagtcagtgttcggagccaggggcctgggggcaagattgttacctgtgcacaccgatatgaggcaaggcagcgagtggaccagatcctggagacgcgggatatgattggtcgctgctttgtgctcagccaggacctggccatccgggatgagttggatggtggggaatggaagttctgtgagggacgcccccaaggccatgaacaatttgggttctgccagcagggcacagctgccgccttctcccctgatagccactacctcctctttggggccccaggaacctataattggaaggggttgctttttg

SEQ ID NO: 10143 - DNA, 552 bp, Homo sapiens
  source 1..552: mol_type = unassigned DNA
agaaggattccagtgctggagaggctgctggtgggtgctccccaggccctggctcttcctgggcagcaggcgaatcgcactggaggcctcttcgcttgcccgttgagcctggaggagactgactgctacagagtggacatcgaccagggagctgatatgcaaaaggaaagcaaggagaaccagtggttgggagtcagtgttcggagccaggggcctgggggcaagattgttacctgtgcacaccgatatgagggcacagctgccgccttctcccctgatagccactacctcctctttggggccccaggaacctataattggaagggtgagtcactcctcgggaaggggagaaggggaccaaaacctcctcttacctcagagacagggttggggatggcacatggccaagcatgaccacatgtgcactgctgtatggccccagggcactgccatgccttccaccccattgagctagtgcacacatgaatggggggtgcctcctttccctcgcacggccaagtgttcctcaacatgctggcatgggccccaagt

SEQ ID NO: 10144 - DNA, 570 bp, Homo sapiens
  source 1..570: mol_type = unassigned DNA
gtgtcacgtgaggttgggaaccgccctcttgagaccttgggtgaagatcttggcggggaagagaggtagagggttgcggagggcaggtgaagtgttctttattgggagcttagtttttgccactcccatggttcaagctttgactacaaccagaattcagaggcaggcagaaggattccagtgctggagagacctgtgcacaccgatatgaggcaaggcagcgagtggaccagatcctggagacgcgggatatgattggtcgctgctttgtgctcagccaggacctggccatccgggatgagttggatggtggggaatggaagttctgtgagggacgcccccaaggccatgaacaatttgggttctgccagcagggcacagctgccgccttctcccctgatagccactacctcctctttggggccccaggaacctataattggaagggtgagtcactcctcgggaaggggagaaggggaccaaaacctcctcttacctcagagacagggttggggatggcacatggccaagcatgaccacatgtgcactgctgtatggccccagggcact

SEQ ID NO: 10145 - DNA, 493 bp, Homo sapiens
  source 1..493: mol_type = unassigned DNA
agtgctcaaagaaagggggcccttgagacagtccaaatggctccctttgccactcccatggttcaagctttgactacaaccagaattcagaggcaggcagaaggattccagtgctggagagacctgtgcacaccgatatgaggcaaggcagcgagtggaccagatcctggagacgcgggatatgattggtcgctgctttgtgctcagccaggacctggccatccgggatgagttggatggtggggaatggaagttctgtgagggacgcccccaaggccatgaacaatttgggttctgccagcagggcacagctgccgccttctcccctgatagccactacctcctctttggggccccaggaacctataattggaagggtgagtcactcctcgggaaggggagaaggggaccaaaacctcctcttacctcagagacagggttggggatggcacatggccaagcatgaccacatgtgcactgctgtatggcccca

SEQ ID NO: 10146 - DNA, 558 bp, Homo sapiens
  source 1..558: mol_type = unassigned DNA
gtgaggttgggaaccgccctcttgagaccttgggtgaagatcttggcggggaagagaggtagagggttgcggagggcaggtgaagtgttctttattgggagcttagtttttgccactcccatggttcaagctttgactacaaccagaattcagaggcaggcagaaggattccagtgctggagaggctgctggtgggtgctccccaggccctggctcttcctgggcagcaggcgaatcgcactggaggcctcttcgcttgcccgttgagcctggaggagactgactgctacagagtggacatcgaccagggagctgatatgcaaaaggaaagcaaggagaaccagtggttgggagtcagtgttcggagccaggggcctgggggcaagattgttacctgtgcacaccgatatgaggcaaggcagcgagtggaccagatcctggagacgcgggatatgattggtcgctgctttgtgctcagccaggacctggccatccgggatgagttggatggtggggaatggaagttctgtgagggacgcccccaaggccatgaacaat

SEQ ID NO: 10147 - DNA, 561 bp, Homo sapiens
  source 1..561: mol_type = unassigned DNA
ggtaagtgacctcccagtccttctcaagtgttaagggtttcttttggatcgtcaaagaccggagcggtcaagctgtttccccactgaattccctcaatcacatttatgttcttttcctcccagccactcccatggttcaagctttgactacaaccagaattcagaggcaggcagaaggattccagtgctggagaggctgctggtgggtgctccccaggccctggctcttcctgggcagcaggcgaatcgcactggaggcctcttcgcttgcccgttgagcctggaggagactgactgctacagagtggacatcgaccagggagctgatatgcaaaaggaaagcaaggagaaccagtggttgggagtcagtgttcggagccaggggcctgggggcaagattgttacctgtgcacaccgatatgaggcaaggcagcgagtggaccagatcctggagacgcgggatatgattggtcgctgctttgtgctcagccaggacctggccatccgggatgagttggatggtggggaatggaagttctgtgagggacgcccccaaggcca

SEQ ID NO: 10148 - DNA, 588 bp, Homo sapiens
  source 1..588: mol_type = unassigned DNA
attcgctgggagctcgcgcagggatcgtcccatggccggggctcggagccgcgacccttggggggcctccgggatttgctacctttttggctccctgctcgtcgaactgctcttctcacgggctgtcgccttcaatctggacgtgatgggtgccttgcgcaaggagggcgagccaggcagcctcttcggcttctctgtggccctgcaccggcagttgcagccccgaccccagagctggctgctggtgggtgctccccaggccctggctcttcctgggcagcaggcgaatcgcactggaggcctcttcgcttgcccgttgagcctggaggagactgactgctacagagtggacatcgaccagggaggtgtggccctgcatgaacagagtgggggaagcgtgtgagcggggaggagaggacttgggctcctcttccctcccctaattcccagtgtcctgcctctagctgatatgcaaaaggaaagcaaggagaaccagtggttgggagtcagtgttcggagccaggggcctgggggcaagattgttgtgagtattgcttctcatgactgaatgcacggatggggtgtgtg

SEQ ID NO: 10149 - DNA, 6755 bp, Homo sapiens
  source 1..6755: mol_type = unassigned DNA
gagatgggactgcaatagaaatccgggcagcccgaagaggcacccagcgctccagccaccagctgggccgcccgggagtccctggctctagaccagccgcgaggaggcgccgcgagagagctggtccctgcccgcggccggaggagggctagagcccctgggccagccccccgagccggctgggcgggcgggcgggtgggagcagacgccgggcactgtcaccacgggtgcgccgagcgcaccgacccgggacacgggcagctggggaccgccagattccaccagccccccttgccccgcaggggtcctcggctcgcgctcctgggtagcagccacccaccggggcggagggagatgtcgcccggggccagccgcggtccccggggaagccaggcgccgctgatcgcgcccctctgctgcgccgcggccgcgctggggatgttgctgtggtcccccgcctgtcaggcgttcaacctggacgtggaaaagctcacagtgtacagcggccccaagggcagctacttcggctacgccgtggacttccacatacccgacgcccgcacagcgagtgtcttggtgggggcgcccaaagccaacaccagccagcccgatatcgtggaagggggagccgtctattactgtccttggcccgcggaggggtctgcgcagtgcaggcagataccgtttgacaccaccaacaacagaaagatcagagttaatggaaccaaagaacctatcgagttcaaatccaatcagtggtttggagcaacagtgaaagctcacaaaggaaaagttgtggcctgtgctcctttatatcactggagaactcttaaaccgacaccagaaaaggacccagttggcacctgctatgtagcaattcagaacttcagcgcctatgccgagttctctccttgccggaacagcaatgctgatccggaaggccagggttactgccaagcaggatttagtctggatttttataagaatggagaccttattgtgggaggacctgggagtttctactggcaaggacaagtgatcactgccagtgttgcagatatcattgcaaattactcattcaaggatatcctcaggaaactggcaggagaaaagcagacggaagtggctccagcttcctatgatgacagttaccttggatactcagttgctgctggggagtttactggggattctcagcaagaattggttgctggaattccaagaggagcacagaattttggatatgtttccatcattaactctacggatatgacgtttattcagaatttcacgggagaacagatggcatcttattttggatataccgttgtcgtatcagatgttaacagtgatggactggatgatgtcctggttggggcacctctctttatggaacgtgaatttgagagcaaccccagagaagtagggcaaatctacctgtatttgcaagtgagctctctcctcttcagagacccccagatcctcactggcaccgagacgtttgggagattcggtagtgctatggcacacttaggagacctgaaccaagatggatacaatgacattgccatcggagtgccttttgcaggcaaggatcaaagaggcaaagtgctcatttataatgggaacaaagatggcttaaacaccaagccttcccaagttctgcaaggagtgtgggcctcacatgctgtcccttccggatttggctttactttaagaggagattcagacatagacaagaatgattacccagatttgattgtgggtgcatttggaacaggaaaagtcgctgtttacagagcaagaccggttgtgactgtagatgcccagcttctgctgcacccaatgattatcaatcttgaaaataaaacttgccaggttccagactctatgacatctgctgcctgcttttctttaagagtatgtgcatctgtcacaggccagagcattgcaaacacaatagtcttgatggcagaggtgcaattagattccctgaaacagaaaggagctattaaacggacgctcttccttgataaccatcaggctcatcgcgtcttccctcttgtgataaaaaggcagaaatcccaccagtgccaggatttcatcgtttaccttcgagatgaaactgaattccgagataaattatctccaatcaacattagtttgaattacagtttggacgaatccacctttaaagaaggcctggaagtgaaaccaatattgaactactacagagaaaacattgttagtgaacaggctcacattctggtggactgtggagaagacaatctgtgtgttcctgacttgaagctgtcggctagaccagataagcatcaggtaatcattggagatgaaaatcaccttatgctcataataaatgcaagaaatgaaggggaaggagcatatgaagctgaactctttgtaatgataccagaagaggcagattatgttggaatcgaacgcaacaacaagggatttcgaccactgagctgtgagtacaagatggaaaatgtaaccaggatggtggtgtgtgaccttgggaaccctatggtgtctggaacaaattattccctgggcctccgatttgcagttccacgtcttgagaaaacaaacatgagcattaacttcgatctccaaatcagaagttccaacaaggacaatccagacagcaattttgtgagcctgcaaatcaacatcactgctgtagcgcaggtggaaataagaggagtgtcacaccctccgcagattgttctgcccattcataactgggaaccagaagaggagccccacaaagaggaggaggttggaccattggtggaacatatttatgagctgcacaatattggaccaagtaccatcagtgacaccatcctggaggtgggctggcctttctctgcccgggatgaatttcttctctatattttccatattcaaactctgggacctctgcagtgccaaccaaatcctaatatcaatccacaggatataaagcctgctgcctccccagaggacacccctgagctcagcgcctttttgcgaaactctactattcctcatcttgtcaggaagagggatgtacatgtggtcgaattccacagacagagccctgcaaaaatactgaattgtacaaatatcgagtgtttacaaatctcctgtgcagtgggacgactcgaaggaggagaaagcgcagtcctgaaagtcaggtcacgattatgggcccacaccttcctccagagaaaaaatgatccctatgctcttgcatccctggtgtcctttgaagttaagaagatgccttatacagatcagccagcaaaactcccagaaggaagcatagtaattaagacatcagttatttgggcaactccgaatgtttccttctcaatcccattatgggtaataatactagcaatacttcttggattgttggttctcgccattttaaccttagctttatggaagtgtggattctttgacagagccagacctcctcaggaggacatgaccgacagggaacagctgacaaatgacaagacccctgaggcatgacaagaaaaaaaaagaagaccaaagacctcaaacactggtcctgttcaaagaaaaagaaagaacatgagggttaaaaatcaaagctttctgatacctgacagtgacccaggaaatggaggggaccctggaaacatcacctcatctacaccgcactttggagaaattgtcctgggtgcccagtgagccctgttggaaaaggaaacaccaaagctggagaagccatcagcaattgtggaagattttcttttgctttaatcgttctgtacttggcagacactttgaaatgcgtatgggaacgtaagttgcagtccagatcaatccagcataagttgcagagatgaaatgtctgaatcactatagaatttacaaggtgaactaaggtgaaatgactgatttactatagaacttagaactaagaccacaccatccaacactactgtatccaatggaacatttgacacctccctatggaaaagaaacatttctaaggacattatggctcagggagacaagcaatatgttgttggtactgtgaaagtacttttgaaaggacaaaaataatcttgtgagtgagggtgagagtttatttatttattttccatgtctctaggttgagaatctgtcatctagagaatttggaaattaagatttggttagctagttttcaaaatcactcactcagtttcctcctaagaaccactgtgtgcagataactcatttagcagagcttcttcagaatttagacagtgctaaggaaaggaagattggcattaggaatcagttctatttaataccttgctgccttccatctgaaattcctttcactcacattatccagggactcacatctgcttaatttagctttgcaagatgttgcatttatatttccttgtatatctttccattgacttagttaatacatgaatttcgaggtactctctacctttggagtgtttaaaagtcatggtaaaatgtctagagttcattaattaaaaagcaatttaacattatgggtaaacattatttttaatatctataagaagcaacacttcttatagatatttagcttgggattaaatacccgtttttcctgctatgccttgtacttgtatacacagagaaaacatgttgaatataacttagacaaaaacataaaattatacaggcatgagccaaactgggaaaactgattcctaaagatttttatttaaaattgcttattccaactttattacttatttttactgctaatctttataatatgtaactttggagaataatcttttatttaagctattttcccatcatcttgaatttaaccatcacaaattttttatgtttaaaactcttgtaaataattcataatcttgtaatattatcatttttgaagtaaaattgaccagccaaatttataggtagtctgcacaattttgtatccttttttaataatgaaaaattactatgaagaaatactgaacaaatttttatgtgcaatattttatagacctatgtatctgaagcatgtttacactggcgtttttttttttaattaatttcctaaatgttaagtatgatagaacaagctgacccaaatccttaagtttacaaagctgttggaaaactttgtgtcctgatttcaacaatcacgctttgtttgaaagatgagccaagctcacagacactaaattttatgtcatgccataagctggagaggagccatttggctacagctgcggaacttcattgaggagcaaatgaaaggcacatggacgagcacgctggtgcagttcatgttcttcctgcctgtgaattgaatactgtcctggtagcagtttcgggtcggtcaggagctcaaggctggtttgtgtggctgactacggatgagcactgaagttgcctcaaagaattaaggggtgtccacaccagcctctgggggtctttggtgttagtcttccaggtagagctggttttacaagtaggtggccatctacaggatgtgatgtgagcgatgccagacagctctctctgaccccaggtaatgccctgaatctggtgatcctggctgatctgtgaccaatagagattagctccttgggatttggggtcctaaaaggtccctgaaaaaatgcaccccttgtctttaagccaacattggtgaaggaactgagaactcttagggttacataaaaaaagacccctgttgagatagtttatgcagatacctggaaggaactagagatgccaggaggaagactgagacccagaatgaagcaaggcatgagggctccaaagtgaactgcaccatcccagagtctcagccaagatggccctttcctagagggacgggcaccttccacctgcccacaggcactgctacctatgggaattgcagaaggccgttgtacacacgcgcatgcacgcagtggccctctgccctttagaatatggaagcaaagtctgggtgcagtgactcacacttgtaatcccaacactttgggaggccgagacgggcagatcacctgagttcaggagttcaagaccagcctggccaacgtggcaaaaccccatctctactaaaaatacaaaaattagctgggcgtggtggcagtctcctgtaatcccagctacctaggaggctgaggcagagagagaatcgcttgaacccaggaggcggaggttgcagtgagctgagatcgcgcgactgcactccagcctgggcgacagagggaaactctgtctcaacaaaaaaataaataaaataaaaaataaaaaaagaatatggaagcaaatggagaaagggaggaaactgaggtcaggcaaaccttccagcaatccgttctgcccagagaacatactgacgacagagaacacactgagcgttatctgcttctagttagagcattgccgattgccttcataattcataatgtgctgtgctcctctgagggtctatctgtatttctcttcaaagaattccctttttaaattcttgcagctgggttttaagacacaataatggggcaaattaagttttataaacttggagatttttatacagtaaataaaaaaataatatgtactagtcacccctgaaactgcattcttagaactcgactcttgttttatttaaatacgtgcgtagatatctgtgaagattttcatgtacctatttaccttgtcactaataaaattaaaactgaaagacttga

SEQ ID NO: 10150 - DNA, 850 bp, Homo sapiens
  source 1..850: mol_type = unassigned DNA
gctgaactctttgtaatgataccagaagaggcagattatgttggaatcgaacgcaacaacaagggatttcgaccactgagctgtgagtacaagatggaaaatgtaaccaggatggtggtgtgtgaccttgggaaccctatggtgtctggaacaaatgtaagagagaaccagaaatactgactgatttccttctaactggacttcacagggaacaaatggaaagctctccagttaccactcagcaactcagcacctagcagcaacaacaaattaggcaggaaattgccagagtagtgggatttcacattataacctacacagagtgaatcgtctcaagctaaaaacacagaaagatgcatgctcttctatgctttctctttatacattactcttgcctgtcttttagttacaacaattttatacagactttgtttttactatagatattttctttaaatactttttctttgaattcaaaaagaaatgcaatgtaagttaaagactctaaaaataaccaaattaggacaaagattttagcaatggcaattaaaggaaggacatgacattcaacagtgaccatagaattcccttttcaagggagattcaggtacgtatttgcattttaaagatgctgataagtctttcagttaataaaccttttagcctgatgtttcatacttttgcttgagcatttgaaacttttctcaagttagaatattatgctagaatgatatttttgctcttttatgctataatgttgcgttgatcttgggtattcaaaaatgtgctgaaactacagtaagctcacttcttggggcaaaaataaataaatatttcaatggcaagtaca

SEQ ID NO: 10151 - DNA, 349 bp, Homo sapiens
  source 1..349: mol_type = unassigned DNA
cttaaacaccaagccttcccaagttctgcaaggagtgtgggcctcacatgctgtcccttccggatttggctttactttaagaggagattcagacatagacaagaatgattacccagatttgattgtgggtgcatttggaacaggaaaagtcgctgtttacagagcaagaccggttgtgactgtagatgcccagcttctgctgcacccaatgattatcaatcttgaaaataaaacttgccaggttccagactctatgacatctgctgcctggtgagttagtccggtgcttctcaaactccaatgtgaattcacatcacctggcctgggtgacagagggagactctgtctc

SEQ ID NO: 10152 - DNA, 2282 bp, Homo sapiens
  source 1..2282: mol_type = unassigned DNA
ccgcccggcccgggacccgctcgcgcagacttctcgggcggactgaggacgccgccgctcggggccgcccctgtgctcgccttcagcgcccgctcagcccgccgtccgcgccccggtggcgggcccgacgcccgcattccgcccgtgtccaggcgcagagctcccgccccggggagcttcctggccgtcggcgggccccgcggcccgcgcgctcggcgccctgctcgccgggcagaggggaaggcggcggccggctggggatgggcggcccggctgcgccgaggggcgccgggaggctccgcgcgctgctgctggcgctggtggtcgcggggatccccgcgggcgcctacaacctcgacccgcagcgccccgtgcacttccagggccccgctgactcgttcttcggctacgcagttctggagcatttccacgacaacacgcgctgggtccttgtgggcgcaccaaaggcagattccaaatacagcccttcagtgaagtctcctggggctgtgtttaagtgccgtgttcacaccaaccctgaccggagatgcaccgaactggacatggctcgagggaagaatcggggcacgtcctgcggaaagacctgccgggaagaccgcgatgatgagtggatgggggtgagcctggcccgacagcccaaggctgatggccgtgtgttggcctgtgctcatcgctggaagaacatctactatgaagccgaccacatcctaccccatggcttctgctacatcatcccctccaacctccaggccaaaggcaggacgctgatcccttgctatgaagagtataagaagaagtacggagaggaacacggctcctgccaggctgggatagcgggcttcttcaccgaggagctggtggtgatgggtgctccagggtcattttattgggctggaaccatcaaagtgctgaaccttacggacaacacctatttaaaactgaacgacgaagtgatcatgaacaggcggtacacctacctgggctacgcagtgaccgctggccacttctctcacccgtccaccattgatgtggtaggaggtgccccacaggacaaaggcatcggcaaggtttatattttcagagctgaccgaagatcaggcaccttaattaagatctttcaagcatcaggtaaaaagatgggctcttacttcggctcctccttgtgcgcagttgacctgaatggggacggcctctctgacctgctggtgggggcccccatgttttctgagatcagggatgagggacaggtcactgtctacatcaacagaggaaatggagccctcgaggagcagctggctctgactggggatggtgcctacaatgcgcactttggagagagcattgccagcctggacgatctggacaatgatgggttcccagatgtggccattggtgcacccaaggaggatgacttcgcaggggcggtctatatctatcatggtgatgccggtgggatagtccctcagtactcaatgaaactgtctgggcagaagataaatccagtgctccggatgtttggtcagtccatatcgggaggcattgatatggatggaaatggctatcctgatgtcactgttggagccttcatgtccgacagcgtggttcttctcagagcaaggcctgtcattacggtggatgtctccatcttcctcccgggctccatcaacatcacagcgcctcagtgtcacgacggacagcagcctgtgaactgcctgaacgtcaccacctgcttcagcttccatggcaaacacgttccaggagagattggcctgaattatgttctgatggctgacgtggccaaaaaggagaagggccagatgcccagggtctactttgtgctgctgggagagaccatgggtcaggtcacagagaagctgcagctgacttacatggaggagacgtgtcgtcactatgtggcccatgtgaagcggagggtgcaggacgtcatcagcccgatcgtgtttgaagcagcctacagcctcagtgagcatgtgactggagaggaggagagggaactgccgcctctgacaccagttctccgctggaaaaagggacaaaagattgcccaaaagaatcaggtcagaaccttaaagctcatactcagcacccaaggtggcagctgcacagagcagaaataatggcccaaaagttgagagagccgtgggcctggctgctcaggagaccgcagccaggacacacctcctctctgggtctcccttttctgatctgcaaaatgataaaataaacagtcttaggggtta

SEQ ID NO: 10153 - DNA, 7889 bp, Homo sapiens
  source 1..7889: mol_type = unassigned DNA
ccggcccgggacccgctcgcgcagacttctcgggcggactgaggacgccgccgctcggggccgcccctgtgctcgccttcagcgcccgctcagcccgccgtccgcgccccggtggcgggcccgacgcccgcattccgcccgtgtccaggcgcagagctcccgccccggggagcttcctggccgtcggcgggccccgcggcccgcgcgctcggcgccctgctcgccgggcagaggggaaggcggcggccggctggggatgggcggcccggctgcgccgaggggcgccgggaggctccgcgcgctgctgctggcgctggtggtcgcggggatccccgcgggcgcctacaacctcgacccgcagcgccccgtgcacttccagggccccgctgactcgttcttcggctacgcagttctggagcatttccacgacaacacgcgctgggtccttgtgggcgcaccaaaggcagattccaaatacagcccttcagtgaagtctcctggggctgtgtttaagtgccgtgttcacaccaaccctgaccggagatgcaccgaactggacatggctcgagggaagaatcggggcacgtcctgcggaaagacctgccgggaagaccgcgatgatgagtggatgggggtgagcctggcccgacagcccaaggctgatggccgtgtgttggcctgtgctcatcgctggaagaacatctactatgaagccgaccacatcctaccccatggcttctgctacatcatcccctccaacctccaggccaaaggcaggacgctgatcccttgctatgaagagtataagaagaagtacggagaggaacacggctcctgccaggctgggatagcgggcttcttcaccgaggagctggtggtgatgggtgctccagggtcattttattgggctggaaccatcaaagtgctgaaccttacggacaacacctatttaaaactgaacgacgaagtgatcatgaacaggcggtacacctacctgggctacgcagtgaccgctggccacttctctcacccgtccaccattgatgtggtaggaggtgccccacaggacaaaggcatcggcaaggtttatattttcagagctgaccgaagatcaggcaccttaattaagatctttcaagcatcaggtaaaaagatgggctcttacttcggctcctccttgtgcgcagttgacctgaatggggacggcctctctgacctgctggtgggggcccccatgttttctgagatcagggatgagggacaggtcactgtctacatcaacagaggaaatggagccctcgaggagcagctggctctgactggggatggtgcctacaatgcgcactttggagagagcattgccagcctggacgatctggacaatgatgggttcccagatgtggccattggtgcacccaaggaggatgacttcgcaggggcggtctatatctatcatggtgatgccggtgggatagtccctcagtactcaatgaaactgtctgggcagaagataaatccagtgctccggatgtttggtcagtccatatcgggaggcattgatatggatggaaatggctatcctgatgtcactgttggagccttcatgtccgacagcgtggttcttctcagagcaaggcctgtcattacggtggatgtctccatcttcctcccgggctccatcaacatcacagcgcctcagtgtcacgacggacagcagcctgtgaactgcctgaacgtcaccacctgcttcagcttccatggcaaacacgttccaggagagattggcctgaattatgttctgatggctgacgtggccaaaaaggagaagggccagatgcccagggtctactttgtgctgctgggagagaccatgggtcaggtcacagagaagctgcagctgacttacatggaggagacgtgtcgtcactatgtggcccatgtgaagcggagggtgcaggacgtcatcagcccgatcgtgtttgaagcagcctacagcctcagtgagcatgtgactggagaggaggagagggaactgccgcctctgacaccagttctccgctggaaaaagggacaaaagattgcccaaaagaatcagactgtttttgaaaggaattgccgttcagaggactgtgccgcagacctgcagcttcagggtaaactgctgctctccagtatggatgagaaaaccctgtatctagctttgggggctgtgaagaacatctccctaaacatctctatctccaacctcggagatgatgcctatgatgccaacgtgtccttcaatgtttcccgggagctcttcttcatcaacatgtggcagaaggaggagatgggcatctcctgtgagctgctggaatcggacttcctcaaatgcagcgtgggatttcctttcatgaggtcaaagtcaaagtatgaattcagcgtgatctttgatacaagccacctgtctggggaagaggaagttctcagcttcattgttactgctcagagtggcaacacggagcgctctgaatccctgcatgacaacaccctcgtgctgatggtgccactgatgcacgaggtggacacgtccatcaccggaatcatgtctccaacctcctttgtatatggcgagtccgtggacgcagccaacttcattcagctggatgacctggagtgtcactttcagcccatcaatatcacccttcaggtctacaacactggcccaagcacccttccagggtcatctgtcagcatctctttccctaatcgactctcatctggtggtgcagagatgtttcatgtccaggaaatggtggtgggccaagagaagggaaactgctctttccagaaaaacccaactccctgcatcatccctcaagaacaagaaaatatcttccacacaatatttgcttttttcacaaagtctggaagaaaagtcttggactgtgaaaaaccaggaatttcttgcctaacagcacactgtaactttagtgctcttgctaaagaagaaagtcgtactatagacatttacatgctgctgaacacagaaatactgaaaaaggacagttcgtctgtcatccagttcatgtcccgcgccaaggtgaaggtggatcctgccctaagggtggtggaaatagctcatgggaacccagaagaggtgacggtggtcttcgaggccctgcacaatctggagccccgtggctacgtcgtggggtggatcatcgccatcagtttgttggtgggaatcctcatcttcctgctgctggccgtgctgctctggaagatgggcttctttcgccgaaggtacaaagaaattatcgaagctgagaagaaccggaaagagaatgaagacagttgggactgggtccagaaaaaccagtgagctgccacaccagtcacatgacctgatcactagcctgtcatccttggtctttgtatcttccatatttggaagaaaaaaatcttctccagatttttcggaggccccactgatgctgttctcttcttcattctatcaagcccaggtgccagcctgaggcagccacttcggccaggtcacacgaccggggccagcaccacttcctttaaagatgaactctgaactttggagagtgagctacagagccgagcaatatttatggatgcaacacgcatggtcaaccctcaggggaaaactgttacctaaagtatttttataaatataagccttttatactgattatgtcttttatatttgtatcgatgttttattatttctattaaatagttatataattcactcaagcactgatatctggcctaaaatcttggaagtacatgtccatgaatacaaattttaaaggatgaaaatcttaccgtactttggaacttgctgtttaaaaagacagatgaaataagttgaagaaacctcatgtaatgaatccaccaggctggcagtggtgcatataaactgtgggtgtggcaagaccccgaagacatttcacatctttatcgcctcgatcaagtgtggagtcacatgctaatgtgtgctaaagaactgtaagtgttttttcatatgtacttttcattggaagattcccaacaagaatttggatggaaaacctgatccctagcaagaagtctgctctgtatcacctttatatagcagacatgtcaccctgcttctacacagatgatggatgaaagcttggagcaatgccatgtggtcatctggtaaacctcagaatggcgtctcatcctggacatcctgcatcagagttcacacaccacaaggactaaatccttgtcccctaagcaaagaattgggtctgaatgctgtgagggattgcctttttgtggtaattttcattgagagatcttcatttcccctaccaccctggctgtcccagctagtggtgattgcagattccttcccagagaggacatttaaccgttttaaaaaaaatgtcttagattgggttcccaagaagcagtccctgaaacaaggatttgtgtgcaagtaacttattaaggaagtattcccaggggataccagtaagagagtgggggaagcaggacaaggaaggagacaaagccaggcaaatgtttgtcatttcagggagagctccatgaagtttagcctcagcctgatcaggggaactccggaggaaaagttaggcctcagaggtgtcccaacctgaatcaaggggctggctgcacccagaggagatgtaaacgttttattctcaattcctgctggcgtaatggctccagtagctcaggacagtcctctaaaggacaaccacagatgcatcctcagccaggggagacacagggaaatgatgcaaaagaaatgatgcaaaggatctgagcagaacactgcccctccccaccccctgaatgtgtgagtgctgagttacggccttcagtatccaagctctctgtttgacagtagatatattgtcagatgcactgtgctgcttagttttgagtgcagtgtgattttctgaaagggcaatgagatgatggatgtagcatgctcagcactgacctggcccatagtgatcactcaataactgttaacagctatggctgctattcctactgatggataaccatctaataagacagaaaacatggggctaagagcagggtctaacggagtcttaatggcttattacagcctgccaaagtgccagctacatacacatggcatccagtgcggatgaaacaatctataaaaccaagggtctttcttatagcaccttttttactggaagctaacacgttgggagtccgtgaacattgtcaaaaagacatcaaactcaacttctgggaagacagatttttaatacacatacttggctaatactcacaaacatatctaaagttttggcaaaattatgagggtgatgggtgggtactaacctggcatggagcaggtgtgtcttttggtttcttatgcagttgactctgctgcagggagattacagatgtaacctcatgcttctcttcctggtgaacatgggaatagaccaaaaaaatcaagggtcaatggcatgaactaagctgatcctggaaatcagggatgttgcatctaactgtgggatggaggcacagaggtagctacagggagcaggacgaggcaaagaaagcagctgtcactcagagttcgcttatgagttttatcaaaagcagcaagaaaagcagtcttgggtgggttttatcacttattaacagccatttatgaggcccctgctgtgtgtcaggcactgtgcaaggtgctggaggttccccagagaacacttcagggacattttgcctcagggtggcaaaatgcagtggcatgtggactttttgaatgggatgccatttgcagctttcctttgatggactcttgttcataatgccatgttttctttaatgaatcatttaggattcttaggtgatatttctggaacagcaccatcaacagctttggccacatgcacttagagcaactaacttgcctcctgccggggtgtaggtgcgttggtgacagtgtagaagggtgattcgcaggcccatgttctgcccaccagcaaagccccactggagaagggtagactcctgtgggcagtctcagagctgggacctatttgcttctgcttgattctgcgtgggtggacccacatgagcagctgtatacccaggaggtcactaagactttataaaggcaggttttaagaaaaccagccttggcatcaccaccagcagatactgaaagcctccccaggaacctgtctggggaaggatgatgcctctgctggtctgatcgtgctgagtagcaggtgggctacggggactggggagttaagcattttgtgcagtgatagagaagtcaagcatatcgttagcgctctctcaacttgggcagttcacaagctccttcccagctcagaagccctctctatgctctcaggggaagcagatggggtggatcagtacatctgtgttacccttccagaatattatttgaaaattctacagtatgttctactttctccccttcctgcttccatggtttcactgtggaatcctataagatattctcctgagcagtattatttcagtttccttcagcttttagttgaatcttcaatgtggttttaaccaactgttcagagaactgaaatggtttttaaatatgaaaaaggacctttgtaaaaatggagtaaaacagtgccccttttttaaaaaaagttttgcttatgcttaatttacataggactcaggagagtttggaacatcctccaagtgggccatagagctgtcacaaagaagaggccatgatgtttagaaacaaggggacactagcaggaggggcagggtccactggcttagtggcaactgacaggcatccattccgaataactcagcactgaggtttcctcaggcagttctttaggaaaactgtcagcatcatgggtactcagaggtatggtagaccttgtagaagatccactaggaagtcctccttcaccaaatcatgtagctactgcccttgagccaaaggcaatgaggtttaaaacaaaaacccaacagcactcctgggaacatcctgttttccatgcggaagcatagcagatccccagacgatccgtgtgctgtatgctacctgttgaaccctagcatggtggctttttaaaaggttatttatgacttttatttttgggtaaggcattatggccaggtgcatgcagttatgtctgggttacgtgtgaaacgtacatctggtgaactgtatacttggctcaaacttctcaaaatttagaggtgctggaaaggattgtcacttggagcctttagtagacaaaaggcagaaagtgagcatcatttcagaaatgctttagtatgcacacttttagctgatattttgatatatagaataataatatacacagtggagaatattcaaagagtggctgaagggagaatacagagccagtagggccaaaatgaaacttctaggatgtcttctgaattttcagcacatggggggaataagtgaacaaatttcccaacatcgtgcaatgctttatagcacaatgatctagatttcagactgtgttaaggttttttctttgttgatgttgttgttttaattctaatgtgcacggtgtgactggcagagtgagtttaaaagctttacgagtgattaattgcttggcaggcacccacgctatctgcatttccagaactttactgatgcatccatgtacatttccactgaggaattttggtgggtggggggaggttgtgctgcctcacaatgtcacgtgtattaaagtctaagcagtcacttctgattcacttgcactgtttgggaaatgtcaggtttacaaaaacatacatgtttggaataaaaaatggctgcaaacaattcagaa

SEQ ID NO: 10154 - DNA, 428 bp, Homo sapiens
  source 1..428: mol_type = unassigned DNA
aaaccctgtatctagctttgggggctgtgaagaacatctccctaaacatctctatctccaacctcggagatgatgcctatgatgccaacgtgtccttcaatgtttcccgggagctcttcttcatcaacatgtggcagaaggaggagatgggcatctcctgtgagctgctggaatcggacttcctcaaatgcagcgtgggatttcctttcatgaggtcaaagtcaaaggtaagggacacagacgggacccttcctcagcagcaggcccccagcccttccaccagccactgattccgccgcctccctgaggtgaggagtcctcccaccccctgcctcccatagcagctggggcggccactgaagccctgacatgctcctgtccctggctgtgtacaccggggtatactccggaggggctgcatcatatgg

SEQ ID NO: 10155 - DNA, 609 bp, Homo sapiens
  source 1..609: mol_type = unassigned DNA
gaaaaaggacagttcgtctgtcatccagttcatgtcccgcgccaaggtgaaggtggatcctgccctaagggtggtggaaatagctcatgggaacccagaagaggtgacgatgggcttctttcgccgaaggtacaaagaaattatcgaagctgagaagaaccggaaagagaatgaagacagttgggactgggtccagaaaaaccagtgagctgccacaccagtcacatgacctgatcactagcctgtcatccttggtctttgtatcttccatatttggaagaaaaaaatcttctccagatttttcggaggccccactgatgctgttctcttcttcattctatcaagcccaggtgccagcctgaggcagccacttcggccaggtcacacgaccggggccagcaccacttcctttaaagatgaactctgaactttggagagtgagctacagagccgagcaatatttatggatgcaacacgcatggtcaaccctcaggggaaaactgttacctaaagtatttttataaatataagccttttatactgattatgtcttttatatttgtatcgatgttttattatttctattaaatagttatataattcactcaa

SEQ ID NO: 10156 - DNA, 7030 bp, Homo sapiens
  source 1..7030: mol_type = unassigned DNA
cctcagacgctgcgtggagcggcggagccggagggaagcaaaggaccgtctgcgctgctgtccccgccccgcgcgctctgcgcccctcgtccctggcggtcgctccgaagctcagccctcttgcctgccccggagctgtcccgggctagccgagaagagagcggccggcaagtttgggcgcgcgcaggcggcgggccgcgggcactgggcgcctcgctggggcggggggaggtggctaccgctcccggcttggcgtcccgcgcgcacttcggcgatggcttttccgccgcggcgacggctgcgcctcggtccccgcggcctcccgcttcttctctcgggactcctgctacctctgtgccgcgccttcaacctagacgtggacagtcctgccgagtactctggccccgagggaagttacttcggcttcgccgtggatttcttcgtgcccagcgcgtcttcccggatgtttcttctcgtgggagctcccaaagcaaacaccacccagcctgggattgtggaaggagggcaggtcctcaaatgtgactggtcttctacccgccggtgccagccaattgaatttgatgcaacaggcaatagagattatgccaaggatgatccattggaatttaagtcccatcagtggtttggagcatctgtgaggtcgaaacaggataaaattttggcctgtgccccattgtaccattggagaactgagatgaaacaggagcgagagcctgttggaacatgctttcttcaagatggaacaaagactgttgagtatgctccatgtagatcacaagatattgatgctgatggacagggattttgtcaaggaggattcagcattgattttactaaagctgacagagtacttcttggtggtcctggtagcttttattggcaaggtcagcttatttcggatcaagtggcagaaatcgtatctaaatacgaccccaatgtttacagcatcaagtataataaccaattagcaactcggactgcacaagctatttttgatgacagctatttgggttattctgtggctgtcggagatttcaatggtgatggcatagatgactttgtttcaggagttccaagagcagcaaggactttgggaatggtttatatttatgatgggaagaacatgtcctccttatacaattttactggcgagcagatggctgcatatttcggattttctgtagctgccactgacattaatggagatgattatgcagatgtgtttattggagcacctctcttcatggatcgtggctctgatggcaaactccaagaggtggggcaggtctcagtgtctctacagagagcttcaggagacttccagacgacaaagctgaatggatttgaggtctttgcacggtttggcagtgccatagctcctttgggagatctggaccaggatggtttcaatgatattgcaattgctgctccatatgggggtgaagataaaaaaggaattgtttatatcttcaatggaagatcaacaggcttgaacgcagtcccatctcaaatccttgaagggcagtgggctgctcgaagcatgccaccaagctttggctattcaatgaaaggagccacagatatagacaaaaatggatatccagacttaattgtaggagcttttggtgtagatcgagctatcttatacagggccagaccagttatcactgtaaatgctggtcttgaagtgtaccctagcattttaaatcaagacaataaaacctgctcactgcctggaacagctctcaaagtttcctgttttaatgttaggttctgcttaaaggcagatggcaaaggagtacttcccaggaaacttaatttccaggtggaacttcttttggataaactcaagcaaaagggagcaattcgacgagcactgtttctctacagcaggtccccaagtcactccaagaacatgactatttcaagggggggactgatgcagtgtgaggaattgatagcgtatctgcgggatgaatctgaatttagagacaaactcactccaattactatttttatggaatatcggttggattatagaacagctgctgatacaacaggcttgcaacccattcttaaccagttcacgcctgctaacattagtcgacaggctcacattctacttgactgtggtgaagacaatgtctgtaaacccaagctggaagtttctgtagatagtgatcaaaagaagatctatattggggatgacaaccctctgacattgattgttaaggctcagaatcaaggagaaggtgcctacgaagctgagctcatcgtttccattccactgcaggctgatttcatcggggttgtccgaaacaatgaagccttagcaagactttcctgtgcatttaagacagaaaaccaaactcgccaggtggtatgtgaccttggaaacccaatgaaggctggaactcaactcttagctggtcttcgtttcagtgtgcaccagcagtcagagatggatacttctgtgaaatttgacttacaaatccaaagctcaaatctatttgacaaagtaagcccagttgtatctcacaaagttgatcttgctgttttagctgcagttgagataagaggagtctcgagtcctgatcatgtctttcttccgattccaaactgggagcacaaggagaaccctgagactgaagaagatgttgggccagttgttcagcacatctatgagctgagaaacaatggtccaagttcattcagcaaggcaatgctccatcttcagtggccttacaaatataataataacactctgttgtatatccttcattatgatattgatggaccaatgaactgcacttcagatatggagatcaaccctttgagaattaagatctcatctttgcaaacaactgaaaagaatgacacggttgccgggcaaggtgagcgggaccatctcatcactaagcgggatcttgccctcagtgaaggagatattcacactttgggttgtggagttgctcagtgcttgaagattgtctgccaagttgggagattagacagaggaaagagtgcaatcttgtacgtaaagtcattactgtggactgagacttttatgaataaagaaaatcagaatcattcctattctctgaagtcgtctgcttcatttaatgtcatagagtttccttataagaatcttccaattgaggatatcaccaactccacattggttaccactaatgtcacctggggcattcagccagcgcccatgcctgtgcctgtgtgggtgatcattttagcagttctagcaggattgttgctactggctgttttggtatttgtaatgtacaggatgggcttttttaaacgggtccggccacctcaagaagaacaagaaagggagcagcttcaacctcatgaaaatggtgaaggaaactcagaaacttaactgcagtttttaagttatgctacatcttgacccactagaattagcaactttattatagatttaaactttcttcatgaggagtaaaaatccaaggctttactgctgatagtgctaattggcattaaccacaaaatgagaattatatttgtcaaccttctccttataaataagttcagacatacatttaataacatagggtgacttgtgtttttaggtatttaaataataaaatttcaagggatagtttttattcaatgtatataagacaggtagtgcctgatttactactttatataaaatagtacctccttcagttactgtttctgatttaatgtacggaactttatttgttgttgttgttgttgttgttgttgttgttttaaagcagtccaaatttggaccttagcaatcatgtcttttgtataggtacttaatgttaatacatattacactacagtttacttttcagaatactaaagactttataactgcatgaacttggatttttttaatcactcatatggtagaattttataaacacatacatgataccatccaaattcttgcttttaataacaaaggtacaatattttgttttagtatgaaaatctggtagatcctattacacttctgtttatattaaatccacaatattttattacatttttaacttgtataaattttaggtcaaatccttcaagccaacctatactaaaaattagttccataatcacaaatggctcttttgtgtaattgtttaatttcacctgaatatcataatgcttaaagccatatggagttggaaattatttccaaagcatatttattccattgttttagtctggctatttacagtataaaaaaagcatttttattaaaatactgtgtagttctttgagatagttgcttatgcatatagtaagtattacattcttagagtagagcagagtttttagttagtattaatttattttcctccattcatgtacttttccttatatttccaaaactgttactgagaatgggtcaagatcagtgagaaatctttacagttgacaggaacctggaccccttaccccaactttatgagtaatgcttggaataaaaactcttaaggcaactcactgatttacttctagcaatagcatgatgttacaggaatattacctctgtttaagcaaggtaatgtgtaaaatcagtctcggctgtcagaataacttctaaaaggtatttttataagcagttcaagttactgaaaaccttttaaacctttctgaagttcgttagtataaattacttttctaggattattaataaaagccacataggtggcaagttgtagttttatatggctctgtagagtggtgaaccttctagaggaatatatgatttattcacagttcctcaaggcctggggatgatgatcagttatacctatttttgtgcaattacatcatgttgtacattagaaatggagagtttaatagctctttaactgctgtcctcattaggtaatgataaatatttcccttaaataattgactattttgctgtgttttaaaaatgattgaaatttatcttgccatatctcataatttcatgcacaagttgactgagctaatcttgagaatatattcgtaaaataggagcacatttagttgaggtatacaaggtaggactctagacaaaaccttctattttagctttagtgaatttcaaaagtaatgggtcttggagtatagatttttattagtagcttgaaagagcttaatcatatgcagtaagtatttttattaccaataaatttaaaattttttaagaaaaatatttttatcctagggccaagtgttgcctgccaccaatcagtaagttagtctataacaaattttaccctaacagttttaccacctagtaacagtcatttctgaaaatatgttggatagaaagtcactctttggcaaaagtgttagaatttgcttttgtgccatctattccttttatggcatctatcttgaaagtaatcttgtattggagattgaaagatgctgtaatttagaaattaacatgatatcttaaattacctttatgaaatatagttttgtataatagcatagattttccttcaaaaaatgaacatttatatatctacaaaaatatggagaagagtaatttgaaagcctactttctgaagaaaatggtgggatttttttttatcatgattaaatatcaaaaaattgccctatgaaaactttaaatctctaaaacatttgaaatactaccatatttgtgatttattgagaataaaaatccattttgaaatgtaaaatttttatgatctgattcagttttaagaaaacatgaatgaactagaagatattaaaaacatttgacattggtaagaaatattgatactgatattgatttttatataggtatttatttcagaattgatattttgagaaaaatacatgtgagtcattttttctgtttctcttttctcttaacgattatcactgtaattctgaatctgaaaggtaaaacaattagtcaaaatattattgccatcattctacctgtgttatgaaactacttattcatagttaattctcattaacacttacatttccataaagaaaactcaagtattaataaaagagactttactggcttaagagggctgtgaaagatttttgatagtgaatcatgaccctaagggagagatttgtgtgataaaagtattgtatataatagatcagcgatttttgtaaggcaaacagaatttgtaagttggcagatcttcctaagttgcaaaatgtaatgatgagcttggtggagaagaatgagtcgttcttggaatacctatgtgcagccactacccatctcaatgtcaccttgtttgcattcttggatagcttgtatatgtagtagtttgatgaataatttaaagaaaaacacctaaaatttgaaaaatgattgtaggatcaaaaaaggcagatgaaattacttaatactcagtgttttggagagtattccttttagtttgttggttggctggtttgaacgatagaaatatgcagcatgcaatatatgcttatatttcattttaatttctgatatataatgaacttcttgggagaggtactgaatctttgatgttttttgtcattgttctcaagtgcaatataacaatgtaaccaaatctagataatttcaaagttgtcattaatttagtaagcctaatataaacaaatatttgtattatttttgttagcaggaaagagtgattaagtgaggttatttacccctaaatggtccattctgcattgtatttcaggctggaaatgaattattctttaccagttttgaaacactttgaaatatcctaaggtaacttggaagctgtgtagtatatcaaattaatttgctacctaataacatagaaagtaaatatctttgtggtcacccacattgggtgagacagaaaatgaatctgttctaaaatttgtaatttgctaacttgatttgagttagtgaaaactggtacagtgttctgcttgatttacaacatgtaacttgtgactgtacaataaacataagcatatggtacca

SEQ ID NO: 10157 - DNA, 6903 bp, Homo sapiens
  source 1..6903: mol_type = unassigned DNA
ggagcggcggagccggagggaagcaaaggaccgtctgcgctgctgtccccgccccgcgcgctctgcgcccctcgtccctggcggtcgctccgaagctcagccctcttgcctgccccggagctgtcccgggctagccgagaagagagcggccggcaagtttgggcgcgcgcaggcggcgggccgcgggcactgggcgcctcgctggggcggggggaggtggctaccgctcccggcttggcgtcccgcgcgcacttcggcgatggcttttccgccgcggcgacggctgcgcctcggtccccgcggcctcccgcttcttctctcgggactcctgctacctctgtgccgcgccttcaacctagacgtggacagtcctgccgagtactctggccccgagggaagttacttcggcttcgccgtggatttcttcgtgcccagcgcgtcttcccggatgtttcttctcgtgggagctcccaaagcaaacaccacccagcctgggattgtggaaggagggcaggtcctcaaatgtgactggtcttctacccgccggtgccagccaattgaatttgatgcaacaggcaatagagattatgccaaggatgatccattggaatttaagtcccatcagtggtttggagcatctgtgaggtcgaaacaggataaaattttggcctgtgccccattgtaccattggagaactgagatgaaacaggagcgagagcctgttggaacatgctttcttcaagatggaacaaagactgttgagtatgctccatgtagatcacgtcagcttatttcggatcaagtggcagaaatcgtatctaaatacgaccccaatgtttacagcatcaagtataataaccaattagcaactcggactgcacaagctatttttgatgacagctatttgggttattctgtggctgtcggagatttcaatggtgatggcatagatgactttgtttcaggagttccaagagcagcaaggactttgggaatggtttatatttatgatgggaagaacatgtcctccttatacaattttactggcgagcagatggctgcatatttcggattttctgtagctgccactgacattaatggagatgattatgcagatgtgtttattggagcacctctcttcatggatcgtggctctgatggcaaactccaagaggtggggcaggtctcagtgtctctacagagagcttcaggagacttccagacgacaaagctgaatggatttgaggtctttgcacggtttggcagtgccatagctcctttgggagatctggaccaggatggtttcaatgatattgcaattgctgctccatatgggggtgaagataaaaaaggaattgtttatatcttcaatggaagatcaacaggcttgaacgcagtcccatctcaaatccttgaagggcagtgggctgctcgaagcatgccaccaagctttggctattcaatgaaaggagccacagatatagacaaaaatggatatccagacttaattgtaggagcttttggtgtagatcgagctatcttatacagggccagaccagttatcactgtaaatgctggtcttgaagtgtaccctagcattttaaatcaagacaataaaacctgctcactgcctggaacagctctcaaagtttcctgttttaatgttaggttctgcttaaaggcagatggcaaaggagtacttcccaggaaacttaatttccaggtggaacttcttttggataaactcaagcaaaagggagcaattcgacgagcactgtttctctacagcaggtccccaagtcactccaagaacatgactatttcaagggggggactgatgcagtgtgaggaattgatagcgtatctgcgggatgaatctgaatttagagacaaactcactccaattactatttttatggaatatcggttggattatagaacagctgctgatacaacaggcttgcaacccattcttaaccagttcacgcctgctaacattagtcgacaggctcacattctacttgactgtggtgaagacaatgtctgtaaacccaagctggaagtttctgtagatagtgatcaaaagaagatctatattggggatgacaaccctctgacattgattgttaaggctcagaatcaaggagaaggtgcctacgaagctgagctcatcgtttccattccactgcaggctgatttcatcggggttgtccgaaacaatgaagccttagcaagactttcctgtgcatttaagacagaaaaccaaactcgccaggtggtatgtgaccttggaaacccaatgaaggctggaactcaactcttagctggtcttcgtttcagtgtgcaccagcagtcagagatggatacttctgtgaaatttgacttacaaatccaaagctcaaatctatttgacaaagtaagcccagttgtatctcacaaagttgatcttgctgttttagctgcagttgagataagaggagtctcgagtcctgatcatgtctttcttccgattccaaactgggagcacaaggagaaccctgagactgaagaagatgttgggccagttgttcagcacatctatgagctgagaaacaatggtccaagttcattcagcaaggcaatgctccatcttcagtggccttacaaatataataataacactctgttgtatatccttcattatgatattgatggaccaatgaactgcacttcagatatggagatcaaccctttgagaattaagatctcatctttgcaaacaactgaaaagaatgacacggttgccgggcaaggtgagcgggaccatctcatcactaagcgggatcttgccctcagtgaaggagatattcacactttgggttgtggagttgctcagtgcttgaagattgtctgccaagttgggagattagacagaggaaagagtgcaatcttgtacgtaaagtcattactgtggactgagacttttatgaataaagaaaatcagaatcattcctattctctgaagtcgtctgcttcatttaatgtcatagagtttccttataagaatcttccaattgaggatatcaccaactccacattggttaccactaatgtcacctggggcattcagccagcgcccatgcctgtgcctgtgtgggtgatcattttagcagttctagcaggattgttgctactggctgttttggtatttgtaatgtacaggatgggcttttttaaacgggtccggccacctcaagaagaacaagaaagggagcagcttcaacctcatgaaaatggtgaaggaaactcagaaacttaactgcagtttttaagttatgctacatcttgacccactagaattagcaactttattatagatttaaactttcttcatgaggagtaaaaatccaaggctttactgctgatagtgctaattggcattaaccacaaaatgagaattatatttgtcaaccttctccttataaataagttcagacatacatttaataacatagggtgacttgtgtttttaggtatttaaataataaaatttcaagggatagtttttattcaatgtatataagacaggtagtgcctgatttactactttatataaaatagtacctccttcagttactgtttctgatttaatgtacggaactttatttgttgttgttgttgttgttgttgttgttgttttaaagcagtccaaatttggaccttagcaatcatgtcttttgtataggtacttaatgttaatacatattacactacagtttacttttcagaatactaaagactttataactgcatgaacttggatttttttaatcactcatatggtagaattttataaacacatacatgataccatccaaattcttgcttttaataacaaaggtacaatattttgttttagtatgaaaatctggtagatcctattacacttctgtttatattaaatccacaatattttattacatttttaacttgtataaattttaggtcaaatccttcaagccaacctatactaaaaattagttccataatcacaaatggctcttttgtgtaattgtttaatttcacctgaatatcataatgcttaaagccatatggagttggaaattatttccaaagcatatttattccattgttttagtctggctatttacagtataaaaaaagcatttttattaaaatactgtgtagttctttgagatagttgcttatgcatatagtaagtattacattcttagagtagagcagagtttttagttagtattaatttattttcctccattcatgtacttttccttatatttccaaaactgttactgagaatgggtcaagatcagtgagaaatctttacagttgacaggaacctggaccccttaccccaactttatgagtaatgcttggaataaaaactcttaaggcaactcactgatttacttctagcaatagcatgatgttacaggaatattacctctgtttaagcaaggtaatgtgtaaaatcagtctcggctgtcagaataacttctaaaaggtatttttataagcagttcaagttactgaaaaccttttaaacctttctgaagttcgttagtataaattacttttctaggattattaataaaagccacataggtggcaagttgtagttttatatggctctgtagagtggtgaaccttctagaggaatatatgatttattcacagttcctcaaggcctggggatgatgatcagttatacctatttttgtgcaattacatcatgttgtacattagaaatggagagtttaatagctctttaactgctgtcctcattaggtaatgataaatatttcccttaaataattgactattttgctgtgttttaaaaatgattgaaatttatcttgccatatctcataatttcatgcacaagttgactgagctaatcttgagaatatattcgtaaaataggagcacatttagttgaggtatacaaggtaggactctagacaaaaccttctattttagctttagtgaatttcaaaagtaatgggtcttggagtatagatttttattagtagcttgaaagagcttaatcatatgcagtaagtatttttattaccaataaatttaaaattttttaagaaaaatatttttatcctagggccaagtgttgcctgccaccaatcagtaagttagtctataacaaattttaccctaacagttttaccacctagtaacagtcatttctgaaaatatgttggatagaaagtcactctttggcaaaagtgttagaatttgcttttgtgccatctattccttttatggcatctatcttgaaagtaatcttgtattggagattgaaagatgctgtaatttagaaattaacatgatatcttaaattacctttatgaaatatagttttgtataatagcatagattttccttcaaaaaatgaacatttatatatctacaaaaatatggagaagagtaatttgaaagcctactttctgaagaaaatggtgggatttttttttatcatgattaaatatcaaaaaattgccctatgaaaactttaaatctctaaaacatttgaaatactaccatatttgtgatttattgagaataaaaatccattttgaaatgtaaaatttttatgatctgattcagttttaagaaaacatgaatgaactagaagatattaaaaacatttgacattggtaagaaatattgatactgatattgatttttatataggtatttatttcagaattgatattttgagaaaaatacatgtgagtcattttttctgtttctcttttctcttaacgattatcactgtaattctgaatctgaaaggtaaaacaattagtcaaaatattattgccatcattctacctgtgttatgaaactacttattcatagttaattctcattaacacttacatttccataaagaaaactcaagtattaataaaagagactttactggcttaagagggctgtgaaagatttttgatagtgaatcatgaccctaagggagagatttgtgtgataaaagtattgtatataatagatcagcgatttttgtaaggcaaacagaatttgtaagttggcagatcttcctaagttgcaaaatgtaatgatgagcttggtggagaagaatgagtcgttcttggaatacctatgtgcagccactacccatctcaatgtcaccttgtttgcattcttggatagcttgtatatgtagtagtttgatgaataatttaaagaaaaacacctaaaatttgaaaaatgattgtaggatcaaaaaaggcagatgaaattacttaatactcagtgttttggagagtattccttttagtttgttggttggctggtttgaacgatagaaatatgcagcatgcaatatatgcttatatttcattttaatttctgatatataatgaacttcttgggagaggtactgaatctttgatgttttttgtcattgttctcaagtgcaatataacaatgtaaccaaatctagataatttcaaagttgtcattaatttagtaagcctaatataaacaaatatttgtattatttttgttagcaggaaagagtgattaagtgaggttatttacccctaaatggtccattctgcattgtatttcaggctggaaatgaattattctttaccagttttgaaacactttgaaatatcctaaggtaacttggaagctgtgtagtatatcaaattaatttgctacctaataacatagaaagtaaatatctttgtggtcacccacattgggtgagacagaaaatgaatctgttctaaaatttgtaatttgctaacttgatttgagttagtgaaaactggtacagtgttctgcttgatttacaacatgtaacttgtgactgtacaataaacataagcatatggt

SEQ ID NO: 10158 - DNA, 3288 bp, Homo sapiens
  source 1..3288: mol_type = unassigned DNA
ctttgtagctcctggagattcaattctttcttgccagggtctttctacctctgcctcacatattccctccatctcttcattccacttccctcatccccaccccccactcccctccatcctcaatacacaaatgctcctaggcaccctccttctgatcctgtacatcttaatgttgtgccggatgtttcttctcgtgggagctcccaaagcaaacaccacccagcctgggattgtggaaggagggcaggtcctcaaatgtgactggtcttctacccgccggtgccagccaattgaatttgatgcaacaggcaatagagattatgccaaggatgatccattggaatttaagtcccatcagtggtttggagcatctgtgaggtcgaaacaggataaaattttggcctgtgccccattgtaccattggagaactgagatgaaacaggagcgagagcctgttggaacatgctttcttcaagatggaacaaagactgttgagtatgctccatgtagatcacaagatattgatgctgatggacagggattttgtcaaggaggattcagcattgattttactaaagctgacagagtacttcttggtggtcctggtagcttttattggcaaggtcagcttatttcggatcaagtggcagaaatcgtatctaaatacgaccccaatgtttacagcatcaagtataataaccaattagcaactcggactgcacaagctatttttgatgacagctatttgggttattctgtggctgtcggagatttcaatggtgatggcatagatgactttgtttcaggagttccaagagcagcaaggactttgggaatggtttatatttatgatgggaagaacatgtcctccttatacaattttactggcgagcagatggctgcatatttcggattttctgtagctgccactgacattaatggagatgattatgcagatgtgtttattggagcacctctcttcatggatcgtggctctgatggcaaactccaagaggtggggcaggtctcagtgtctctacagagagcttcaggagacttccagacgacaaagctgaatggatttgaggtctttgcacggtttggcagtgccatagctcctttgggagatctggaccaggatggtttcaatgatattgcaattgctgctccatatgggggtgaagataaaaaaggaattgtttatatcttcaatggaagatcaacaggcttgaacgcagtcccatctcaaatccttgaagggcagtgggctgctcgaagcatgccaccaagctttggctattcaatgaaaggagccacagatatagacaaaaatggatatccagacttaattgtaggagcttttggtgtagatcgagctatcttatacagggccagaccagttatcactgtaaatgctggtcttgaagtgtaccctagcattttaaatcaagacaataaaacctgctcactgcctggaacagctctcaaagtttcctgttttaatgttaggttctgcttaaaggcagatggcaaaggagtacttcccaggaaacttaatttccaggtggaacttcttttggataaactcaagcaaaagggagcaattcgacgagcactgtttctctacagcaggtccccaagtcactccaagaacatgactatttcaagggggggactgatgcagtgtgaggaattgatagcgtatctgcgggatgaatctgaatttagagacaaactcactccaattactatttttatggaatatcggttggattatagaacagctgctgatacaacaggcttgcaacccattcttaaccagttcacgcctgctaacattagtcgacaggctcacattctacttgactgtggtgaagacaatgtctgtaaacccaagctggaagtttctgtagatagtgatcaaaagaagatctatattggggatgacaaccctctgacattgattgttaaggctcagaatcaaggagaaggtgcctacgaagctgagctcatcgtttccattccactgcaggctgatttcatcggggttgtccgaaacaatgaagccttagcaagactttcctgtgcatttaagacagaaaaccaaactcgccaggtggtatgtgaccttggaaacccaatgaaggctggaactcaactcttagctggtcttcgtttcagtgtgcaccagcagtcagagatggatacttctgtgaaatttgacttacaaatccaaagctcaaatctatttgacaaagtaagcccagttgtatctcacaaagttgatcttgctgttttagctgcagttgagataagaggagtctcgagtcctgatcatgtctttcttccgattccaaactgggagcacaaggagaaccctgagactgaagaagatgttgggccagttgttcagcacatctatgagctgagaaacaatggtccaagttcattcagcaaggcaatgctccatcttcagtggccttacaaatataataataacactctgttgtatatccttcattatgatattgatggaccaatgaactgcacttcagatatggagatcaaccctttgagaattaagatctcatctttgcaaacaactgaaaagaatgacacggttgccgggcaaggtgagcgggaccatctcatcactaagcgggatcttgccctcagtgaaggagatattcacactttgggttgtggagttgctcagtgcttgaagattgtctgccaagttgggagattagacagaggaaagagtgcaatcttgtacgtaaagtcattactgtggactgagacttttatgaataaagaaaatcagaatcattcctattctctgaagtcgtctgcttcatttaatgtcatagagtttccttataagaatcttccaattgaggatatcaccaactccacattggttaccactaatgtcacctggggcattcagccagcgcccatgcctgtgcctgtgtgggtgatcattttagcagttctagcaggattgttgctactggctgttttggtatttgtaatgtacaggatgggcttttttaaacgggtccggccacctcaagaagaacaagaaagggagcagcttcaacctcatgaaaatggtgaaggaaactcagaaacttaactgcagtttttaagttatgctacatcttgacccactagaattagcaactttattatagatttaaactttcttcatgaggagtaaaaatccaaggctttactgctgatagtgctaattggcattaaccacaaaatgagaattatatttgt

SEQ ID NO: 10159 - DNA, 604 bp, Homo sapiens
  source 1..604: mol_type = unassigned DNA
gccttagcaagactttcctgtgcatttaagacagaaaaccaaactcgccaggtggtatgtgaccttggaaacccaatgaaggctggaactcaactcttagctggtcttcgtttcagtgtgcaccagcagtcagagatggatacttctgtgaaatttgacttacaaatccaaagctcaaatctatttgacaaagtaagcccagttgtatctcacaaagttgatcttgctgttttagctgcagttgagataagaggagtctcgagtcctgatcatgtctttcttccgattccaaactgggagcacaaggagaaccctgagactgaagaagatgttgggccagttgttcagcacatctatgaggtttgcagttgttagattttactcaaacctcgtgagcaagccaacgaagagaggaacaactaagctactttaaaaaaaaaattctatgtaatttttatgtaaactctacattggttaagtatgtgtcagagatttctttgaatattttccctatacataaattcatttttatttgacaaatagacttgtttaaataaagcagtttatataatttgttgtttaaaataaattagttctacttgaa

SEQ ID NO: 10160 - DNA, 437 bp, Homo sapiens
  source 1..437: mol_type = unassigned DNA
ggttttctttggtcattgtttagagtctcgagtcctgatcatgtctttcttccgattccaaactgggagcacaaggagaaccctgagactgaagaagatgttgggccagttgttcagcacatctatgagctgagaaacaatggtccaagttcattcagcaaggcaatgctccatcttcagtggccttacaaatataataataacactctgttgtatatccttcattatgatattgatggaccaatgaactgcacttcagatatggagatcaaccctttgagaattaagatctcatctttgcaaacaactgaaaagaatgacacggttgccgggcaaggtgagcgggaccatctcatcactaagcgggatcttgccctcagtgaaggagatattcacactttgggttgtggagttgctcagtgcttgaagattgtctg

SEQ ID NO: 10161 - DNA, 611 bp, Homo sapiens
  source 1..611: mol_type = unassigned DNA
ccactgtgcccaaccttgtttatatttttatcctgacacatattactctgtgttagagacaaatgttgagtttgatcatttttgcataaaaatggtcacattgtaattagaggttaactgtggaaattgctgttatttaaaacctattgctaacatgatttctaaagttgatgtaggggaaggattatggaacagatttttgcccaaggtgtagatacattttcttttttctccttagctgagaaacaatggtccaagttcattcagcaaggcaatgctccatcttcagtggccttacaaatataataataacactctgttgtatatccttcattatgatattgatggaccaatgaactgcacttcagatatggagatcaaccctttgagaattaagatctcatctttgcaaacaactgaaaagaatgacacggttgccgggcaaggtgagcgggaccatctcatcactaagcgggatcttgccctcagtgaaggagatattcacactttggtaagtgccatttcaaatatgtgcaccatagacatttaaaaatatgtgactatagaactgacgccaaagaacatttcaaaaataacaacagctgtgcttg

SEQ ID NO: 10162 - DNA, 333 bp, Homo sapiens
  source 1..333: mol_type = unassigned DNA
gtatatccttcattatgatattgatggaccaatgaactgcacttcagatatggagatcaaccctttgagaattaagatctcatctttgcaaacaactgaaaagaatgacacggttgccgggcaaggtgagcgggaccatctcatcactaagcgggatcttgccctcagtgaaggagatattcacactttggtaagtgccatttcaaatatgtgcaccatagacatttaaaaatatgtgactatagaactgacgccaaagaacatttcaaaaataacaacagctgtgcttgaacaactacatttatttttataccatgcattcctctcactttc

SEQ ID NO: 10163 - DNA, 736 bp, Homo sapiens
  source 1..736: mol_type = unassigned DNA
tgaactgcacttcagatatggagatcaaccctttgagaattaagatctcatctttgcaaacaactgaaaagaatgacacggttgccgggcaaggtgagcgggaccatctcatcactaagcgggatcttgccctcagtgaaggagatattcacactttgggttgtggagttgctcagtgcttgaagattgtctgccaagttgggagattagacagaggaaagagtgcaatcttgtacgtaaagtcattactgtggactgagacttttatgaataaagaaaatcagaatcattcctattctctgaagtcgtctgcttcatttaatgtcatagagtttccttataagaatcttccaattgaggatatcaccaactccacattggtaagtcattggtttaggcaaatagaataaatttactcaattcaaatgctgtacatgtttttattttgttttttaaagaacgacagcttaacttttttgataatttaaactaatgaagttatatgatagcattataacctagtttaatattatcattttactccttaccccgaagtgattaaagctagaccttttagtttagcatcttgtccagtgtaagagatttcttagtatatactaaattatattggagaaattttaggaattttcgtttacaaagttagaaagttggaaattaactgcaacaagtgaggcattttgaagatatttaaggagtaaaaatgggatcagcacat

SEQ ID NO: 10164 - DNA, 5554 bp, Homo sapiens
  source 1..5554: mol_type = unassigned DNA
ccggcggcggcacccagctcctgccccgacaggtgcgcgccgcgcgaaggaatgcagccggtctgactcaccagcgcctccttcctacctgcgcgcccgccccataaagcgctgcccgcctcgtccccacccccccaacccccgcgcccgccctcggacagtccctgctcgcccgcgcgctgcagccccatctcctagcggcagcccaggcgcggagggagcgagtccgccccgaggaggaagaggatggcagggccacgccccagcccatgggccaggctgctcctggcagccttgatcagcgtcagcctctctgggaccttggcaaaccgctgcaagaaggccccagtgaagagctgcacggagtgtgtccgtgtggataaggactgcgcctactgcacagacgagatgttcagggaccggcgctgcaacacccaggcggagctgctggccgcgggctgccagcgggagagcatcgtggtcatggagagcagcttccaaatcacagaggagacccagattgacaccaccctgcggcgcagccagatgtccccccaaggcctgcgggtccgtctgcggcccggtgaggagcggcattttgagctggaggtgtttgagccactggagagccccgtggacctgtacatcctcatggacttctccaactccatgtccgatgatctggacaacctcaagaagatggggcagaacctggctcgggtcctgagccagctcaccagcgactacactattggatttggcaagtttgtggacaaagtcagcgtcccgcagacggacatgaggcctgagaagctgaaggagccctggcccaacagtgacccccccttctccttcaagaacgtcatcagcctgacagaagatgtggatgagttccggaataaactgcagggagagcggatctcaggcaacctggatgctcctgagggcggcttcgatgccatcctgcagacagctgtgtgcacgagggacattggctggcgcccggacagcacccacctgctggtcttctccaccgagtcagccttccactatgaggctgatggcgccaacgtgctggctggcatcatgagccgcaacgatgaacggtgccacctggacaccacgggcacctacacccagtacaggacacaggactacccgtcggtgcccaccctggtgcgcctgctcgccaagcacaacatcatccccatctttgctgtcaccaactactcctatagctactacgagaagcttcacacctatttccctgtctcctcactgggggtgctgcaggaggactcgtccaacatcgtggagctgctggaggaggccttcaatcggatccgctccaacctggacatccgggccctagacagcccccgaggccttcggacagaggtcacctccaagatgttccagaagacgaggactgggtcctttcacatccggcggggggaagtgggtatataccaggtgcagctgcgggcccttgagcacgtggatgggacgcacgtgtgccagctgccggaggaccagaagggcaacatccatctgaaaccttccttctccgacggcctcaagatggacgcgggcatcatctgtgatgtgtgcacctgcgagctgcaaaaagaggtgcggtcagctcgctgcagcttcaacggagacttcgtgtgcggacagtgtgtgtgcagcgagggctggagtggccagacctgcaactgctccaccggctctctgagtgacattcagccctgcctgcgggagggcgaggacaagccgtgctccggccgtggggagtgccagtgcgggcactgtgtgtgctacggcgaaggccgctacgagggtcagttctgcgagtatgacaacttccagtgtccccgcacttccgggttcctctgcaatgaccgaggacgctgctccatgggccagtgtgtgtgtgagcctggttggacaggcccaagctgtgactgtcccctcagcaatgccacctgcatcgacagcaatgggggcatctgtaatggacgtggccactgtgagtgtggccgctgccactgccaccagcagtcgctctacacggacaccatctgcgagatcaactactcggcgatccacccgggcctctgcgaggacctacgctcctgcgtgcagtgccaggcgtggggcaccggcgagaagaaggggcgcacgtgtgaggaatgcaacttcaaggtcaagatggtggacgagcttaagagagccgaggaggtggtggtgcgctgctccttccgggacgaggatgacgactgcacctacagctacaccatggaaggtgacggcgcccctgggcccaacagcactgtcctggtgcacaagaagaaggactgccctccgggctccttctggtggctcatccccctgctcctcctcctcctgccgctcctggccctgctactgctgctatgctggaagtactgtgcctgctgcaaggcctgcctggcacttctcccgtgctgcaaccgaggtcacatggtgggctttaaggaagaccactacatgctgcgggagaacctgatggcctctgaccacttggacacgcccatgctgcgcagcgggaacctcaagggccgtgacgtggtccgctggaaggtcaccaacaacatgcagcggcctggctttgccactcatgccgccagcatcaaccccacagagctggtgccctacgggctgtccttgcgcctggcccgcctttgcaccgagaacctgctgaagcctgacactcgggagtgcgcccagctgcgccaggaggtggaggagaacctgaacgaggtctacaggcagatctccggtgtacacaagctccagcagaccaagttccggcagcagcccaatgccgggaaaaagcaagaccacaccattgtggacacagtgctgatggcgccccgctcggccaagccggccctgctgaagcttacagagaagcaggtggaacagagggccttccacgacctcaaggtggcccccggctactacaccctcactgcagaccaggacgcccggggcatggtggagttccaggagggcgtggagctggtggacgtacgggtgcccctctttatccggcctgaggatgacgacgagaagcagctgctggtggaggccatcgacgtgcccgcaggcactgccaccctcggccgccgcctggtaaacatcaccatcatcaaggagcaagccagagacgtggtgtcctttgagcagcctgagttctcggtcagccgcggggaccaggtggcccgcatccctgtcatccggcgtgtcctggacggcgggaagtcccaggtctcctaccgcacacaggatggcaccgcgcagggcaaccgggactacatccccgtggagggtgagctgctgttccagcctggggaggcctggaaagagctgcaggtgaagctcctggagctgcaagaagttgactccctcctgcggggccgccaggtccgccgtttccacgtccagctcagcaaccctaagtttggggcccacctgggccagccccactccaccaccatcatcatcagggacccagatgaactggaccggagcttcacgagtcagatgttgtcatcacagccaccccctcacggcgacctgggcgccccgcagaaccccaatgctaaggccgctgggtccaggaagatccatttcaactggctgcccccttctggcaagccaatggggtacagggtaaagtactggattcagggtgactccgaatccgaagcccacctgctcgacagcaaggtgccctcagtggagctcaccaacctgtacccgtattgcgactatgagatgaaggtgtgcgcctacggggctcagggcgagggaccctacagctccctggtgtcctgccgcacccaccaggaagtgcccagcgagccagggcgtctggccttcaatgtcgtctcctccacggtgacccagctgagctgggctgagccggctgagaccaacggtgagatcacagcctacgaggtctgctatggcctggtcaacgatgacaaccgacctattgggcccatgaagaaagtgctggttgacaaccctaagaaccggatgctgcttattgagaaccttcgggagtcccagccctaccgctacacggtgaaggcgcgcaacggggccggctgggggcctgagcgggaggccatcatcaacctggccacccagcccaagaggcccatgtccatccccatcatccctgacatccctatcgtggacgcccagagcggggaggactacgacagcttccttatgtacagcgatgacgttctacgctctccatcgggcagccagaggcccagcgtctccgatgacactgagcacctggtgaatggccggatggactttgccttcccgggcagcaccaactccctgcacaggatgaccacgaccagtgctgctgcctatggcacccacctgagcccacacgtgccccaccgcgtgctaagcacatcctccaccctcacacgggactacaactcactgacccgctcagaacactcacactcgaccacactgcccagggactactccaccctcacctccgtctcctcccacgactctcgcctgactgctggtgtgcccgacacgcccacccgcctggtgttctctgccctggggcccacatctctcagagtgagctggcaggagccgcggtgcgagcggccgctgcagggctacagtgtggagtaccagctgctgaacggcggtgagctgcatcggctcaacatccccaaccctgcccagacctcggtggtggtggaagacctcctgcccaaccactcctacgtgttccgcgtgcgggcccagagccaggaaggctggggccgagagcgtgagggtgtcatcaccattgaatcccaggtgcacccgcagagcccactgtgtcccctgccaggctccgccttcactttgagcactcccagtgccccaggcccgctggtgttcactgccctgagcccagactcgctgcagctgagctgggagcggccacggaggcccaatggggatatcgtcggctacctggtgacctgtgagatggcccaaggaggagggccagccaccgcattccgggtggatggagacagccccgagagccggctgaccgtgccgggcctcagcgagaacgtgccctacaagttcaaggtgcaggccaggaccactgagggcttcgggccagagcgcgagggcatcatcaccatagagtcccaggatggaggacccttcccgcagctgggcagccgtgccgggctcttccagcacccgctgcaaagcgagtacagcagcatcaccaccacccacaccagcgccaccgagcccttcctagtggatgggctgaccctgggggcccagcacctggaggcaggcggctccctcacccggcatgtgacccaggagtttgtgagccggacactgaccaccagcggaacccttagcacccacatggaccaacagttcttccaaacttgaccgcaccctgccccacccccgccacgtcccactaggcgtcctcccgact

SEQ ID NO: 10165 - DNA, 5919 bp, Homo sapiens
  source 1..5919: mol_type = unassigned DNA
gcgctgcccgcctcgtccccacccccccaacccccgcgcccgccctcggacagtccctgctcgcccgcgcgctgcagccccatctcctagcggcagcccaggcgcggagggagcgagtccgccccgaggtaggtccaggacgggcgcacagcagcagccgaggctggccgggagagggaggaagaggatggcagggccacgccccagcccatgggccaggctgctcctggcagccttgatcagcgtcagcctctctgggaccttggcaaaccgctgcaagaaggccccagtgaagagctgcacggagtgtgtccgtgtggataaggactgcgcctactgcacagacgagatgttcagggaccggcgctgcaacacccaggcggagctgctggccgcgggctgccagcgggagagcatcgtggtcatggagagcagcttccaaatcacagaggagacccagattgacaccaccctgcggcgcagccagatgtccccccaaggcctgcgggtccgtctgcggcccggtgaggagcggcattttgagctggaggtgtttgagccactggagagccccgtggacctgtacatcctcatggacttctccaactccatgtccgatgatctggacaacctcaagaagatggggcagaacctggctcgggtcctgagccagctcaccagcgactacactattggatttggcaagtttgtggacaaagtcagcgtcccgcagacggacatgaggcctgagaagctgaaggagccctggcccaacagtgacccccccttctccttcaagaacgtcatcagcctgacagaagatgtggatgagttccggaataaactgcagggagagcggatctcaggcaacctggatgctcctgagggcggcttcgatgccatcctgcagacagctgtgtgcacgagggacattggctggcgcccggacagcacccacctgctggtcttctccaccgagtcagccttccactatgaggctgatggcgccaacgtgctggctggcatcatgagccgcaacgatgaacggtgccacctggacaccacgggcacctacacccagtacaggacacaggactacccgtcggtgcccaccctggtgcgcctgctcgccaagcacaacatcatccccatctttgctgtcaccaactactcctatagctactacgagaagcttcacacctatttccctgtctcctcactgggggtgctgcaggaggactcgtccaacatcgtggagctgctggaggaggccttcaatcggatccgctccaacctggacatccgggccctagacagcccccgaggccttcggacagaggtcacctccaagatgttccagaagacgaggactgggtcctttcacatccggcggggggaagtgggtatataccaggtgcagctgcgggcccttgagcacgtggatgggacgcacgtgtgccagctgccggaggaccagaagggcaacatccatctgaaaccttccttctccgacggcctcaagatggacgcgggcatcatctgtgatgtgtgcacctgcgagctgcaaaaagaggtgcggtcagctcgctgcagcttcaacggagacttcgtgtgcggacagtgtgtgtgcagcgagggctggagtggccagacctgcaactgctccaccggctctctgagtgacattcagccctgcctgcgggagggcgaggacaagccgtgctccggccgtggggagtgccagtgcgggcactgtgtgtgctacggcgaaggccgctacgagggtcagttctgcgagtatgacaacttccagtgtccccgcacttccgggttcctctgcaatgaccgaggacgctgctccatgggccagtgtgtgtgtgagcctggttggacaggcccaagctgtgactgtcccctcagcaatgccacctgcatcgacagcaatgggggcatctgtaatggacgtggccactgtgagtgtggccgctgccactgccaccagcagtcgctctacacggacaccatctgcgagatcaactactcggcgatccacccgggcctctgcgaggacctacgctcctgcgtgcagtgccaggcgtggggcaccggcgagaagaaggggcgcacgtgtgaggaatgcaacttcaaggtcaagatggtggacgagcttaagagagccgaggaggtggtggtgcgctgctccttccgggacgaggatgacgactgcacctacagctacaccatggaaggtgacggcgcccctgggcccaacagcactgtcctggtgcacaagaagaaggactgccctccgggctccttctggtggctcatccccctgctcctcctcctcctgccgctcctggccctgctactgctgctatgctggaagtactgtgcctgctgcaaggcctgcctggcacttctcccgtgctgcaaccgaggtcacatggtgggctttaaggaagaccactacatgctgcgggagaacctgatggcctctgaccacttggacacgcccatgctgcgcagcgggaacctcaagggccgtgacgtggtccgctggaaggtcaccaacaacatgcagcggcctggctttgccactcatgccgccagcatcaaccccacagagctggtgccctacgggctgtccttgcgcctggcccgcctttgcaccgagaacctgctgaagcctgacactcgggagtgcgcccagctgcgccaggaggtggaggagaacctgaacgaggtctacaggcagatctccggtgtacacaagctccagcagaccaagttccggcagcagcccaatgccgggaaaaagcaagaccacaccattgtggacacagtgctgatggcgccccgctcggccaagccggccctgctgaagcttacagagaagcaggtggaacagagggccttccacgacctcaaggtggcccccggctactacaccctcactgcagaccaggacgcccggggcatggtggagttccaggagggcgtggagctggtggacgtacgggtgcccctctttatccggcctgaggatgacgacgagaagcagctgctggtggaggccatcgacgtgcccgcaggcactgccaccctcggccgccgcctggtaaacatcaccatcatcaaggagcaagccagagacgtggtgtcctttgagcagcctgagttctcggtcagccgcggggaccaggtggcccgcatccctgtcatccggcgtgtcctggacggcgggaagtcccaggtctcctaccgcacacaggatggcaccgcgcagggcaaccgggactacatccccgtggagggtgagctgctgttccagcctggggaggcctggaaagagctgcaggtgaagctcctggagctgcaagaagttgactccctcctgcggggccgccaggtccgccgtttccacgtccagctcagcaaccctaagtttggggcccacctgggccagccccactccaccaccatcatcatcagggacccagatgaactggaccggagcttcacgagtcagatgttgtcatcacagccaccccctcacggcgacctgggcgccccgcagaaccccaatgctaaggccgctgggtccaggaagatccatttcaactggctgcccccttctggcaagccaatggggtacagggtaaagtactggattcagggtgactccgaatccgaagcccacctgctcgacagcaaggtgccctcagtggagctcaccaacctgtacccgtattgcgactatgagatgaaggtgtgcgcctacggggctcagggcgagggaccctacagctccctggtgtcctgccgcacccaccaggaagtgcccagcgagccagggcgtctggccttcaatgtcgtctcctccacggtgacccagctgagctgggctgagccggctgagaccaacggtgagatcacagcctacgaggtctgctatggcctggtcaacgatgacaaccgacctattgggcccatgaagaaagtgctggttgacaaccctaagaaccggatgctgcttattgagaaccttcgggagtcccagccctaccgctacacggtgaaggcgcgcaacggggccggctgggggcctgagcgggaggccatcatcaacctggccacccagcccaagaggcccatgtccatccccatcatccctgacatccctatcgtggacgcccagagcggggaggactacgacagcttccttatgtacagcgatgacgttctacgctctccatcgggcagccagaggcccagcgtctccgatgacactggctgcggctggaagttcgagcccctgctgggggaggagctggacctgcggcgcgtcacgtggcggctgcccccggagctcatcccgcgcctgtcggccagcagcgggcgctcctccgacgccgaggcgccccacgggcccccggacgacggcggcgcgggcgggaagggcggcagcctgccccgcagtgcgacacccgggccccccggagagcacctggtgaatggccggatggactttgccttcccgggcagcaccaactccctgcacaggatgaccacgaccagtgctgctgcctatggcacccacctgagcccacacgtgccccaccgcgtgctaagcacatcctccaccctcacacgggactacaactcactgacccgctcagaacactcacactcgaccacactgcccagggactactccaccctcacctccgtctcctcccacgactctcgcctgactgctggtgtgcccgacacgcccacccgcctggtgttctctgccctggggcccacatctctcagagtgagctggcaggagccgcggtgcgagcggccgctgcagggctacagtgtggagtaccagctgctgaacggcggtgagctgcatcggctcaacatccccaaccctgcccagacctcggtggtggtggaagacctcctgcccaaccactcctacgtgttccgcgtgcgggcccagagccaggaaggctggggccgagagcgtgagggtgtcatcaccattgaatcccaggtgcacccgcagagcccactgtgtcccctgccaggctccgccttcactttgagcactcccagtgccccaggcccgctggtgttcactgccctgagcccagactcgctgcagctgagctgggagcggccacggaggcccaatggggatatcgtcggctacctggtgacctgtgagatggcccaaggaggagggccagccaccgcattccgggtggatggagacagccccgagagccggctgaccgtgccgggcctcagcgagaacgtgccctacaagttcaaggtgcaggccaggaccactgagggcttcgggccagagcgcgagggcatcatcaccatagagtcccaggatggaggacccttcccgcagctgggcagccgtgccgggctcttccagcacccgctgcaaagcgagtacagcagcatcaccaccacccacaccagcgccaccgagcccttcctagtggatgggctgaccctgggggcccagcacctggaggcaggcggctccctcacccggcatgtgacccaggagtttgtgagccggacactgaccaccagcggaacccttagcacccacatggaccaacagttcttccaaacttgaccgcaccctgccccacccccgccacgtcccactaggcgtcctcccgactcctctcccggagcctcctcagctactccatccttgcacccctgggggcccagcccacccgcatgcacagagcaggggctaggtgtctcctgggaggcatgaagggggcaaggtccgtcctctgtgggcccaaacctatttgtaaccaaagagctgggagcagcacaaggacccagcctttgttctgcacttaataaatggttttgctactgcta

SEQ ID NO: 10166 - DNA, 5645 bp, Homo sapiens
  source 1..5645: mol_type = unassigned DNA
cgcccgcgcgctgcagccccatctcctagcggcagcccaggcgcggagggagcgagtccgccccgaggtaggtccaggacgggcgcacagcagcagccgaggctggccgggagagggaggaagaggatggcagggccacgccccagcccatgggccaggctgctcctggcagccttgatcagcgtcagcctctctgggaccttggcaaaccgctgcaagaaggccccagtgaagagctgcacggagtgtgtccgtgtggataaggactgcgcctactgcacagacgagatgttcagggaccggcgctgcaacacccaggcggagctgctggccgcgggctgccagcgggagagcatcgtggtcatggagagcagcttccaaatcacagaggagacccagattgacaccaccctgcggcgcagccagatgtccccccaaggcctgcgggtccgtctgcggcccggtgaggagcggcattttgagctggaggtgtttgagccactggagagccccgtggacctgtacatcctcatggacttctccaactccatgtccgatgatctggacaacctcaagaagatggggcagaacctggctcgggtcctgagccagctcaccagcgactacactattggatttggcaagtttgtggacaaagtcagcgtcccgcagacggacatgaggcctgagaagctgaaggagccctggcccaacagtgacccccccttctccttcaagaacgtcatcagcctgacagaagatgtggatgagttccggaataaactgcagggagagcggatctcaggcaacctggatgctcctgagggcggcttcgatgccatcctgcagacagctgtgtgcacgagggacattggctggcgcccggacagcacccacctgctggtcttctccaccgagtcagccttccactatgaggctgatggcgccaacgtgctggctggcatcatgagccgcaacgatgaacggtgccacctggacaccacgggcacctacacccagtacaggacacaggactacccgtcggtgcccaccctggtgcgcctgctcgccaagcacaacatcatccccatctttgctgtcaccaactactcctatagctactacgagaagcttcacacctatttccctgtctcctcactgggggtgctgcaggaggactcgtccaacatcgtggagctgctggaggaggccttcaatcggatccgctccaacctggacatccgggccctagacagcccccgaggccttcggacagaggtcacctccaagatgttccagaagacgaggactgggtcctttcacatccggcggggggaagtgggtatataccaggtgcagctgcgggcccttgagcacgtggatgggacgcacgtgtgccagctgccggaggaccagaagggcaacatccatctgaaaccttccttctccgacggcctcaagatggacgcgggcatcatctgtgatgtgtgcacctgcgagctgcaaaaagaggtgcggtcagctcgctgcagcttcaacggagacttcgtgtgcggacagtgtgtgtgcagcgagggctggagtggccagacctgcaactgctccaccggctctctgagtgacattcagccctgcctgcgggagggcgaggacaagccgtgctccggccgtggggagtgccagtgcgggcactgtgtgtgctacggcgaaggccgctacgagggtcagttctgcgagtatgacaacttccagtgtccccgcacttccgggttcctctgcaatgaccgaggacgctgctccatgggccagtgtgtgtgtgagcctggttggacaggcccaagctgtgactgtcccctcagcaatgccacctgcatcgacagcaatgggggcatctgtaatggacgtggccactgtgagtgtggccgctgccactgccaccagcagtcgctctacacggacaccatctgcgagatcaactactcggcgatccacccgggcctctgcgaggacctacgctcctgcgtgcagtgccaggcgtggggcaccggcgagaagaaggggcgcacgtgtgaggaatgcaacttcaaggtcaagatggtggacgagcttaagagagccgaggaggtggtggtgcgctgctccttccgggacgaggatgacgactgcacctacagctacaccatggaaggtgacggcgcccctgggcccaacagcactgtcctggtgcacaagaagaaggactgccctccgggctccttctggtggctcatccccctgctcctcctcctcctgccgctcctggccctgctactgctgctatgctggaagtactgtgcctgctgcaaggcctgcctggcacttctcccgtgctgcaaccgaggtcacatggtgggctttaaggaagaccactacatgctgcgggagaacctgatggcctctgaccacttggacacgcccatgctgcgcagcgggaacctcaagggccgtgacgtggtccgctggaaggtcaccaacaacatgcagcggcctggctttgccactcatgccgccagcatcaaccccacagagctggtgccctacgggctgtccttgcgcctggcccgcctttgcaccgagaacctgctgaagcctgacactcgggagtgcgcccagctgcgccaggaggtggaggagaacctgaacgaggtctacaggcagatctccggtgtacacaagctccagcagaccaagttccggcagcagcccaatgccgggaaaaagcaagaccacaccattgtggacacagtgctgatggcgccccgctcggccaagccggccctgctgaagcttacagagaagcaggtggaacagagggccttccacgacctcaaggtggcccccggctactacaccctcactgcagaccaggacgcccggggcatggtggagttccaggagggcgtggagctggtggacgtacgggtgcccctctttatccggcctgaggatgacgacgagaagcagctgctggtggaggccatcgacgtgcccgcaggcactgccaccctcggccgccgcctggtaaacatcaccatcatcaaggagcaagccagagacgtggtgtcctttgagcagcctgagttctcggtcagccgcggggaccaggtggcccgcatccctgtcatccggcgtgtcctggacggcgggaagtcccaggtctcctaccgcacacaggatggcaccgcgcagggcaaccgggactacatccccgtggagggtgagctgctgttccagcctggggaggcctggaaagagctgcaggtgaagctcctggagctgcaagaagttgactccctcctgcggggccgccaggtccgccgtttccacgtccagctcagcaaccctaagtttggggcccacctgggccagccccactccaccaccatcatcatcagggacccagatgaactggaccggagcttcacgagtcagatgttgtcatcacagccaccccctcacggcgacctgggcgccccgcagaaccccaatgctaaggccgctgggtccaggaagatccatttcaactggctgcccccttctggcaagccaatggggtacagggtaaagtactggattcagggtgactccgaatccgaagcccacctgctcgacagcaaggtgccctcagtggagctcaccaacctgtacccgtattgcgactatgagatgaaggtgtgcgcctacggggctcagggcgagggaccctacagctccctggtgtcctgccgcacccaccaggaagtgcccagcgagccagggcgtctggccttcaatgtcgtctcctccacggtgacccagctgagctgggctgagccggctgagaccaacggtgagatcacagcctacgaggtctgctatggcctggtcaacgatgacaaccgacctattgggcccatgaagaaagtgctggttgacaaccctaagaaccggatgctgcttattgagaaccttcgggagtcccagccctaccgctacacggtgaaggcgcgcaacggggccggctgggggcctgagcgggaggccatcatcaacctggccacccagcccaagaggcccatgtccatccccatcatccctgacatccctatcgtggacgcccagagcggggaggactacgacagcttccttatgtacagcgatgacgttctacgctctccatcgggcagccagaggcccagcgtctccgatgacactgagcacctggtgaatggccggatggactttgccttcccgggcagcaccaactccctgcacaggatgaccacgaccagtgctgctgcctatggcacccacctgagcccacacgtgccccaccgcgtgctaagcacatcctccaccctcacacgggactacaactcactgacccgctcagaacactcacactcgaccacactgcccagggactactccaccctcacctccgtctcctcccacgactctcgcctgactgctggtgtgcccgacacgcccacccgcctggtgttctctgccctggggcccacatctctcagagtgagctggcaggagccgcggtgcgagcggccgctgcagggctacagtgtggagtaccagctgctgaacggcggtgagctgcatcggctcaacatccccaaccctgcccagacctcggtggtggtggaagacctcctgcccaaccactcctacgtgttccgcgtgcgggcccagagccaggaaggctggggccgagagcgtgagggtgtcatcaccattgaatcccaggtgcacccgcagagcccactgtgtcccctgccaggctccgccttcactttgagcactcccagtgccccaggcccgctggtgttcactgccctgagcccagactcgctgcagctgagctgggagcggccacggaggcccaatggggatatcgtcggctacctggtgacctgtgagatggcccaaggaggagggccagccaccgcattccgggtggatggagacagccccgagagccggctgaccgtgccgggcctcagcgagaacgtgccctacaagttcaaggtgcaggccaggaccactgagggcttcgggccagagcgcgagggcatcatcaccatagagtcccaggatggaggacccttcccgcagctgggcagccgtgccgggctcttccagcacccgctgcaaagcgagtacagcagcatcaccaccacccacaccagcgccaccgagcccttcctagtggatgggctgaccctgggggcccagcacctggaggcaggcggctccctcacccggcatgtgacccaggagtttgtgagccggacactgaccaccagcggaacccttagcacccacatggaccaacagttcttccaaacttgaccgcaccctgccccacccccgccacgtcccactaggcgtcctcccgactcctctcccggagcctcctcagctactccatccttgcacccctgggggcccagcccacccgcatgcacagagcaggggctaggtgtctcctgggaggcatgaagggggcaaggtccgtcctctgtgggcccaaacctatttgtaaccaaagagctgggagcagcacaaggacccagcctttgttctgcacttaataaatggttttgctactg

SEQ ID NO: 10167 - DNA, 2798 bp, Homo sapiens
  source 1..2798: mol_type = unassigned DNA
gcagccccatctcctagcggcagcccaggcgcggagggagcgagtccgccccgaggaggaagaggatggcagggccacgccccagcccatgggccaggctgctcctggcagccttgatcagcgtcagcctctctgggaccttggcaaaccgctgcaagaaggccccagtgaagagctgcacggagtgtgtccgtgtggataaggactgcgcctactgcacagacgagatgttcagggaccggcgctgcaacacccaggcggagctgctggccgcgggctgccagcgggagagcatcgtggtcatggagagcagcttccaaatcacagaggagacccagattgacaccaccctgcggcgcagccagatgtccccccaaggcctgcgggtccgtctgcggcccggtgaggagcggcattttgagctggaggtgtttgagccactggagagccccgtggacctgtacatcctcatggacttctccaactccatgtccgatgatctggacaacctcaagaagatggggcagaacctggctcgggtcctgagccagctcaccagcgactacactattggatttggcaagtttgtggacaaagtcagcgtcccgcagacggacatgaggcctgagaagctgaaggagccctggcccaacagtgacccccccttctccttcaagaacgtcatcagcctgacagaagatgtggatgagttccggaataaactgcagggagagcggatctcaggcaacctggatgctcctgagggcggcttcgatgccatcctgcagacagctgtgtgcacgagggacattggctggcgcccggacagcacccacctgctggtcttctccaccgagtcagccttccactatgaggctgatggcgccaacgtgctggctggcatcatgagccgcaacgatgaacggtgccacctggacaccacgggcacctacacccagtacaggacacaggactacccgtcggtgcccaccctggtgcgcctgctcgccaagcacaacatcatccccatctttgctgtcaccaactactcctatagctactacgagaagcttcacacctatttccctgtctcctcactgggggtgctgcaggaggactcgtccaacatcgtggagctgctggaggaggccttcaatcggatccgctccaacctggacatccgggccctagacagcccccgaggccttcggacagaggtcacctccaagatgttccagaagacgaggactgggtcctttcacatccggcggggggaagtgggtatataccaggtgcagctgcgggcccttgagcacgtggatgggacgcacgtgtgccagctgccggaggaccagaagggcaacatccatctgaaaccttccttctccgacggcctcaagatggacgcgggcatcatctgtgatgtgtgcacctgcgagctgcaaaaagaggtgcggtcagctcgctgcagcttcaacggagacttcgtgtgcggacagtgtgtgtgcagcgagggctggagtggccagacctgcaactgctccaccggctctctgagtgacattcagccctgcctgcgggagggcgaggacaagccgtgctccggccgtggggagtgccagtgcgggcactgtgtgtgctacggcgaaggccgctacgagggtcagttctgcgagtatgacaacttccagtgtccccgcacttccgggttcctctgcaatgaccgaggacgctgctccatgggccagtgtgtgtgtgagcctggttggacaggcccaagctgtgactgtcccctcagcaatgccacctgcatcgacagcaatgggggcatctgtaatggacgtggccactgtgagtgtggccgctgccactgccaccagcagtcgctctacacggacaccatctgcgagatcaactactcggcgatccacccgggcctctgcgaggacctacgctcctgcgtgcagtgccaggcgtggggcaccggcgagaagaaggggcgcacgtgtgaggaatgcaacttcaaggtcaagatggtggacgagcttaagagagccgaggaggtggtggtgcgctgctccttccgggacgaggatgacgactgcacctacagctacaccatggaaggtgacggcgcccctgggcccaacagcactgtcctggtgcacaagaagaaggactgccctccgggctccttctggtggctcatccccctgctcctcctcctcctgccgctcctggccctgctactgctgctatgctggaagtactgtgcctgctgcaaggcctgcctggcacttctcccgtgctgcaaccgaggtcacatggtgggctttaaggaagaccactacatgctgcgggagaacctgatggcctctgaccacttggacacgcccatgctgcgcagcgggaacctcaagggccgtgacgtggtccgctggaaggtcaccaacaacatgcagcggcctggctttgccactcatgccgccagcatcaaccccacagagctggtgccctacgggctgtccttgcgcctggcccgcctttgcaccgagaacctgctgaagcctgacactcgggagtgcgcccagctgcgccaggaggtggaggagaacctgaacgaggtctacaggcagatctccggtgtacacaagctccagcagaccaagttccggcagcagcccaatgccgggaaaaagtgagtagaagactcgtgggtgagagggcccccacttcctgcccgcctgtccccagcccagccactgcctcgtccgtccctactccatctccatcccata

SEQ ID NO: 10168 - DNA, 5689 bp, Homo sapiens
  source 1..5689: mol_type = unassigned DNA
ggaagaggatggcagggccacgccccagcccatgggccaggctgctcctggcagccttgatcagcgtcagcctctctgggaccttggcaaaccgctgcaagaaggccccagtgaagagctgcacggagtgtgtccgtgtggataaggactgcgcctactgcacagacgagatgttcagggaccggcgctgcaacacccaggcggagctgctggccgcgggctgccagcgggagagcatcgtggtcatggagagcagcttccaaatcacagaggagacccagattgacaccaccctgcggcgcagccagatgtccccccaaggcctgcgggtccgtctgcggcccggtgaggagcggcattttgagctggaggtgtttgagccactggagagccccgtggacctgtacatcctcatggacttctccaactccatgtccgatgatctggacaacctcaagaagatggggcagaacctggctcgggtcctgagccagctcaccagcgactacactattggatttggcaagtttgtggacaaagtcagcgtcccgcagacggacatgaggcctgagaagctgaaggagccctggcccaacagtgacccccccttctccttcaagaacgtcatcagcctgacagaagatgtggatgagttccggaataaactgcagggagagcggatctcaggcaacctggatgctcctgagggcggcttcgatgccatcctgcagacagctgtgtgcacgagggacattggctggcgcccggacagcacccacctgctggtcttctccaccgagtcagccttccactatgaggctgatggcgccaacgtgctggctggcatcatgagccgcaacgatgaacggtgccacctggacaccacgggcacctacacccagtacaggacacaggactacccgtcggtgcccaccctggtgcgcctgctcgccaagcacaacatcatccccatctttgctgtcaccaactactcctatagctactacgagaagcttcacacctatttccctgtctcctcactgggggtgctgcaggaggactcgtccaacatcgtggagctgctggaggaggccttcaatcggatccgctccaacctggacatccgggccctagacagcccccgaggccttcggacagaggtcacctccaagatgttccagaagacgaggactgggtcctttcacatccggcggggggaagtgggtatataccaggtgcagctgcgggcccttgagcacgtggatgggacgcacgtgtgccagctgccggaggaccagaagggcaacatccatctgaaaccttccttctccgacggcctcaagatggacgcgggcatcatctgtgatgtgtgcacctgcgagctgcaaaaagaggtgcggtcagctcgctgcagcttcaacggagacttcgtgtgcggacagtgtgtgtgcagcgagggctggagtggccagacctgcaactgctccaccggctctctgagtgacattcagccctgcctgcgggagggcgaggacaagccgtgctccggccgtggggagtgccagtgcgggcactgtgtgtgctacggcgaaggccgctacgagggtcagttctgcgagtatgacaacttccagtgtccccgcacttccgggttcctctgcaatgaccgaggacgctgctccatgggccagtgtgtgtgtgagcctggttggacaggcccaagctgtgactgtcccctcagcaatgccacctgcatcgacagcaatgggggcatctgtaatggacgtggccactgtgagtgtggccgctgccactgccaccagcagtcgctctacacggacaccatctgcgagatcaactactcggcgatccacccgggcctctgcgaggacctacgctcctgcgtgcagtgccaggcgtggggcaccggcgagaagaaggggcgcacgtgtgaggaatgcaacttcaaggtcaagatggtggacgagcttaagagagccgaggaggtggtggtgcgctgctccttccgggacgaggatgacgactgcacctacagctacaccatggaaggtgacggcgcccctgggcccaacagcactgtcctggtgcacaagaagaaggactgccctccgggctccttctggtggctcatccccctgctcctcctcctcctgccgctcctggccctgctactgctgctatgctggaagtactgtgcctgctgcaaggcctgcctggcacttctcccgtgctgcaaccgaggtcacatggtgggctttaaggaagaccactacatgctgcgggagaacctgatggcctctgaccacttggacacgcccatgctgcgcagcgggaacctcaagggccgtgacgtggtccgctggaaggtcaccaacaacatgcagcggcctggctttgccactcatgccgccagcatcaaccccacagagctggtgccctacgggctgtccttgcgcctggcccgcctttgcaccgagaacctgctgaagcctgacactcgggagtgcgcccagctgcgccaggaggtggaggagaacctgaacgaggtctacaggcagatctccggtgtacacaagctccagcagaccaagttccggcagcagcccaatgccgggaaaaagcaagaccacaccattgtggacacagtgctgatggcgccccgctcggccaagccggccctgctgaagcttacagagaagcaggtggaacagagggccttccacgacctcaaggtggcccccggctactacaccctcactgcagaccaggacgcccggggcatggtggagttccaggagggcgtggagctggtggacgtacgggtgcccctctttatccggcctgaggatgacgacgagaagcagctgctggtggaggccatcgacgtgcccgcaggcactgccaccctcggccgccgcctggtaaacatcaccatcatcaaggagcaagccagagacgtggtgtcctttgagcagcctgagttctcggtcagccgcggggaccaggtggcccgcatccctgtcatccggcgtgtcctggacggcgggaagtcccaggtctcctaccgcacacaggatggcaccgcgcagggcaaccgggactacatccccgtggagggtgagctgctgttccagcctggggaggcctggaaagagctgcaggtgaagctcctggagctgcaagaagttgactccctcctgcggggccgccaggtccgccgtttccacgtccagctcagcaaccctaagtttggggcccacctgggccagccccactccaccaccatcatcatcagggacccagatgaactggaccggagcttcacgagtcagatgttgtcatcacagccaccccctcacggcgacctgggcgccccgcagaaccccaatgctaaggccgctgggtccaggaagatccatttcaactggctgcccccttctggcaagccaatggggtacagggtaaagtactggattcagggtgactccgaatccgaagcccacctgctcgacagcaaggtgccctcagtggagctcaccaacctgtacccgtattgcgactatgagatgaaggtgtgcgcctacggggctcagggcgagggaccctacagctccctggtgtcctgccgcacccaccaggaagtgcccagcgagccagggcgtctggccttcaatgtcgtctcctccacggtgacccagctgagctgggctgagccggctgagaccaacggtgagatcacagcctacgaggtctgctatggcctggtcaacgatgacaaccgacctattgggcccatgaagaaagtgctggttgacaaccctaagaaccggatgctgcttattgagaaccttcgggagtcccagccctaccgctacacggtgaaggcgcgcaacggggccggctgggggcctgagcgggaggccatcatcaacctggccacccagcccaagaggcccatgtccatccccatcatccctgacatccctatcgtggacgcccagagcggggaggactacgacagcttccttatgtacagcgatgacgttctacgctctccatcgggcagccagaggcccagcgtctccgatgacactgagcacctggtgaatggccggatggactttgccttcccgggcagcaccaactccctgcacaggatgaccacgaccagtgctgctgcctatggcacccacctgagcccacacgtgccccaccgcgtgctaagcacatcctccaccctcacacgggactacaactcactgacccgctcagaacactcacactcgaccacactgcccagggactactccaccctcacctccgtctcctcccacggcctccctcccatctgggaacacgggaggagcaggcttccgctgtcctgggccctggggtcccggagtcgggctcagatgaaagggttccccccttccaggggcccacgagactctataatcctggctgggaggccagcagcgccctcctggggcccagactctcgcctgactgctggtgtgcccgacacgcccacccgcctggtgttctctgccctggggcccacatctctcagagtgagctggcaggagccgcggtgcgagcggccgctgcagggctacagtgtggagtaccagctgctgaacggcggtgagctgcatcggctcaacatccccaaccctgcccagacctcggtggtggtggaagacctcctgcccaaccactcctacgtgttccgcgtgcgggcccagagccaggaaggctggggccgagagcgtgagggtgtcatcaccattgaatcccaggtgcacccgcagagcccactgtgtcccctgccaggctccgccttcactttgagcactcccagtgccccaggcccgctggtgttcactgccctgagcccagactcgctgcagctgagctgggagcggccacggaggcccaatggggatatcgtcggctacctggtgacctgtgagatggcccaaggaggagggccagccaccgcattccgggtggatggagacagccccgagagccggctgaccgtgccgggcctcagcgagaacgtgccctacaagttcaaggtgcaggccaggaccactgagggcttcgggccagagcgcgagggcatcatcaccatagagtcccaggatggaggacccttcccgcagctgggcagccgtgccgggctcttccagcacccgctgcaaagcgagtacagcagcatcaccaccacccacaccagcgccaccgagcccttcctagtggatgggctgaccctgggggcccagcacctggaggcaggcggctccctcacccggcatgtgacccaggagtttgtgagccggacactgaccaccagcggaacccttagcacccacatggaccaacagttcttccaaacttgaccgcaccctgccccacccccgccacgtcccactaggcgtcctcccgactcctctcccggagcctcctcagctactccatccttgcacccctgggggcccagcccacccgcatgcacagagcaggggctaggtgtctcctgggaggcatgaagggggcaaggtccgtcctctgtgggcccaaacctatttgtaaccaaagagctgggagcagcacaaggacccagcctttgttctgcacttaataaatggttttgctactgcta

SEQ ID NO: 10169 - DNA, 2895 bp, Homo sapiens
  source 1..2895: mol_type = unassigned DNA
atggcagggccacgccccagcccatgggccaggctgctcctggcagccttgatcagcgtcagcctctctgggaccttggcaaaccgctgcaagaaggccccagtgaagagctgcacggagtgtgtccgtgtggataaggactgcgcctactgcacagacgagatgttcagggaccggcgctgcaacacccaggcggagctgctggccgcgggctgccagcgggagagcatcgtggtcatggagagcagcttccaaatcacagaggagacccagattgacaccaccctgcggcgcagccagatgtccccccaaggcctgcgggtccgtctgcggcccggtgaggagcggcattttgagctggaggtgtttgagccactggagagccccgtggacctgtacatcctcatggacttctccaactccatgtccgatgatctggacaacctcaagaagatggggcagaacctggctcgggtcctgagccagctcaccagcgactacactattggatttggcaagtttgtggacaaagtcagcgtcccgcagacggacatgaggcctgagaagctgaaggagccctggcccaacagtgacccccccttctccttcaagaacgtcatcagcctgacagaagatgtggatgagttccggaataaactgcagggagagcggatctcaggcaacctggatgctcctgagggcggcttcgatgccatcctgcagacagctgtgtgcacgagggacattggctggcgcccggacagcacccacctgctggtcttctccaccgagtcagccttccactatgaggctgatggcgccaacgtgctggctggcatcatgagccgcaacgatgaacggtgccacctggacaccacgggcacctacacccagtacaggacacaggactacccgtcggtgcccaccctggtgcgcctgctcgccaagcacaacatcatccccatctttgctgtcaccaactactcctatagctactacgagaagcttcacacctatttccctgtctcctcactgggggtgctgcaggaggactcgtccaacatcgtggagctgctggaggaggccttcaatcggatccgctccaacctggacatccgggccctagacagcccccgaggccttcggacagaggtcacctccaagatgttccagaagacgaggactgggtcctttcacatccggcggggggaagtgggtatataccaggtgcagctgcgggcccttgagcacgtggatgggacgcacgtgtgccagctgccggaggaccagaagggcaacatccatctgaaaccttccttctccgacggcctcaagatggacgcgggcatcatctgtgatgtgtgcacctgcgagctgcaaaaagaggtgcggtcagctcgctgcagcttcaacggagacttcgtgtgcggacagtgtgtgtgcagcgagggctggagtggccagacctgcaactgctccaccggctctctgagtgacattcagccctgcctgcgggagggcgaggacaagccgtgctccggccgtggggagtgccagtgcgggcactgtgtgtgctacggcgaaggccgctacgagggtcagttctgcgagtatgacaacttccagtgtccccgcacttccgggttcctctgcaatgaccgaggacgctgctccatgggccagtgtgtgtgtgagcctggttggacaggcccaagctgtgactgtcccctcagcaatgccacctgcatcgacagcaatgggggcatctgtaatggacgtggccactgtgagtgtggccgctgccactgccaccagcagtcgctctacacggacaccatctgcgagatcaactactcggcgatccacccgggcctctgcgaggacctacgctcctgcgtgcagtgccaggcgtggggcaccggcgagaagaaggggcgcacgtgtgaggaatgcaacttcaaggtcaagatggtggacgagcttaagagagccgaggaggtggtggtgcgctgctccttccgggacgaggatgacgactgcacctacagctacaccatggaaggtgacggcgcccctgggcccaacagcactgtcctggtgcacaagaagaaggactgccctccgggctccttctggtggctcatccccctgctcctcctcctcctgccgctcctggccctgctactgctgctatgctggaagtactgtgcctgctgcaaggcctgcctggcacttctcccgtgctgcaaccgaggtcacatggtgggctttaaggaagaccactacatgctgcgggagaacctgatggcctctgaccacttggacacgcccatgctgcgcagcgggaacctcaagggccgtgacgtggtccgctggaaggtcaccaacaacatgcagcggcctggctttgccactcatgccgccagcatcaaccccacagagctggtgccctacgggctgtccttgcgcctggcccgcctttgcaccgagaacctgctgaagcctgacactcgggagtgcgcccagctgcgccaggaggtggaggagaacgtaaggacccaggaactaggcctggccggagatgtggctgaacgaggtctacaggcagatctccggtgtacacaagctccagcagaccaagttccggcagcagcccaatgccgggaaaaagcaagaccacaccattgtggacacagtgctgatggcgccccgctcggccaagccggccctgctgaagcttacagagaagcaggtggaacagagggccttccacgacctcaaggtggcccccggctactacaccctcactgcagaccaggacgcccggggcatggtggagttccaggagggcgtggagctggtggacgtacgggtgcccctctttatccggcctga

SEQ ID NO: 10170 - DNA, 458 bp, Homo sapiens
  source 1..458: mol_type = unassigned DNA
tccaactccatgtccgatgatctggacaacctcaagaagatggggcagaacctggctcgggtcctgagccagctcaccagcgactacactattggatttggcaagtttgtggacaaagtcagcgtcccgcagacggacatgaggcctgagaagctgaaggagccctggcccaacagtgacccccccttctccttcaagaacgtcatcagcctgacagaagatgtggatgagttccggaataaactgcagggagagcggatctcagctactccatccttgcacccctgggggcccagcccacccgcatgcacagagcaggggctaggtgtctcctgggaggcatgaagggggcaaggtccgtcctctgtgggcccaaacctatttgtaaccaaagagctgggagcagcacaaggacccagcctttgttctgcacttaataaatggttttgctactgcta

SEQ ID NO: 10171 - DNA, 950 bp, Homo sapiens
  source 1..950: mol_type = unassigned DNA
ccaggtgcagctgcgggcccttgagcacgtggatgggacgcacgtgtgccagctgccggaggaccagaagggcaacatccatctgaaaccttccttctccgacggcctcaagatggacgcgggcatcatctgtgatgtgtgcacctgcgagctgcaaaaagaggtgcggtcagctcgctgcagcttcaacggagacttcgtgtgcggacagtgtgtgtgcagcgagggctggagtggccagacctgcaactgctccaccggctctctgagtgacattcagccctgcctgcgggagggcgaggacaagccgtgctccggccgtggggagtgccagtgcgggcactgtgtgtgctacggcgaaggccgctacgagggtcagttctgcgagtatgacaacttccagtgtccccgcacttccgggttcctctgcaatgaccgaggacgctgctccatgggccagtgtgtgtgtgagcctggttggacaggcccaagctgtgactgtcccctcagcaatgccacctgcatcgacagcaatgggggcatctgtaatggacgtggccactgtgagtgtggccgctgccactgccaccagcagtcgctctacacggacaccatctgcgagatcaactactcggcgatccacccgggcctctgcgaggacctacgctcctgcgtgcagtgccaggcgtggggcaccggcgagaagaaggggcgcacgtgtgaggaatgcaacttcaaggtcaagatggtggacgagcttaagagagccgaggaggtggtggtgcgctgctccttccgggacgaggatgacgactgcacctacagctacaccatggaaggtgacggcgcccctgggcccaacagcactgtcctggtgcacaagaagaagggcctgcctggcacttctcccgtgctgcaaccgaggtcacatggtgggctttaaggaagac

SEQ ID NO: 10172 - DNA, 804 bp, Homo sapiens
  source 1..804: mol_type = unassigned DNA
tggaacagagggccttccacgacctcaaggtggcccccggctactacaccctcactgcagaccagggtaggagggcgggtccgctgtgccactgcctcgcacctcccgcctgtgtggccctgtgacccacctctgaccacctccgaacccccacccagacgcccggggcatggtggagttccaggagggcgtggagctggtggacgtacgggtgcccctctttatccggcctgaggatgacgacgagaagcagctgctggtggaggccatcgacgtgcccgcaggcactgccaccctcggccgccgcctggtaaacatcaccatcatcaaggagcaagccagagacgtggtgtcctttgagcagcctgagttctcggtcagccgcggggaccaggtggcccgcatccctgtcatccggcgtgtcctggacggcgggaagtcccaggtctcctaccgcacacaggatggcaccgcgcagggcaaccggacggagtctcactctgttgcccaggctggcgcgatctcagcttactgcaacctccacctccagggttcaagcgattctcctgcctcagcctcccaagtaacagggactacaggactacatccccgtggagggtgagctgctgttccagcctggggaggcctggaaagagctgcaggtgaagctcctggagctgcaagaagttgactccctcctgcggggccgccaggtccgccgtttccacgtccagctcagcaaccctaagtttggggcccacctgggccagccccactccaccaccatcatcatcagggacccag

SEQ ID NO: 10173 - DNA, 699 bp, Homo sapiens
  source 1..699: mol_type = unassigned DNA
gaacagttatttctccagtcctggaagggaggcagggacctattgggcccatgaagaaagtgctggttgacaaccctaagaaccggatgctgcttattgagaaccttcgggagtcccagccctaccgctacacggtgaaggcgcgcaacggggccggctgggggcctgagcgggaggccatcatcaacctggccacccagcccaagaggcccatgtccatccccatcatccctgacatccctatcgtggacgcccagagcggggaggactacgacagcttccttatgtacagcgatgacgttctacgctctccatcgggcagccagaggcccagcgtctccgatgacactgagcacctggtgaatggccggatggactttgccttcccgggcagcaccaactccctgcacaggatgaccacgaccagtgctgctgcctatggcacccacctgagcccacacgtgccccaccgcgtgctaagcacatcctccaccctcacacgggactacaactcactgacccgctcagaacactcacactcgaccacactgcccagggactactccaccctcacctccgtctcctcccacgactctcgcctgactgctggtgtgcccgacacgcccacccgcctggtgttctctgccctggggcccacatctctcagagtgagctggcaggagccgcggtgcgagcggc

SEQ ID NO: 10174 - DNA, 411 bp, Homo sapiens
  source 1..411: mol_type = unassigned DNA
ggtgggtgaccaggaatgtgcagggcccagcctgccccacggggcccgggtctggggcaggcctgaccaagggaccctgctctccccctgcagagcacctggtgaatggccggatggactttgccttcccgggcagcaccaactccctgcacaggatgaccacgaccagtgctgctgcctatggcacccacctgagcccacacgtgccccaccgcgtgctaagcacatcctccaccctcacacgggactacaactcactgacccgctcagaacactcacactcgaccacactgcccagggactactccaccctcacctccgtctcctcccacgactctcgcctgactgctggtgtgcccgacacgcccacccgcctggtgttctctgccctggggcccacatctctcagag

SEQ ID NO: 10175 - DNA, 603 bp, Homo sapiens
  source 1..603: mol_type = unassigned DNA
gcaccaactccctgcacaggatgaccacgaccagtgctgctgcctatggcacccacctgagcccacacgtgccccaccgcgtgctaagcacatcctccaccctcacacgggactacaactcactgacccgctcagaacactcacactcgaccacactgcccagggactactccaccctcacctccgtctcctcccacggtgagctgcatcggctcaacatccccaaccctgcccagacctcggtggtggtggaagacctcctgcccaaccactcctacgtgttccgcgtgcgggcccagagccaggaaggctggggccgagagcgtgagggtgtcatcaccattgaatcccaggtgcacccgcagagcccactgtgtcccctgccaggctccgccttcactttgagcactcccagtgccccaggcccgctggtgttcactgccctgagcccagactcgctgcagctgagctgggagcggccacggaggcccaatggggatatcgtcggctacctggtgacctgtgagatggcccaaggaggagggccagccaccgcattccgggtggatggagacagccccgagagccggctgaccgtgccgg

SEQ ID NO: 10176 - DNA, 688 bp, Homo sapiens
  source 1..688: mol_type = unassigned DNA
aggccaggaccactgagggcttcgggccagagcgcgagggcatcatcaccatagagtcccaggatggaggacccttcccgcagctgggcagccgtgccgggctcttccagcacccgctgcaaagcgagtacagcagcatcaccaccacccacaccagcgccaccgagcccttcctagtgggtgagcactgagggctaggggatcccggctctcctgggacagggagctagcagagggagaagggcagaccccaagccaggtcatctaatgcctcctcctccacagatgggctgaccctgggggcccagcacctggaggcaggcggctccctcacccggcatgtgacccaggagtttgtgagccggacactgaccaccagcggaacccttagcacccacatggaccaacagttcttccaaacttgaccgcaccctgccccacccccgccacgtcccactaggcgtcctcccgactcctctcccggagcctcctcagctactccatccttgcacccctgggggcccagcccacccgcatgcacagagcaggggctaggtgtctcctgggaggcatgaagggggcaaggtccgtcctctgtgggcccaaacctatttgtaaccaaagagctgggagcagcacaaggacccagcctttgttctgcacttaataaatggttttgctactgcta

SEQ ID NO: 10177 - DNA, 4372 bp, Homo sapiens
  source 1..4372: mol_type = unassigned DNA
gcggagccagcccctcccctacccggagcagcccgctggggccgtcccgagcggcgacacactaggagtcccggccggccagccagggcagccgcggtcccgggactcggccgtgagtgctgcgggacggatggtggcggcggggcgcgggccagcgcgggcgccgtgagccggagctgcgcgcggggcatgcggctgcggcccccggccctcggcccccgcgctccggccccagccccggccgccggcccccgcggagtgcagcgaccgcgccgccgctgagggaggcgccccaccatgccgcgggccccggcgccgctgtacgcctgcctcctggggctctgcgcgctcctgccccggctcgcaggtctcaacatatgcactagtggaagtgccacctcatgtgaagaatgtctgctaatccacccaaaatgtgcctggtgctccaaagaggacttcggaagcccacggtccatcacctctcggtgtgatctgagggcaaaccttgtcaaaaatggctgtggaggtgagatagagagcccagccagcagcttccatgtcctgaggagcctgcccctcagcagcaagggttcgggctctgcaggctgggacgtcattcagatgacaccacaggagattgccgtgaacctccggcccggtgacaagaccaccttccagctacaggttcgccaggtggaggactatcctgtggacctgtactacctgatggacctctccctgtccatgaaggatgacttggacaatatccggagcctgggcaccaaactcgcggaggagatgaggaagctcaccagcaacttccggttgggatttgggtcttttgttgataaggacatctctcctttctcctacacggcaccgaggtaccagaccaatccgtgcattggttacaagttgtttccaaattgcgtcccctcctttgggttccgccatctgctgcctctcacagacagagtggacagcttcaatgaggaagttcggaaacagagggtgtcccggaaccgagatgcccctgaggggggctttgatgcagtactccaggcagccgtctgcaaggagaagattggctggcgaaaggatgcactgcatttgctggtgttcacaacagatgatgtgccccacatcgcattggatggaaaattgggaggcctggtgcagccacacgatggccagtgccacctgaacgaggccaacgagtacactgcatccaaccagatggactatccatcccttgccttgcttggagagaaattggcagagaacaacatcaacctcatctttgcagtgacaaaaaaccattatatgctgtacaagaattttacagccctgatacctggaacaacggtggagattttagatggagactccaaaaatattattcaactgattattaatgcatacaatagtatccggtctaaagtggagttgtcagtctgggatcagcctgaggatcttaatctcttctttactgctacctgccaagatggggtatcctatcctggtcagaggaagtgtgagggtctgaagattggggacacggcatcttttgaagtatcattggaggcccgaagctgtcccagcagacacacggagcatgtgtttgccctgcggccggtgggattccgggacagcctggaggtgggggtcacctacaactgcacgtgcggctgcagcgtggggctggaacccaacagcgccaggtgcaacgggagcgggacctatgtctgcggcctgtgtgagtgcagccccggctacctgggcaccaggtgcgagtgccaggatggggagaaccagagcgtgtaccagaacctgtgccgggaggcagagggcaagccactgtgcagcgggcgtggggactgcagctgcaaccagtgctcctgcttcgagagcgagtttggcaagatctatgggcctttctgtgagtgcgacaacttctcctgtgccaggaacaagggagtcctctgctcaggccatggcgagtgtcactgcggggaatgcaagtgccatgcaggttacatcggggacaactgtaactgctcgacagacatcagcacatgccggggcagagatggccagatctgcagcgagcgtgggcactgtctctgtgggcagtgccaatgcacggagccgggggcctttggggagatgtgtgagaagtgccccacctgcccggatgcatgcagcaccaagagagattgcgtcgagtgcctgctgctccactctgggaaacctgacaaccagacctgccacagcctatgcagggatgaggtgatcacatgggtggacaccatcgtgaaagatgaccaggaggctgtgctatgtttctacaaaaccgccaaggactgcgtcatgatgttcacctatgtggagctccccagtgggaagtccaacctgaccgtcctcagggagccagagtgtggaaacacccccaacgccatgaccatcctcctggctgtggtcggtagcatcctccttgttgggcttgcactcctggctatctggaagctgcttgtcaccatccacgaccggagggagtttgcaaagtttcagagcgagcgatccagggcccgctatgaaatggcttcaaatccattatacagaaagcctatctccacgcacactgtggacttcaccttcaacaagttcaacaaatcctacaatggcactgtggactgatgtttccttctccgaggggctggagcggggatctgatgaaaaggtcagactgaaacgccttgcacggctgctcggcttgatcacagctccctaggtaggcaccacagagaagaccttctagtgagcctgggccaggagcccacagtgcctgtacaggaaggtgcctggccatgtcacctggctgctaggccagagccatgccaggctgcgtccctccgagcttgggataaagcaaggggaccttggcgctctcagctttccctgccacatccagcttgttgtcccaatgaaatactgagatgctgggctgtctctcccttccaggaatgctgggcccccagcctggccagacaagaagactgtcaggaagggtcggagtctgtaaaaccagcatacagtttggcttttttcacattgatcatttttatatgaaataaaaagatcctgcatttatggtgtagttctgagtcctgagacttttctgcgtgatggctatgccttgcacacaggtgttggtgatggggctgttgagatgcctgttgaaggtacatcgtttgcaaatgtcagtttcctctcctgtccgtgtttgtttagtacttttataatgaaaagaaacaagattgtttgggattggaagtaaagattaaaaccaaaagaatttgtgtttgtctgatactctctgtgtgtttctttctttctgagcggacttaaaatggtgcccccagtggggattgaagcggccgtgtacttcctcagggatgggacacaggctggtctgatactccagactgcagcttgtcaagtaagcatgaggtgctcggggcagtgagggctgtgcaagggggaacactgagcagatacctttggccccttccagcttttactgacagagagttccaggctagacaccataaaaaccaccccttgttctgaggggctgaggctggaaatagattgtacagacaagcaagggttgagtggtggttcccacacgaagtcatctcttaatcatcattagcaatagcagttcccttccaaggcctcccctcactcccgaaacacttacgtcccatgcaggcccaatgcaaaaaaacacatttgagcttttttcccgcagggccatgaagtccccttaagttcccatatctaagatggttgactgaccctctccccttatgtacagaagaggaaactgattctcagagaggggaagtggcttgcccgagtgtttgttaggaggttactgaatgacaaactgttcctaagaccccatctcatgctggccagagggccagcctcctcattcctgcttgctcttagaaaatctttcactgatcattttttgtcactggaataacttcaaggttattatgctttcattccaaatggatctgtcctcagctctggacccaattccccttacttcattttggcaaacactaagtcaaatagtgaaatgcctgtcactacatagaacctattacctggggcaaatacgaacagattgagtttccttcatcttgtgtaaatatgatgaaacagagacctggtaacttggtgacactgttaaaccctttttgggataaagccaaatgtaaatgaaaacattaaacagataaattgtggtgttgagacttttctgaattgagaaaaataaatgtaattttggaagaaa

SEQ ID NO: 10178 - DNA, 2228 bp, Homo sapiens
  source 1..2228: mol_type = unassigned DNA
cttatagccccatcccccagccaccagaggagcctgggacctctccccttgaacatcagctttacagcccggcagccagagcttagctccccaccctgtgacctcaggaatcctgttctcccagatgtctccgaagacagacaaagaatgtgtgcaacttggttttgatgatataaagtataataatgaccatttaattgaacgttgtagttaagcattttcacccactatctgagccaccacctgctgttagcctgaggtgggaggagagaggctcaaggtgtcactttttggctgctcatccattttctagaggaggcccctgttaaagaacaagggttccctgggaggagccatcaccctagagcctgtgccagagcctagtgtagactgattcgtgggtaagtgggcagcaggccacgggggacctggcagatgggctctatctgagagggagaagggggctggagcccgagattctccgggacagtggatctcagccctcgacatgcatcagaattgcccaggaagcccagtccccggaggtgtggttgggcccaggtactgggagtttctcttgaaagctccctggagagttgaacgtgcaggagggttgagatccccgccctgggtgatgaccagggcgtgatgtggggaactaggacaatgttggggcattgagctctgaccatgggagtgtgaggagctctgggaggccaggaatactgttttatcacccagaaacctctggcttggagcagactcctcaccaggcattagatggaccagagtgcagatggatttgtctcctggtgtcagaatttgaaaggtctgcaacctgacatgtagacaagacatgccactaaactcacacaggctcctccaagaacccttgggcttcctcccataacaagaagaaaggcagagcagaaacattccctgaggctgaacatctgcagctggaaagaagtgaaagccttcccaggtcctgcactgtcaggagctcagggacaggtgtgggactgttctacattatctgacacccacctttatctcctcttttccaaagagattgcgtcgagtgcctgctgctccactctgggaaacctgacaaccagacctgccacagcctatgcagggatgaggtgatcacatgggtggacaccatcgtgaaagatgaccaggaggctgtgctatgtttctacaaaaccgccaaggactgcgtcatgatgttcacctatgtggagctccccagtgggaagtccaacctgaccgtcctcagggagccagagtgtggaaacacccccaacgccatgaccatcctcctggctgtggtcggtagcatcctccttgttgggcttgcactcctggctatctggaagctgcttgtcaccatccacgaccggagggagtttgcaaagtttcagagcgagcgatccagggcccgctatgaaatggcttcaaatccattatacagaaagcctatctccacgcacactgtggacttcaccttcaacaagttcaacaaatcctacaatggcactgtggactgatgtttccttctccgaggggctggagcggggatctgatgaaaaggtcagactgaaacgccttgcacggctgctcggcttgatcacagctccctaggtaggcaccacagagaagaccttctagtgagcctgggccaggagcccacagtgcctgtacaggaaggtgcctggccatgtcacctggctgctaggccagagccatgccaggctgcgtccctccgagcttgggataaagcaaggggaccttggcgctctcagctttccctgccacatccagcttgttgtcccaatgaaatactgagatgctgggctgtctctcccttccaggaatgctgggcccccagcctggccagacaagaagactgtcaggaagggtcggagtctgtaaaaccagcatacagtttggcttttttcacattgatcatttttatatgaaataaaaagatcctgcatttatggtgtagttctgagtcctgagacttttctgcgtgatggctatgccttgcacacaggtgttggtgatggggctgttgagatgcctgttgaaggtacatcgtttgcaaatgtcagtttcctctcctgtccgtgtttgtttagtacttttataatgaaaagaaacaagattgtttgggattggaagtaaagattaaaaccaaaagaatttgtgtttgtctgata

SEQ ID NO: 10179 - DNA, 577 bp, Homo sapiens
  source 1..577: mol_type = unassigned DNA
aaggcagaactgagatgagacgatgagaggaggccatggcgagtgtcactgcggggaatgcaagtgccatgcaggttacatcggggacaactgtaactgctcgacagacatcagcacatgccggggcagagatggccagatctgcagcgagcgtgggcactgtctctgtgggcagtgccaatgcacggagccgggggcctttggggagatgtgtgagaagtgccccacctgcccggatgcatgcagcaccaagagagattgcgtcgagtgcctgctgctccactctgggaaacctgacaaccagacctgccacagcctatgcagggatgaggtgatcacatgggtggacaccatcgtgaaagatgaccaggaggctgtgctatgtttctacaaaaccgccaaggactgcgtcatgatgttcacctatgtggagctccccagtgggaagtccaacctgaccgtcctcagggagccagagtgtggaaacacccccaacgccatgaccatcctcctggctgtggtcggtagcatcctccttgttgggcttgcactcctggctatctggaagctgcttgtc

SEQ ID NO: 10180 - DNA, 1202 bp, Homo sapiens
  source 1..1202: mol_type = unassigned DNA
gaaaggatgcactgcatttgctggtgttcacaacagatgatgtgccccacatcgcattggatggaaaattgggaggcctggtgcagccacacgatggccagtgccacctgaacgaggccaacgagtacactgcatccaaccagatggactatccatcccttgccttgcttggagagaaattggcagagaacaacatcaacctcatctttgcagtgacaaaaaaccattatatgctgtacaagaattttacagccctgatacctggaacaacggtggagattttagatggagactccaaaaatattattcaactgattattaatgcatacaatgcatcttttgaagtatcattggaggcccgaagctgtcccagcagacacacggagcatgtgtttgccctgcggccggtgggattccgggacagcctggaggtgggggtcacctacaactgcacgtgcggctgcagcgtggggctggaacccaacagcgccaggtgcaacgggagcgggacctatgtctgcggcctgtgtgagtgcagccccggctacctgggcaccaggtgcgagtgccaggatggggagaaccagagcgtgtaccagaacctgtgccgggaggcagagggcaagccactgtgcagcgggcgtggggactgcagctgcaaccagtgctcctgcttcgagagcgagtttggcaagatctatgggcctttctgtgagtgcgacaacttctcctgtgccaggaacaagggagtcctctgctcaggccatggcgagtgtcactgcggggaatgcaagtgccatgcaggttacatcggggacaactgtaactgctcgacagacatcagcacatgccggggcagagatggccagatctgcagcgagcgtgggcactgtctctgtgggcagtgccaatgcacggagccgggggcctttggggagatgtgtgagaagtgccccacctgcccggatgcatgcagcaccaagagagattgcgtcgagtgcctgctgctccactctgggaaacctgacaaccagacctgccacagcctatgcagggatgaggtgatcacatgggtggacaccatcgtgaaagatgaccaggaggctgtgctatgtttctacaaaaccgccaaggactgcgtcatgatgttcacctatgtggagctccccagtgggaagtccaacctgaccgtcctcagggag

SEQ ID NO: 10181 - DNA, 971 bp, Homo sapiens
  source 1..971: mol_type = unassigned DNA
atccggagcctgggcaccaaactcgcggaggagatgaggaagctcaccagcaacttccggttgggatttgggtcttttgttgataaggacatctctcctttctcctacacggcaccgaggtaccagaccaatccgtgcattggttacaagttgtttccaaattgcgtcccctcctttgggttccgccatctgctgcctctcacagacagagtggacagcttcaatgaggaagttcggaaacagagggtgtcccggaaccgagatgcccctgaggggggctttgatgcagtactccaggcagccgtctgcaagagtatccggtctaaagtggagttgtcagtctgggatcagcctgaggatcttaatctcttctttactgctacctgccaagatggggtatcctatcctggtcagaggaagtgtgagggtctgaagattggggacacggcatcttttgaagtatcattggaggcccgaagctgtcccagcagacacacggagcatgtgtttgccctgcggccggtgggattccgggacagcctggaggtgggggtcacctacaactgcacgtgcggctgcagcgtggggctggaacccaacagcgccaggtgcaacgggagcgggacctatgtctgcggcctgtgtgagtgcagccccggctacctgggcaccaggtgcgagtgccaggatggggagaaccagagcgtgtaccagaacctgtgccgggaggcagagggcaagccactgtgcagcgggcgtggggactgcagctgcaaccagtgctcctgcttcgagagcgagtttggcaagatctatgggcctttctgtgagtgcgacaacttctcctgtgccaggaacaagggagtcctctgctcaggccatggcgagtgtcactgcggggaatgcaagtgccatgcaggttacatcggggacaactgtaactgctcgacagacatcagcacatgccgggg

SEQ ID NO: 10182 - DNA, 475 bp, Homo sapiens
  source 1..475: mol_type = unassigned DNA
ccactatcaacttctccaaactcacagagggagacctcaggctgggtctagcaagatgttgtagtatccggtctaaagtggagttgtcagtctgggatcagcctgaggatcttaatctcttctttactgctacctgccaagatggggtatcctatcctggtcagaggaagtgtgagggtctgaagattggggacacggcatcttttgaagtatcattggaggcccgaagctgtcccagcagacacacggagcatgtgtttgccctgcggccggtgggattccgggacagcctggaggtgggggtcacctacaactgcacgtgcggctgcagcgtggggctggaacccaacagcgccaggtgcaacgggagcgggacctatgtctgcggcctgtgtgagtgcagccccggctacctgggcaccaggtgcgagtgccaggatggggagaaccagagcgtgtaccagaacctgtgccg

SEQ ID NO: 10183 - DNA, 789 bp, Homo sapiens
  source 1..789: mol_type = unassigned DNA
ttacaagttgtttccaaattgcgtcccctcctttgggttccgccatctgctgcctctcacagacagagtggacagcttcaatgaggaagttcggaaacagagggtgtcccggaaccgagatgcccctgaggggggctttgatgcagtactccaggcagccgtctgcaaggagaagattggctggcgaaaggatgcactgcatttgctggtgttcacaacagatgatgtgccccacatcgcattggatggaaaattgggaggcctggtgcagccacacgatggccagtgccacctgaacgaggccaacgagtacactgcatccaaccagatggactatccatcccttgccttgcttggagagaaattggcagagaacaacatcaacctcatctttgcagtgacaaaaaaccattatatgctgtacaagagtatccggtctaaagtggagttgtcagtctgggatcagcctgaggatcttaatctcttctttactgctacctgccaagatggggtatcctatcctggtcagaggaagtgtgagggtctgaagattggggacacggcatcttttgaagtatcattggaggcccgaagctgtcccagcagacacacggagcatgtgtttgccctgcggccggtgggattccgggacagcctggaggtgggggtcacctacaactgcacgtgcggctgcagcgtggggctggaacccaacagcgccaggtgcaacgggagcgggacctatgtctgcggcctgtgtgagtgcagccccggctacctgggcaccag

SEQ ID NO: 10184 - DNA, 492 bp, Homo sapiens
  source 1..492: mol_type = unassigned DNA
agggatggaaatatgcctgaatgtcaacatgattcgggaaaccaatcacagagaccctctaaccttgttttcccttatgtgctgtggagactcctctgtccccaagctcagatctactgtgggagctgcccactggctgcccaggagaagattggctggcgaaaggatgcactgcatttgctggtgttcacaacagatgatgtgccccacatcgcattggatggaaaattgggaggcctggtgcagccacacgatggccagtgccacctgaacgaggccaacgagtacactgcatccaaccagatggactatccatcccttgccttgcttggagagaaattggcagagaacaacatcaacctcatctttgcagtgacaaaaaaccattatatgctgtacaagaattttacagccctgatacctggaacaacggtggagattttagatggagactccaaaaatattattcaactgattattaatgcatacaat

SEQ ID NO: 10185 - DNA, 1164 bp, Homo sapiens
  source 1..1164: mol_type = unassigned DNA
gggcgtctacgtcccatctcaggccgccggcagtgaggctttgggaggatgaggcggtaccggcacgacccccgtacctgctctccctctcgcagtctagcaaccgcctttggcccaagtaatctcggctcgcctaatacagcgtgccccgcccctttcccgtggcgacgggcggctaagcaacgggagcgggctctactcagtggtttcgagccccccacgccccaagtctcaacatatgcactagtggaagtgccacctcatgtgaagaatgtctgctaatccacccaaaatgtgcctggtgctccaaagaggacttcggaagcccacggtccatcacctctcggtgtgatctgagggcaaaccttgtcaaaaatggctgtggaggtgagatagagagcccagccagcagcttccatgtcctgaggagcctgcccctcagcagcaagggttcgggctctgcaggctgggacgtcattcagatgacaccacaggagattgccgtgaacctccggcccgagcagtggccgagggtaccagatggaggtttgaccagggatgctcagtgccttggaaatggattaacacagtgctgcatgtggtgacaagaccaccttccagctacaggttcgccaggtggaggactatcctgtggacctgtactacctgatggacctctccctgtccatgaaggatgacttggacaatatccggagcctgggcaccaaactcgcggaggagatgaggaagctcaccagcaacttccggttgggatttgggtcttttgttgataaggacatctctcctttctcctacacggcaccgaggtaccagaccaatccgtgcattggttacaagttgtttccaaattgcgtcccctcctttgggttccgccatctgctgcctctcacagacagagtggacagcttcaatgaggaagttcggaaacagagggtgtcccggaaccgagatgcccctgaggggggctttgatgcagtactccaggcagccgtctgcaaggagaagattggctggcgaaaggatgcactgcatttgctggtgttcacaacagatgatgtgccccacatcgcattggatggaaaattgggaggcctggtgcagccacacgatggccagtgccacctgaacgaggccaacgagtac

SEQ ID NO: 10186 - DNA, 825 bp, Homo sapiens
  source 1..825: mol_type = unassigned DNA
aactttcattttattatttctttttatcgagacagagtctcaccctgtcgcccaggctggagtgcagtggcgagatctcgactcactacaacctctgcctcctgggatcaagcgattctcctgcctcagcctcccgaatagctgggattacaggtctcaacatatgcactagtggaagtgccacctcatgtgaagaatgtctgctaatccacccaaaatgtgcctggtgctccaaagaggacttcggaagcccacggtccatcacctctcggtgtgatctgagggcaaaccttgtcaaaaatggctgtggaggtgagatagagagcccagccagcagcttccatgtcctgaggagcctgcccctcagcagcaagggttcgggctctgcaggctgggacgtcattcagatgacaccacaggagattgccgtgaacctccggcccggtgacaagaccaccttccagctacaggttcgccaggtggaggactatcctgtggacctgtactacctgatggacctctccctgtccatgaaggatgacttggacaatatccggagcctgggcaccaaactcgcggaggagatgaggaagctcaccagcaacttccggttgggatttgggtcttttgttgataaggacatctctcctttctcctacacggcaccgaggtaccagaccaatccgtgcattggttacaagttgtttccaaattgcgtcccctcctttgggttccgccatctgctgcctctcacagacagagtggacagcttcaatgaggaagttcggaaacagagggtgtcccggaaccgagatgcccctgagg

SEQ ID NO: 10187 - DNA, 576 bp, Homo sapiens
  source 1..576: mol_type = unassigned DNA
gtgccccgcccctttcccgtggcgacgggcggctaagcaacgggagcgggctctactcagtggtttcgagccccccacgccccaagtctcaacatatgcactagtggaagtgccacctcatgtgaagaatgtctgctaatccacccaaaatgtgcctggtgctccaaagaggacttcggaagcccacggtccatcacctctcggtgtgatctgagggcaaaccttgtcaaaaatggctgtggaggtgagatagagagcccagccagcagcttccatgtcctgaggagcctgcccctcagcagcaagggttcgggctctgcaggctgggacgtcattcagatgacaccacaggagattgccgtgaacctccggcccggtgacaagaccaccttccagctacaggttcgccaggtggaggactatcctgtggacctgtactacctgatggacctctccctgtccatgaaggatgacttggacaatatccggagcctgggcaccaaactcgcggaggagatgaggaagctcaccagcaacttccggttgggatttgggtcttttgttgataaggacatc

SEQ ID NO: 10188 - DNA, 548 bp, Homo sapiens
  source 1..548: mol_type = unassigned DNA
aaagggagtgagtctgacattacacataccagcacacagcctgtggttttggatcctggagtacctgtctggtacctggtacccggcacactgtgagttcctggacatcaagggctggtctcaacatatgcactagtggaagtgccacctcatgtgaagaatgtctgctaatccacccaaaatgtgcctggtgctccaaagaggacttcggaagcccacggtccatcacctctcggtgtgatctgagggcaaaccttgtcaaaaatggctgtggaggtgagatagagagcccagccagcagcttccatgtcctgaggagcctgcccctcagcagcaagggttcgggctctgcaggctgggacgtcattcagatgacaccacaggagattgccgtgaacctccggcccggtgacaagaccaccttccagctacaggttcgccaggtggaggactatcctgtggacctgtactacctgatggacctctccctgtccatgaaggatgacttggacaatatccggagcctgggcaccaaactcgcggaggag

SEQ ID NO: 10189 - DNA, 267 bp, Homo sapiens
  source 1..267: mol_type = unassigned DNA
atctcgactcactacaacctctgcctcctgggatcaagcgattctcctgcctcagcctcccgaatagctgggattacaggtgatatgagaaaacatccaggaaaagaggaacgcattgtgattgctttgctccagcggaaagagggcatttagagaaagaatccaggagagtttcctccatgtctaagctctactgataatcttaaagaaaattttacataagcaatatccgatgtgaaaaaaataaaataaaacaagcatggccaa

SEQ ID NO: 10190 - DNA, 3420 bp, Homo sapiens
  source 1..3420: mol_type = unassigned DNA
ctgcccgggctgcagccgcgcctgcgggcagccgaggcgaggcgctccggtagcgtggggaggtttcctagcaactctctgccctgagtgcacccggctacccgcaggtctggagccccccggggggccagagcaggaccacccctctcccgcccatcgccggcctcgcctctctcgcatcctagccgtgtgcaccccagagcgcgccagcaactcgggctctggactgcgggacgcctgagccgcgcactgaggcgaaaaggacaagggcacgcagcccccgccccgcgaagccgggctccggcacctcgcggaacctcccctcctgcgctcgcagccgcaggccccactccccgccagggagggagcggcgatgcctcgctctgtgcctgcgggtgtcggcgggtgcttctagggcgctcccagagccgcctccccctgttgctggcatcccgagcttcctcccttgccagccaggacgctgccgacttgtctttgcccgctgctccgcagacggggctgcaaagctgcaactaatggtgttggcctccctgcccacctgtggaagcaactgcgctgattgatgcgccacagacttttttcccctcgacctcgccggcgtcccctcccacagatccagcatcacccagtgaatgtacattagggtggtttcccccccagcttcgggctttgtttgggtttgattgtgtttggctcttcgctaagctgatttatgcagcagaagccccaccggctggagagaaacaaaagctcttttctttgtcccggagcaggctgcggagcccttgcagagccctctctccagtcgccgccggggcccttggccgtcgaaggaggtcttgggctggcacgaagagctgcccggccagagcatcccggccagaagacaatagatgtgcatcttcaaatgcagcatcctgtgccaggtgccttgcgctgggtccagaatgtggatggtgtgttcaagaggatttcatttcaggtggatcaagaagtgaacgttgtgatattgtttccaatttaataagcaaaggctgctcagttgattcaatagaatacccatctgtgcatgttataatacccactgaaaatgaaattaatacccaggtgacaccaggagaagtgtctatccagctgcgtccaggagccgaagctaattttatgctgaaagttcatcctctgaagaaatatcctgtggatctttattatcttgttgatgtctcagcatcaatgcacaataatatagaaaaattaaattccgttggaaacgatttatctagaaaaatggcatttttctcccgtgactttcgtcttggatttggctcatacgttgataaaacagtttcaccatacattagcatccaccccgaaaggattcataatcaatgcagtgactacaatttagactgcatgcctccccatggatacatccatgtgctgtctttgacagagaacatcactgagtttgagaaagcagttcatagacagaagatctctggaaacatagatacaccagaaggaggttttgacgccatgcttcaggcagctgtctgtgaaagtcatatcggatggcgaaaagaggctaaaagattgctgctggtgatgacagatcagacgtctcatctcgctcttgatagcaaattggcaggcatagtggtgcccaatgacggaaactgtcatctgaaaaacaacgtctatgtcaaatcgacaaccatggaacacccctcactaggccaactttcagagaaattaatagacaacaacattaatgtcatctttgcagttcaaggaaaacaatttcattggtataaggatcttctacccctcttgccaggcaccattgctggtgaaatagaatcaaaggctgcaaacctcaataatttggtagtggaagcctatcagaagctcatttcagaagtgaaagttcaggtggaaaaccaggtacaaggcatctattttaacattaccgccatctgtccagatgggtccagaaagccaggcatggaaggatgcagaaacgtgacgagcaatgatgaagttcttttcaatgtaacagttacaatgaaaaaatgtgatgtcacaggaggaaaaaactatgcaataatcaaacctattggttttaatgaaaccgctaaaattcatatacacagaaactgcagctgtcagtgtgaggacaacagaggacctaaaggaaagtgtgtagatgaaacttttctagattccaagtgtttccagtgtgatgagaataaatgtcattttgatgaagatcagttttcttctgagagttgcaagtcacacaaggatcagcctgtttgcagtggtcgaggagtttgtgtttgtgggaaatgttcatgtcacaaaattaagcttggaaaagtgtatggaaaatactgtgaaaaggatgacttttcttgtccatatcaccatggaaatctgtgtgctgggcatggagagtgtgaagcaggcagatgccaatgcttcagtggctgggaaggtgatcgatgccagtgcccttcagcagcagcccagcactgtgtcaattcaaagggccaagtgtgcagtggaagaggcacgtgtgtgtgtggaaggtgtgagtgcaccgatcccaggagcatcggccgcttctgtgaacactgccccacctgttatacagcctgcaaggaaaactggaattgtatgcaatgccttcaccctcacaatttgtctcaggctatacttgatcagtgcaaaacctcatgtgctctcatggaacaacagcattatgtcgaccaaacttcagaatgtttctccagcccaagctacttgagaatatttttcatcattttcatagttacattcttgattgggttgcttaaagtcctgatcattagacaggtgatactacaatggaatagtaataaaattaagtcctcatcagattacagagtgtcagcctcaaaaaaggataagttgattctgcaaagtgtttgcacaagagcagtcacctaccgacgtgagaagcctgaagaaataaaaatggatatcagcaaattaaatgctcatgaaactttcaggtgcaacttctaaaaaaagatttttaaacacttaatgggaaactggaattgttaataattgctcctaaagattataattttaaaagtcacaggaggagacaaattgctcacggtcatgccagttgctggttgtacactcgaacgaagactgacaagtatcctcatcatgatgtgactcacatagctgctgactttttcagagaaaaatgtgtcttactactgtttgagactagtgtcgttgtagcactttactgtaatatataacttatttagatcagcatagaatgtagatcctctgaagagcactgattacactttacaggtacctgttatccctacgcttccc

SEQ ID NO: 10191 - DNA, 2054 bp, Homo sapiens
  source 1..2054: mol_type = unassigned DNA
ggcgggtgcttctagggcgctcccagagccgcctccccctgttgctggcatcccgagcttcctcccttgccagccaggacgctgccgacttgtctttgcccgctgctccgcagacggggctgcaaagctgcaactaatggtgttggcctccctgcccacctgtggaagcaactgcgctgattgatgcgccacagacttttttcccctcgacctcgccggcgtcccctcccacagatccagcatcacccagtgaatgtacattagggtggtttcccccccagcttcgggctttgtttgggtttgattgtgtttggctcttcgctaagctgatttatgcagcagaagccccaccggctggagagaaacaaaagctcttttctttgtcccggagcaggctgcggagcccttgcagagccctctctccagtcgccgccggggcccttggccgtcgaaggaggtgcttctcgcggagaccgcgggacccgccgtgccgagccgggagggccgcaggggccctgagatgccgagcggtgcccgggcccgcttacctgcaccgcttgctccgagccgcggggtccgcctgctaggcctgcggaaaacgtcctagcgacactcggcccgcgggccccgaggtgcgcccgggaggcgcgagcccgcgtccggaaggcagtcaggcggcgggcgcggggcgggctgttttgcattatgtgcggctcggccctggctttttttaccgctgcatttgtctgcctgcaaaacgaccggcgaggtcccgcctcgttcctctgggcagcctgggtgttttcacttgttcttggactgggccaaggtgaagacaatagatgtgcatcttcaaatgcagcatcctgtgccaggtgccttgcgctgggtccagaatgtggatggtgtgttcaagaggatttcatttcaggtggatcaagaagtgaacgttgtgatattgtttccaatttaataagcaaaggctgctcagttgattcaatagaatacccatctgtgcatgttataatacccactgaaaatgaaattaatacccaggtgacaccaggagaagtgtctatccagctgcgtccaggagccgaagctaattttatgctgaaagttcatcctctgaagaaatatcctgtggatctttattatcttgttgatgtctcagcatcaatgcacaataatatagaaaaattaaattccgttggaaacgatttatctagaaaaatggcatttttctcccgtgactttcgtcttggatttggctcatacgttgataaaacagtttcaccatacattagcatccaccccgaaaggattcataatcaatgcagtgactacaatttagactgcatgcctccccatggatacatccatgtgctgtctttgacagagaacatcactgagtttgagaaagcagttcatagacagaagatctctggaaacatagatacaccagaaggaggttttgacgccatgcttcaggcagctgtctgtgaaagtcatatcggatggcgaaaagaggctaaaagattgctgctggtgatgacagatcagacgtctcatctcgctcttgatagcaaattggcaggcatagtggtgcccaatgacggaaactgtcatctgaaaaacaacgtctatgtcaaatcgacaaccatggaacacccctcactaggccaactttcagagaaattaatagacaacaacattaatgtcatctttgcagttcaaggaaaacaatttcattggtataaggatcttctacccctcttgccaggcaccattgctggtgaaatagaatcaaaggctgcaaacctcaataatttggtagtggaagcctatcagaagctcatttcagaagtgaaagttcaggtggaaaaccaggtacaaggcatctattttaacattaccgccatctgtccagatgggtccagaaagccaggcatggaaggatgcagaaacgtgacgagcaatgatgaagtatgtgggtgtgcatttttcccttttaaaataaactaagttgtttggcgtactttcttacagaaaaa

SEQ ID NO: 10192 - DNA, 8751 bp, Homo sapiens
  source 1..8751: mol_type = unassigned DNA
cccagagccgcctccccctgttgctggcatcccgagcttcctcccttgccagccaggacgctgccgacttgtctttgcccgctgctccgcagacggggctgcaaagctgcaactaatggtgttggcctccctgcccacctgtggaagcaactgcgctgattgatgcgccacagacttttttcccctcgacctcgccggcgtcccctcccacagatccagcatcacccagtgaatgtacattagggtggtttcccccccagcttcgggctttgtttgggtttgattgtgtttggctcttcgctaagctgatttatgcagcagaagccccaccggctggagagaaacaaaagctcttttctttgtcccggagcaggctgcggagcccttgcagagccctctctccagtcgccgccggggcccttggccgtcgaaggaggtgcttctcgcggagaccgcgggacccgccgtgccgagccgggagggccgcaggggccctgagatgccgagcggtgcccgggcccgcttacctgcaccgcttgctccgagccgcggggtccgcctgctaggcctgcggaaaacgtcctagcgacactcggcccgcgggccccgaggtgcgcccgggaggcgcgagcccgcgtccggaaggcagtcaggcggcgggcgcggggcgggctgttttgcattatgtgcggctcggccctggctttttttaccgctgcatttgtctgcctgcaaaacgaccggcgaggtcccgcctcgttcctctgggcagcctgggtgttttcacttgttcttggactgggccaaggtgaagacaatagatgtgcatcttcaaatgcagcatcctgtgccaggtgccttgcgctgggtccagaatgtggatggtgtgttcaagaggatttcatttcaggtggatcaagaagtgaacgttgtgatattgtttccaatttaataagcaaaggctgctcagttgattcaatagaatacccatctgtgcatgttataatacccactgaaaatgaaattaatacccaggtgacaccaggagaagtgtctatccagctgcgtccaggagccgaagctaattttatgctgaaagttcatcctctgaagaaatatcctgtggatctttattatcttgttgatgtctcagcatcaatgcacaataatatagaaaaattaaattccgttggaaacgatttatctagaaaaatggcatttttctcccgtgactttcgtcttggatttggctcatacgttgataaaacagtttcaccatacattagcatccaccccgaaaggattcataatcaatgcagtgactacaatttagactgcatgcctccccatggatacatccatgtgctgtctttgacagagaacatcactgagtttgagaaagcagttcatagacagaagatctctggaaacatagatacaccagaaggaggttttgacgccatgcttcaggcagctgtctgtgaaagtcatatcggatggcgaaaagaggctaaaagattgctgctggtgatgacagatcagacgtctcatctcgctcttgatagcaaattggcaggcatagtggtgcccaatgacggaaactgtcatctgaaaaacaacgtctatgtcaaatcgacaaccatggaacacccctcactaggccaactttcagagaaattaatagacaacaacattaatgtcatctttgcagttcaaggaaaacaatttcattggtataaggatcttctacccctcttgccaggcaccattgctggtgaaatagaatcaaaggctgcaaacctcaataatttggtagtggaagcctatcagaagctcatttcagaagtgaaagttcaggtggaaaaccaggtacaaggcatctattttaacattaccgccatctgtccagatgggtccagaaagccaggcatggaaggatgcagaaacgtgacgagcaatgatgaagttcttttcaatgtaacagttacaatgaaaaaatgtgatgtcacaggaggaaaaaactatgcaataatcaaacctattggttttaatgaaaccgctaaaattcatatacacagaaactgcagctgtcagtgtgaggacaacagaggacctaaaggaaagtgtgtagatgaaacttttctagattccaagtgtttccagtgtgatgagaataaatgtcattttgatgaagatcagttttcttctgagagttgcaagtcacacaaggatcagcctgtttgcagtggtcgaggagtttgtgtttgtgggaaatgttcatgtcacaaaattaagcttggaaaagtgtatggaaaatactgtgaaaaggatgacttttcttgtccatatcaccatggaaatctgtgtgctgggcatggagagtgtgaagcaggcagatgccaatgcttcagtggctgggaaggtgatcgatgccagtgcccttcagcagcagcccagcactgtgtcaattcaaagggccaagtgtgcagtggaagaggcacgtgtgtgtgtggaaggtgtgagtgcaccgatcccaggagcatcggccgcttctgtgaacactgccccacctgttatacagcctgcaaggaaaactggaattgtatgcaatgccttcaccctcacaatttgtctcaggctatacttgatcagtgcaaaacctcatgtgctctcatggaacaacagcattatgtcgaccaaacttcagaatgtttctccagcccaagctacttgagaatatttttcatcattttcatagttacattcttgattgggttgcttaaagtcctgatcattagacaggtgatactacaatggaatagtaataaaattaagtcctcatcagattacagagtgtcagcctcaaaaaaggataagttgattctgcaaagtgtttgcacaagagcagtcacctaccgacgtgagaagcctgaagaaataaaaatggatatcagcaaattaaatgctcatgaaactttcaggtgcaacttctaaaaaaagatttttaaacacttaatgggaaactggaattgttaataattgctcctaaagattataattttaaaagtcacaggaggagacaaattgctcacggtcatgccagttgctggttgtacactcgaacgaagactgacaagtatcctcatcatgatgtgactcacatagctgctgactttttcagagaaaaatgtgtcttactactgtttgagactagtgtcgttgtagcactttactgtaatatataacttatttagatcagcatagaatgtagatcctctgaagagcactgattacactttacaggtacctgttatccctacgcttcccagagagaacaatgctgtgagagagtttagcattgtgtcactacaagggtacagtaatccctgcactggacatgtgaggaaaaaaataatctggcaagtatattctaaggttgccaaacacttcaacagttggtggttgaatagacaagaacagctagatgaataaatgattcgtgtttcactctttcaagaggtgaacagatacaaccttaatcttaaaagattattgctttttaaagtgtgtagttttatgcatgtgtgtttatggtttgcttatttttgcaagatggatactaattccagcattctctcctctttgcctttatgttttgttttcttttttacaggataagtttatgtatgtcacagatgactggattaattaagtgctaagttactactgccataaaaaactaataatacaatgtcactttatcagaatactagttttaaaagctgaatgttaataggggacactgtaaagtatcatcaaaacctgaatagcttcattgtgcacaagtgtggagttttgtatcctcttacctggtaaactgaagggattgtttggccatttcatttatcttatcattaattcacaagatagttagaaattctgcctcaagcaaagtaccacattttgaatgttttcttagattttgattgcaagtagatatcagcattttttaaatgaaaagctatattatcttctcccttcaaggcagcctaaggatgttctttcccagaatcactccaacccttcttgccagaattcataaaagtacaaaattggagaatagatgatatcttagaaataagctttttttttttttttttttttttttgagacggagtttcactcttgtcacccaggctgaagtgcaatggcgcaattagggttcactgcaacctctgcctcccgggttcaagcagttctcctgcctcagcctcctgagtagctgggattacaggcatccaccaccgtgcccagctaatttttgtatttttagtagagacggggttttgccatgttggacaggttgatctcaaactcctgacctcaggtgatctaccctcctcggcctcccagagtgttgggattacaggcatgagccaccatgccaggctgctaattctcctttttagtgagttagggaactgagcctcagaaaacttaaacgatttctcagaaaacactcaagtgataaagtggccacattggaaaggagtttttatcttctcattgtcaggccagtgttcattgcacaatatcatgctacctcttgaatctttaaaatattcaattggcaaatgtttttcaatgtgatttactcatgtcttaagtgtatgaggaaagttcaaagcaaaatagaaaggaataattcaaactgaattgtccataatcagcttccagtctttcatgctaatcagcttcttaagagactgaagtatggcatacctacaggggaattccttcgcaccatagcctgtatgaacagtgttccctggagttctccagtgctcagcttgagaccttgatacacgggccatgagccctgtcttccccaatggaaatttatttacacttaccttatccctatggacttagtctgattttattggctaggagtctaacagtcctgtgtggatatacagttttgcccatgacaacaaaggaatctatccgaaatatctttttttttataataaacttccaagatttgctgtcttccagcacttgagttaaagtactagatactgcattttgatgaagactaaccccatctcatattctaccctaaagagaactgaaaaacctataataagttgttctggagccaataaacacagcagctctgttagatgtcctctacagccaagcactttcaatgctaacttgaactgcatttccttcctcaaatgagagattgacataattcagtactgtgagtcacttgtataagaaacctttgatcactaaaaataatgtaaaaattgggtttagtagcctaatacacataacgttcttcttaaaaaggaaaatggatggatgcctgacaaccctccaaaagaaaaaagtgtaagatagccattaagatgatgacaatttttgaaatgaacattatgatatttatgaacaataaacaaatttccgtatggaatgaattatccaaaaagagtataacaaaatgaaatccttaaaaatccagagtttatattttttttataccctcacttgtttgcactaactttatagtggaccaaggctgttaccataggaagggacaaacttccttgtaggcaactcagtgttagacgatgattgtggttatgcttgcaaagtcttgtgcttatcttttttgtttttacttaaaaagctaatttttaaagattgtagggcttgtattttacttgaataattgatatcttcctgtgtaatgatttgtgagatgagaattaatatttgactagttagaattaattaaatggtaagggaacacagggtactcttaggttaaataatgtatgcaaatagagtctattttcaactaatatggccacaggagccttttgagattcattgatattaaacacaattaatgaaattttaaattgttaacagaattgagaacttgaacaacacttttagtactgcagcatttttgtgccctaaagtatgtaatgatttataaatgtgccatacatacactacaacataacatttgctttgttatgcattttatttctctggggacaccattgcactgcagtgcacacgtatttataaacatttgttatatttttggaaacttgctaatatttattaagtcatagacttttctggaggacttaaaaattcactaaaaatctgattatgtcttaaatgttcagtttatctttggtttattaaaataaaaaaaaaatctaagattaaacacagtagatatctctggaggcaattttccaaaactcaacattaaaatttgtggatgcatgagatgcaatccttcaaagaatgaatctgaaatatatttttaatatttacttaatatccactgaagatatctttatgcaagacaagagtcagccatcagacactgaaatatattatgatagattatgaagaattttctctgtagaattatattcttcctggaacctggtagagtagattagactcaaaggctttttcttccttttcttactcctgttttttccactcactcttcccaagagatttcctaaagcttcaagcttaataagcctaatagtgaaaaataactgaatttaatggtataatgaagttcttcatttccagacatctttaattgatcttaaagctcatttgagtctttgcccctgaacaaagacagacccattaaaatctaagaattctaaattttcacaactgtttgagcttcttttcattttgaaggatttggaatatatatgttttcataaaagtatcaagtgaaatatagttacatgggagctcaatcatgtgcagattgcattctgttatgttgactcaatatttaatttacaactatccttatttatattgacctcaagaactccattttatgcaatgcagaccactgagatatagctaacattctttcaaataattttccttttcttttataattcctctatagcaaatttttatgtataactgattatacatatccatatttatatttcattgattccaagacatcactttttcaatttaacatctctgaaattgtgacatttcttgcaactgttggcacttcagatgcagtgtttaaaattatgcttgaataaatattacactaatccaactttacctaaatgtttatgcatctaggcaaattttgttttcttataaagatttgagagcccatttatgacaaaatatgaaggcgaaatttaaggacaactgagtcacgcacaactcaacatggagcctaactgattatcagctcagatcccgcatatcttgagtttacaaaagctctttcaggtccccatttatactttacgtgagtgcgaatgatttcagcaaaccctaacttaactaacaagaatgggtaggtatgtctacgtttcattaacaaatttttattatttttattctattatatgagatccttttatattatcatctcacttttaaacaaaattaactggaaaaatattacatggaactgtcatagttaggttttgcagcatcttacatgtcttgtatcaatggcaggagaaaaatatgataaaaacaatcagtgctgtgaaaaacaactttcttctagagtcctcttactttttattcttctttatcatttgtgggtttttcccccttggctctgatcactttaacttcaagcttatgtaacgactgttataaaactgcatatttaaattatttgaattatatgaaataattgttcagctatctgggcagctgttaatgtaaacctgagagtaataacactactcttttatctacctggaatacttttctgcataaaatttatctttgtaagctaactctattaatcaggtttcttctagcctctgcaacctacttcagttagaattgtctaatactgctctattaatcaggtttctagcctctacaacctacttcagttaaaattgtctaatacagcaatatttaaaaaaaaaacactgcaattgtcaaggatggaaaatgtgtgatttgtgtaaacaatttttaccaactttacattttcctacagataaatgtgaaattttgataagaagtctacgcaatgacaagtatggtacataaattttattaagaatattgagtataaagtactttaattctaaattataagaaaatatacatttgcacatattaatatagaaattcattttgtgtatatttaacatagcttttaaactattttacattagctacttcattatggtttcttgaacttctgaaaaaaattagaaatgtattaaacttatcagtaacataaaaacttattttgtttcacctaacgaatactgcgtttgtaaaaataaatttaatatagaatatatttttaaattaaatatttgaatataaaatagctctaagaaagaagcaaattatcactgaacatatttcttattatttctggctttgaattatacgtaacttaaattgtcttaaatgatacagaatattggagaatatgatactttcacataatatactatgaacctgttcatataactctgattgactactaacttctgttttatgtatttattaaagagctgacactgtagtttgtggtgagatgtttatttttctaacagagcttataacagttaggacaaggcatttaattaatgcatcattctgtttagtagtaggtgttaatcaatatgaaattctctgttttaaaataaaaatgtaaaaatctaa

SEQ ID NO: 10193 - DNA, 1090 bp, Homo sapiens
  source 1..1090: mol_type = unassigned DNA
gtcttgggctggcacgaagagctgcccggccagagcatcccggccaggtgagtgtcagaagacaaattgaagtattcagctaaataagcaactgcaaaactgaatttattcctcttcaagaactactcttcttgtatgttgagtgaccatttggctgccaagagaaactgctttgcctaggaaataatatggactgaaaaatcagtttcaaacacaaatgaaaaatattccttatgtttggtcatcttctttccacatcaaatatacatgtaaagatgtatataagatataatctgaagataatcaaacagctattaactggatttctgcatttcgcctatccttcaaaaccagcctcaagtctacctttatgttgagagagtgtatctttaactcatggtgttctctttctcctttcacatttcctgtaaactcatcatgaattgccttgtttattgttttgatttctcattcaacaacaccagaatactctgtgtttagggtaaccttagacttcagttttcctgaggagtttcagtttacacgtcttgcaccggtacaattaacagtgcccctttcaggttaaaaagtgtctcagtgtagttcataaattatatagtcaccccatgtgtgcagcaatcagagctttttcaatgcaaagttgattatgatgggcataaatgaatcataataaaaagttctagtatgatcccatctgactgggcttcttgtgatggcccatttcaacaccatgggtgtcattagtggcttcacaatggttcttcttgtaaattccctcatgacctagagttttgatttatgccatcctagcccactttaagctctgactcatgctgggattgccctaaacagggcagggcagactaatggaatgcattgcattgtcctaacatttcttaacctgcccaaggttgaacatgcttgtttgtttttcttttgctctccaaaaatctttatgctagcgtaaaggcctgttgtaatcacataaattactcactatgtaacaggagaagttgaaatttgtccctgaaacataaagattatatataataaaagccttaaaaaccta

SEQ ID NO: 10194 - DNA, 5573 bp, Homo sapiens
  source 1..5573: mol_type = unassigned DNA
gtcattcatgaactagaaagtggttcatcagaacccgtgaagccaggcatgtcatagagaggacaacttcagagtttctgggtccgatcccatcactgcctgtgagccaaatgaccaaaagaattcactttattctagcatctccctttcctcgtctctataacctcaaatttggtgtctgcttccaggtttttctctgtcaagaatgtttcatggcttgttatttcctgaccccaaaccagtacttcattttagatttttactgcttcactaaggaaaatccttagagccctgaagtttgtgccaacttgctgtcaactgctgaatgctttagtgagggtagtttggaagagccttcaaaagatagtacagaagcccagttgtcagccacatgtaacatgttagccatagaacatcaggcttcagagggaccccttctccctgtcacacctttgactggaagaaaataatctggagagtcacagctctgggaatagctgtcagtcctgccatagaaggagggattttgagtattcggaggaatcagttgtctgatagaaagagctaagtcaaggagaaaggaggtggctgctggaggggagaaggaaaacctgtcactgttggcaacattcttcagatgggatcttagggaaaacggtcagaaactcacttgggtgctcatgttcccaaatattctatatagcgcagtgcagcctagtttatgtattgaaagagcaggctctgaagaaacactgagttggattcaaatcctagttccaccagtttctaatgttataaacttgcacatattacctaatcactttgaacctcagatttccatacctctaaaatggaaatacaaattgaacccgcctcacagtcttgtgaggatgaaatgaagcaatgtgggaagcactgggcacagaggcatggcttaagaaatgggatttaggactatatatagaactttgacaaggttctggaacaactcattcacggttaggaaactaggaggattgcctgcattaataacataacctcaggggaagcagccagttttaggactcagccactatccatgccattaacaggagctgtccactccctgcaggctgacctgacgtcattgagaggaagaatgtattatttaattttggaagatccctcaccctttaggtgcggatgtgactgatgccaatgattcctcaaccagcaaggctggaaggagaggcaagggagaggcaggctttttttttttttttctccccatgattaggttagataaatggtaacaacgtaaacctggcttgaataattttcaaggctaatcaaaagtaaaacgtctctagaaaatttagacaggatgtatccagtttgcttgcactattatgtagcatgttaatctgccattccatatactttgctttctctttccttctacactacataagtaattggaaaataattaggatagaaacagcatcatcaatattacctagtttaatgccccatgttcctttctaacatctatggaagacatgatatgtcttgaagaattcccttcctctcctacctgttgtgtctgatgcagagtgtcatgcgtagtgagagttcagagcgtaggctcggagcatagttatactttcacagcatatatgataggaaaagtttcactgtcaaagggaatatgatagaattctctcacttctgtgcaaattgctatgtttggaagtcaaaaagacccaggcgtgggtaggaaaaaaaaagttttcatatatatatatccccagaatactatattaaattgatgaaaataacaaccaataaaaagccaaccaggtcaggcgcagtggctcacacctgtaattctagcactttgggaggccgaggcaggcagatcacctaaggtcaggagtttgagaccagcctggccaacatggtaaaaccccatctctacaaaagatacaatagttagctgggcgtggtggtgtgtgcctgtagtcccagctactcgggaggctgaggcaagagaatttttagaacctgggagatggaggtggcagtgagccgagatcgtgccactgcactccagcctggatcaggagggagactctgtctccgacacagaaaaaaaaagccaaccagagaaacttcagtctgagcttttccttctcaaataggttttagatgcagaaagttggagtaggatttttgcttgtgtttttcttgtagaaatagtaaaaacataaggattagaagaaattaaaatgatataaaataccaaaaatgcaatatttgctatgtcattttctttggatgtaattgatatacactaaaaacatcagtgattttctttcttttaaacaggatttcatttcaggtggatcaagaagtgaacgttgtgatattgtttccaatttaataagcaaaggctgctcagttgattcaatagaatacccatctgtgcatgttataatacccactgaaaatgaaattaatacccaggtgacaccaggagaagtgtctatccagctgcgtccaggagccgaagctaattttatgctgaaagttcatcctctgaagaaatatcctgtggatctttattatcttgttgatgtctcagcatcaatgcacaataatatagaaaaattaaattccgttggaaacgatttatctagaaaaatggcatttttctcccgtgactttcgtcttggatttggctcatacgttgataaaacagtttcaccatacattagcatccaccccgaaaggattcataatcaatgcaggtatctagggtttgatgtggatatgctaaattaattttttgcttataaaatctcactttgtttttaatgtaaagaacttaccaaattttatatttttatcttataaaataagaataaaaatatttggtgaggtggggaggtttcttcatatctgaaaacttctgagatgaactgtagattgggctttttattttatatttctttaaatatttagtcagtttttatcaccaaaaaaaacaaaaaaacaaacaaaaaaccctacctaatgttagtaactttgaatgaagcttcaatagttaggctgccatgtatataaatacctctttggaaattctgtatttttattttttgattgctccaaaattgctgaattatgatttgacacattttaaagagtttgtgccaacacgtcatctatctctccattactgtactgtgactggggataatgatgttgtctccgatgtgactacaaagaaatctcagttatcacaaagaaagtgggtcaaaagatgagaatttgattgcttagaaagagccttttttcttatcattttagatttctgattctaaataacatatgtcccactatgaaagaagaattagccttaaaaatacaagtgtctcacacaatattgccattagcctgtggaattttcagaaaaataaatctgtatggatcttttttcacaaaagactttatctttcttgcttctacaaattgcttagattactttacaatacacattccaatttaccgaaacagctctgtcatctgttgtaccggaacaggattgatgcatccatcaatggagtttcataagccttcttgaggtgaatgtacaggaggaatcattcttactttctgggtatcatagattctcaaaataattttaatgaatattgattgttcatcaataattccaccaagcatcactttaaaaattagtgcagtattaaaaaaaactaatatcatatttcaactaaattcctcaaaagcattttccagaagtgtttctcagctgttcaatgataagaaatcactgcacattcttatattcaccttaaaaattcacagcgcagattaaatattgaaagcctttaactgtcctatattaaaaaacatgtttaatcatctttatttttttgaataccaaatgcttatagtcttatttcctatttgcaaagaaattgtcatcagcattgagcttatctctaattttataagcatagattttcgtcgtataaagtttccctggcacaaaagaagtactcccttttcacacaactgtacaattttactgttaagtattccagaatgcttaagaagagcaaaataaactttacacttcttcttttcccacacagtgactacaatttagactgcatgcctccccatggatacatccatgtgctgtctttgacagagaacatcactgagtttgagaaagcagttcatagacagaagatctctggaaacatagatacaccagaaggaggttttgacgccatgcttcaggcagctgtctgtgaagtaagacgtttcacatgatcgagtgtttgctaagatgccaaactttcaaagaatttagacgttttattttctctttgatttgtggagtgaaaacgtagtgtagaagaaaacatatcttactatctcttactcctcaccaaggtgattcatttcggtatgtgtttgggacagaggggctaaattcagggagggatttaaataggaaaagacaaaagggaaagaataggttatgaacgcgaaaattctttccaaaagggctgcttttctcatgcgccacactccaaggaggaactagaagtagactgttgccctcctcacttcagcttgttctcctactttttttttttttgagacggagtctcgctctgtcgcccaggctggagtgcagtggcgccatctcggctcactgcaagctccgcctcccgggttcacgccattctcctgcctcagcctcccgagcagctgggactacaggcgcccgccaccacacccggctagttttttgtatttttagtagagacggggtttcaccgtgttagccaggatggtctcgatttcctgacctcgtgatccgcccgcctcggcctcccaaggtgctgggattacaggcatgagccaccgtgcctggcctctcctactttttaatctatattgttcttcctccagtggaacactagaaatctctagccaggaactagtgtggtcacatggctgtgggaaaatagaggatgtacaaataaaagttaaagctatttacgcagcagcgttgtacccacgcacatcgttctagcctgacttactgttcgtcaactcaaacgtaatgtttacttgaggtaaaaaccacagtacacatctgtgttattgtacaaagtctaattacatgtttatttttaagagtcatatcggatggcgaaaagaggctaaaagattgctgctggtgatgacagatcagacgtctcatctcgctcttgatagcaaattggcaggcatagtggtgcccaatgacggaaactgtcatctgaaaaacaacgtctatgtcaaatcgacaaccatggtaatgcagcagtaaccgcttagtagatatgactcttttggttaaagtacaattttaaattggcaactcaactatttttgtaccaggaaattacctacaaaagaaagatacagaacaaggataagccatgagagagaatttatggaacagtgcaatctataaatactgatcaataaaatatatgaataaaacagtt

SEQ ID NO: 10195 - DNA, 568 bp, Homo sapiens
  source 1..568: mol_type = unassigned DNA
atataaggagcgtgggccaggcctgagtattcagcgatggcatttgcatggtggccctgtctcatcttggctctgctctccagcttggcagcctctggcttcccgagaagcccctttcggctgcttgggaaacggagcctcccggaaggggtaagaactttcaccagggggtgggaccgagtggggcagggcaggatggagctggttccccaactgctgaaggtgtaggctataacagctgactcctcacagctggcaaacagcttacggccctctgccctggcagcctccaacagcgcaggactcctgggaaagagcaccacagagtgacgacccctccaacctcgcaggatgtagcccaagagggcccctcacaggcatcccttccttccgcagacacttccttagcacttgctggtacctggctctgtgaagcggtccctgccacaccctcacgaagcatctttatatccctagggggagggggctggaacacctccctagagcctctcaaaattcaacacccctattggaaagagggtgtttggagacttcccttggcacagga

SEQ ID NO: 10196 - DNA, 2220 bp, Homo sapiens
  source 1..2220: mol_type = unassigned DNA
attcagcgatggcatttgcatggtggccctgtctcatcttggctctgctctccagcttggcagcctctggcttcccgagaagcccctttcggctgcttgggaaacggagcctcccggaaggggtggccaatggcatcgaggtctacagtaccaaaatcaactccaaggtgacctcccgttttgctcacaatgttgtcaccatgagagccgtcaaccgtgcagacacggccaaggaggtttcctttgatgtggagctgcccaagacggccttcatcaccaacttcaccttgaccatcgacggtgttacctaccctgggaatgtcaaggagaaggaagttgccaagaagcagtatgaaaaggctgtgtcccagggcaagacggccggcttggtcaaggcctctgggaggaagttggagaagttcacagtctcggtcaacgtggctgcaggcagcaaagtcaccttcgagctaacctacgaggagctgctgaagaggcacaagggcaagtacgagatgtacctcaaggtccagcctaagcaactggtcaaacactttgagatcgaggtagacatcttcgagcctcagggaatcagcatgctggatgctgaggcctctttcatcaccaacgacctcctgggaagcgccctcaccaagtccttctcagggaaaaagggccatgtgtccttcaagcccagcttagaccaacagcgttcatgcccaacctgtacagactccctcctcaatggagatttcactatcacctatgacgtgaacagagaatctcctggcaacgtgcagatagtcaatggctacttcgtgcacttctttgcacctcaaggccttccagtggtgcctaagaacgtggcctttgtgattgacatcagcggctccatggctggtcggaaattagagcagacaaaggaggcccttctcagaatcctggaagatatgcaagaggaagactatctgaatttcatcctgttcagtggagatgtgtccacatggaaagagcacttagtccaggccacgcccgagaacctccaggaggccaggacgtttgtgaagagcatggaggataaaggaatgaccaacatcaatgacgggctgctgaggggcatcagtatgctgaacaaggcccgagaggagcacagaatcccagagaggagcacctccattgtcatcatgctgactgatggggatgccaatgttggtgagagcagacccgaaaaaatccaagagaatgtgcggaatgccatcgggggcaagttccccttgtataacctgggctttggcaacaatctgaattataacttcctggagaacatggccctggagaaccatgggtttgcccggcgcatttatgaggactctgatgccgatttgcagttgcagggcttctatgaggaggtggccaacccactgctgacgggtgtggagatggagtaccccgagaacgctatcctggacctcacccagaacacttaccagcacttctacgatggctctgagatcgtggtggccgggcgcctggtggacgaggacatgaacagctttaaggcagatgtgaagggccatggggccaccaacgacctgaccttcacagaggaggtgacaacggagaagatcaccctgtggaacagggccgtgccgagcactttcagctggctggacacagtcacagtcacgcaggatgggctgtccatgatgatcaacaggaagaacatggtggtctcctttggagatggggttaccttcgtggtcgtcctacaccaggtgtggaagaaacatcctgtccaccgtgactttctaggcttctacgtggtggacagtcaccggatgtcagcacagacgcatgggctgctggggcaattcttccaaccctttgactttaaagtgtctgacatccggccaggctctgaccccacaaagccagatgccacattggtggtgaagaaccatcagctgattgtcaccaggggctcccagaaagactacagaaaggatgccagcatcggcacgaaggttgtctgctggttcgtccacaacaacggagaagggctgattgatggtgtccacactgactacattgtccccaacctgttttgagtagacacaccagctcctgttgggatggatggcccggattttatggcatctggaacatgggcacagagaggggcctgtgggaggggctgggaaaataaagtccaaggtcgagacc

SEQ ID NO: 10197 - DNA, 3007 bp, Homo sapiens
  source 1..3007: mol_type = unassigned DNA
tcagcgatggcatttgcatggtggccctgtctcatcttggctctgctctccagcttggcagcctctggcttcccgagaagcccctttcggctgcttgggaaacggagcctcccggaaggggtggccaatggcatcgaggtctacagtaccaaaatcaactccaaggtgacctcccgttttgctcacaatgttgtcaccatgagagccgtcaaccgtgcagacacggccaaggaggtttcctttgatgtggagctgcccaagacggccttcatcaccaacttcaccttgaccatcgacggtgttacctaccctgggaatgtcaaggagaaggaagttgccaagaagcagtatgaaaaggctgtgtcccagggcaagacggccggcttggtcaaggcctctgggaggaagttggagaagttcacagtctcggtcaacgtggctgcaggcagcaaagtcaccttcgagctaacctacgaggagctgctgaagaggcacaagggcaagtacgagatgtacctcaaggtccagcctaagcaactggtcaaacactttgagatcgaggtagacatcttcgagcctcagggaatcagcatgctggatgctgaggcctctttcatcaccaacgacctcctgggaagcgccctcaccaagtccttctcagggaaaaagggccatgtgtccttcaagcccagcttagaccaacagcgttcatgcccaacctgtacagactccctcctcaatggagatttcactatcacctatgacgtgaacagagaatctcctggcaacgtgcagatagtcaatggctacttcgtgcacttctttgcacctcaaggccttccagtggtgcctaagaacgtggcctttgtgattgacatcagcggctccatggctggtcggaaattagagcagacaaaggaggcccttctcagaatcctggaagatatgcaagaggaagactatctgaatttcatcctgttcagtggagatgtgtccacatggaaagagcacttagtccaggccacgcccgagaacctccaggaggccaggacgtttgtgaagagcatggaggataaaggaatgaccaacatcaatgacgggctgctgaggggcatcagtatgctgaacaaggcccgagaggagcacagaatcccagagaggagcacctccattgtcatcatgctgactgatggggatgccaatgttggtgagagcagacccgaaaaaatccaagagaatgtgcggaatgccatcgggggcaagttccccttgtataacctgggctttggcaacaatctgaattataacttcctggagaacatggccctggagaaccatgggtttgcccggcgcatttatgaggactctgatgccgatttgcagttgcagggcttctatgaggaggtggccaacccactgctgacgggtgtggagatggagtaccccgagaacgctatcctggacctcacccagaacacttaccagcacttctacgatggctctgagatcgtggtggccgggcgcctggtggacgaggacatgaacagctttaaggcagatgtgaagggccatggggccaccaacgacctgaccttcacagaggaggtggacatgaaggagatggagaaggccctgcaggagcgggactacatcttcgggaattacattgagcggctctgggcctacctcaccattgagcagctgctggagaagcgcaagaacgcccatggcgaggagaaggagaacctcacggcccgggccctggacctgtccctcaagtatcactttgtgactccactgacctcaatggtggtgaccaagcctgaggacaacgaggatgagagggccattgccgacaagcctggggaagatgcagaagccacaccggtgagccccgccatgtcctacctgaccagctaccagcctcctcaaaacccctactactatgtggacggggatccccacttcatcatccaaattccggagaaagacgatgccctctgcttcaacatcgatgaagccccaggcacagtgctgcgccttattcaggatgcagtcacaggcctcacagttaatgggcagatcactggcgacaagagaggcagccctgactccaagaccagaaagacttactttggaaaactgggcatcgccaatgctcagatggacttccaggtggaggtgacaacggagaagatcaccctgtggaacagggccgtgccgagcactttcagctggctggacacagtcacagtcacgcaggatgggctgtccatgatgatcaacaggaagaacatggtggtctcctttggagatggggttaccttcgtggtcgtcctacaccaggtgtggaagaaacatcctgtccaccgtgactttctaggcttctacgtggtggacagtcaccggatgtcagcacagacgcatgggctgctggggcaattcttccaaccctttgactttaaagtgtctgacatccggccaggctctgaccccacaaagccagatgccacattggtggtgaagaaccatcagctgattgtcaccaggggctcccagaaagactacagaaaggatgccagcatcggcacgaaggttgtctgctggttcgtccacaacaacggagaagggctgattgatggtgtccacactgactacattgtccccaacctgttttgagtagacacaccagctcctgttgggatggatggcccggattttatggcatctggaacatgggcacagagaggggcctgtgggaggggctgggaaaataaagtccaaggtcgagaccagacagctgccagcctctacatgccttcatgagcctctgctccagggaacaggcaactgggacccacagcagctcaaaagaggggatggctagcaggaaggcaacttcttgggcctctccactgacacagctgagagacagagttggttggactagaactttagggattcaaatgtatgacagcttgggggaaaaaataaagaactgactctg

SEQ ID NO: 10198 - DNA, 824 bp, Homo sapiens
  source 1..824: mol_type = unassigned DNA
ttccttttaatgggaagctaccccttccctaagtagcttctcagtgctgagctccaaggtagcctgggctaatgggtgtgtgaggccaagaaaaagggagctggaagctgaatcagccaaggcctgtgcccagccaggagccctgatctccaaggggaaaagcggtgctcagaaaggccggagcgtgggccatgtgtccttcaagcccagcttagaccaacagcgttcatgcccaacctgtacagactccctcctcaatggagatttcactatcacctatgacgtgaacagagaatctcctggcaacgtgcagatagtcaatggctacttcgtgcacttctttgcacctcaaggccttccagtggtgcctaagaacgtggcctttgtgattgacatcagcggctccatggctggtcggaaattagagcagacaaaggaggcccttctcagaatcctggaagatatgcaagaggaagactatctgaatttcatcctgttcagtggagatgtgtccacatggaaagagcacttagtccaggccacgcccgagaacctccaggaggccaggacgtttgtgaagagcatggaggataaaggaatgaccaacatcaatgacgggctgctgaggggcatcagtatgctgaacaaggcccgagaggagcacagaatcccagagaggagcacctccattgtcatcatgctgactgatggggatgccaatgttggtgagagcagacccgaaaaaatccaagagaatgtgcggaatgccatcgggggcaagttccccttgtataacctgggctttggcaacaatctgaattata

SEQ ID NO: 10199 - DNA, 529 bp, Homo sapiens
  source 1..529: mol_type = unassigned DNA
agtgctgagctccaaggtagcctgggctaatgggtgtgtgaggccaagaaaaagggagctggaagctgaatcagccaaggcctgtgcccagccaggagccctgatctccaaggggaaaagcggtgctcagaaaggccggagcgtggtaaacagtgccttccaggccatgtgtccttcaagcccagcttagaccaacagcgttcatgcccaacctgtacagactccctcctcaatggagatttcactatcacctatgacgtgaacagagaatctcctggcaacgtgcagatagtcaatggctacttcgtgcacttctttgcacctcaaggccttccagtggtgcctaagaacgtggcctttgtgattgacatcagcggctccatggctggtcggaaattagagcagacaaaggaggcccttctcagaatcctggaagatatgcaagaggaagactatctgaatttcatcctgttcagtggagatgtgtccacatggaaagagcacttagtccaggccacgcccgagaacc

SEQ ID NO: 10200 - DNA, 543 bp, Homo sapiens
  source 1..543: mol_type = unassigned DNA
attcattgtttgctgagtaccaccatgggctggcagatagggtccttgggcacatgagtggggccggctgtcccggcctcctccgctccagcctgtctgcacactggcaccctgaggacaccctcccacggtgctgtctgtctgtgtcccagtgaccaacatcaatgacgggctgctgaggggcatcagtatgctgaacaaggcccgagaggagcacagaatcccagagaggagcacctccattgtcatcatgctgactgatggggatgccaatgttggtgagagcagacccgaaaaaatccaagagaatgtgcggaatgccatcgggggcaagttccccttgtataacctgggctttggcaacaatctgaattataacttcctggagaacatggccctggagaaccatgggtttgcccggcgcatttatgaggactctgatgccgatttgcagttgcagggcttctatgaggaggtggccaacccactgctgacgggtgtggagatggagtaccccgagaacgctatcctggacctcaccca

SEQ ID NO: 10201 - DNA, 456 bp, Homo sapiens
  source 1..456: mol_type = unassigned DNA
gtcagggacaggcagagtgaacattaggagccattaggacgggcccagccctggggcatggatgcccagctgcagcatcagtgggagcctgacctggggcttgagatgactggccccgtgcgaacttcagggcttctatgaggaggtggccaacccactgctgacgggtgtggagatggagtaccccgagaacgctatcctggacctcacccagaacacttaccagcacttctacgatggctctgagatcgtggtggccgggcgcctggtggacgaggacatgaacagctttaaggcagatgtgaagggccatggggccaccaacgacctgaccttcacagaggaggtggacatgaaggagatggagaaggccctgcaggagcgggactacatcttcgggaattacattgagcggctctgggcctacctcaccattgagcagctgctggagaagcg

SEQ ID NO: 10202 - DNA, 558 bp, Homo sapiens
  source 1..558: mol_type = unassigned DNA
gatgtgaagggccatggggccaccaacgacctgaccttcacagaggaggtggacatgaaggagatggagaaggccctgcaggagcgggactacatcttcgggaattacattgagcggctctgggcctacctcaccattgagcagctgctggagaagcgcaagaacgcccatggcgaggagaaggagaacctcacggcccgggccctggacctgtccctcaagtatcactttgtgactccactgacctcaatggtggtgaccaagcctgaggacaacgaggatgagagggccattgccgacaagcctggggaaggtggggatagggatggaggccggaacccggaggcctcctgtgctgggcaccctacctgggtgtccagtggaggagtgggccaggctggggagacccagacctgctgaagtagggcatctgaaggaaaactggccacgggatggggaaagtggggtggagcgtgaagcagtcagcatggacagtggggtgtggggtgaataggagcctctgcacctctaaagggaagtgagtaaagggggcacact

SEQ ID NO: 10203 - DNA, 920 bp, Homo sapiens
  source 1..920: mol_type = unassigned DNA
ggggaaggtggggatagggatggaggccggaacccggaggcctcctgtgctgggcaccctacctgggtgtccagtggaggagtgggccaggctggggagacccagacctgctgaagtagggcatctgaaggaaaactggccacgggatggggaaagtggggtggagcgtgaagcagtcagcatggacagtggggtgtggggtgaataggagcctctgcacctctaaagggaagtgagtaaagggggcacactgcccatggggcatttcaaggaaaaggactgaggctgcagcatggaagggcttagttagacaagaagaagcacttccaacatgaaaggcctggagcaggctatcaggcacctggagattgttaggggaagagtccctgagagctggaggctgggaccccctcaaccagaccccagattgccctactcaacagggggtcccaaatgcccactgcaactaggtacagggtctgtgtgtggtggtggaggattggcattgggagacatgggaggcaaagagctgggcctggccaggccaggcctctggcttccaagaactcctagttccaggggacacccagtgggggaagagctggctgctgggaggcccacagcctagggctggtcggccaagcagccagctctggtccctgctcacaagtgccctatggcttctaatgcatttctcttcttcctcccttgctgcacctgcagatgcagaagccagctaccagcctcctcaaaacccctactactatgtggacggggatccccacttcatcatccaaattccggagaaagacgatgccctctgcttcaacatcgatgaagccccaggcacagtgctgcgccttattcaggatgcagtcacaggcctcacagttaatgggcagatcactggcgacaagaga

SEQ ID NO: 10204 - DNA, 2179 bp, Homo sapiens
  source 1..2179: mol_type = unassigned DNA
aagcaagataggacccccagccatgggggcacacttgggacacctgggctcaggcccagccctattgccaaatcatgaacgtgcccctctctgagcctgaggatccctgtgagttaattgggggtggcttcccttgcccagggagacacaatcagtatgacagtatctatgacctgcaaaaatgagcaatttagcatgtcagtcatttatacttcattagtcccatagcaaccctccaagagggcccttttatgatccccattttacaatggggaaattgaggcacggggggttaatttgctcagtctgtttgctcacagactcagcagatggccaagctggtacttaggccaaggcagtctggccccaatgcccatgctgggaattgctggggatcacagtcctctgtgcctctctcaccacaaaactggaacctcacaaactccctgccactaggcagggcctccccagcccctactggcctgccccacctccatttggactggcacatttggactgggccatcacattcccctcagaacagccctgataaatgtaccggtgcatgtgagtacatatatgcatgtgcacgcatatgtgtgcgcctgtgtgcacgtgtgggtgggtgtttactatcaagaagcaacagacagccgtgagcctcactcaccccaactagggggtgggaagcccaggggtggggcagatgtttgctgtgagcattactcaagagagagaagatgacttaatggcttgcatttcagccacatcaaaaagccctgcgccaacgttaaaatcacatcccattgccaccagccccataaagggcttccctggacgtgcccgatttccaaagcctaatctttgtagtcacatctccacctctatctgccagtgttggggcccctctggggcccagcagcgctaagacaggaggaaggcacggggctgggggagaaggaacccctagaccctgctcaccactgcccttcggcttttcagccacaccggtgagccccgccatgtcctacctgagtgagtacatgctggcagctgccactcctcccactgcttagagcctgcccctgccacatgtccctccaccgtggctactcactcagctctccgggatgggcagatggacaatgtgccctgaggagattgcggggtgggagggcaatggcattagcgagcgggaaggggaggggaggggcataagctgaactcctatgggggtcgtcgggcgcctcccagggccacttgcttagctcagccctctctccctttgtatctgcagccagctaccagcctcctcaaaacccctactactatgtggacggggatccccacttcatcatccaaattccggagaaagacgatgccctctgcttcaacatcgatgaagccccaggcacagtgctgcgccttattcaggatgcagtcacaggcctcacagttaatgggcagatcactggcgacaagagaggcagccctgactccaagaccagaaagacttactttggaaaactgggcatcgccaatgctcagatggacttccaggtggaggtgacaacggagaagatcaccctgtggaacagggccgtgccgagcactttcagctggctggacacagtcacagtcacgcaggatgggctgtccatgatgatcaacaggaagaacatggtggtctcctttggagatggggttaccttcgtggtcgtcctacaccaggtgtggaagaaacatcctgtccaccgtgactttctaggcttctacgtggtggacagtcaccggatgtcagcacagacgcatgggctgctggggcaattcttccaaccctttgactttaaagtgtctgacatccggccaggctctgaccccacaaagccagatgccacattggtggtgaagaaccatcagctgattgtcaccaggggctcccagaaagactacagaaaggatgccagcatcggcacgaaggttgtctgctggttcgtccacaacaacggagaagggctgattgatggtgtccacactgactacattgtccccaacctgttttgagtagacacaccagctcctgttgggatggatggcccggattttatggcatctggaacatgggcacagagaggggcctgtgggaggggctgggaaaataaagtccaaggtcgagacc

SEQ ID NO: 10205 - DNA, 3038 bp, Homo sapiens
  source 1..3038: mol_type = unassigned DNA
atataaggagcgtgggccaggcctgagtattcagcgatggcatttgcatggtggccctgtctcatcttggctctgctctccagcttggcagcctctggcttcccgagaagcccctttcggctgcttgggaaacggagcctcccggaaggggtggccaatggcatcgaggtctacagtaccaaaatcaactccaaggtgacctcccgttttgctcacaatgttgtcaccatgagagccgtcaaccgtgcagacacggccaaggaggtttcctttgatgtggagctgcccaagacggccttcatcaccaacttcaccttgaccatcgacggtgttacctaccctgggaatgtcaaggagaaggaagttgccaagaagcagtatgaaaaggctgtgtcccagggcaagacggccggcttggtcaaggcctctgggaggaagttggagaagttcacagtctcggtcaacgtggctgcaggcagcaaagtcaccttcgagctaacctacgaggagctgctgaagaggcacaagggcaagtacgagatgtacctcaaggtccagcctaagcaactggtcaaacactttgagatcgaggtagacatcttcgagcctcagggaatcagcatgctggatgctgaggcctctttcatcaccaacgacctcctgggaagcgccctcaccaagtccttctcagggaaaaagggccatgtgtccttcaagcccagcttagaccaacagcgttcatgcccaacctgtacagactccctcctcaatggagatttcactatcacctatgacgtgaacagagaatctcctggcaacgtgcagatagtcaatggctacttcgtgcacttctttgcacctcaaggccttccagtggtgcctaagaacgtggcctttgtgattgacatcagcggctccatggctggtcggaaattagagcagacaaaggaggcccttctcagaatcctggaagatatgcaagaggaagactatctgaatttcatcctgttcagtggagatgtgtccacatggaaagagcacttagtccaggccacgcccgagaacctccaggaggccaggacgtttgtgaagagcatggaggataaaggaatgaccaacatcaatgacgggctgctgaggggcatcagtatgctgaacaaggcccgagaggagcacagaatcccagagaggagcacctccattgtcatcatgctgactgatggggatgccaatgttggtgagagcagacccgaaaaaatccaagagaatgtgcggaatgccatcgggggcaagttccccttgtataacctgggctttggcaacaatctgaattataacttcctggagaacatggccctggagaaccatgggtttgcccggcgcatttatgaggactctgatgccgatttgcagttgcagggcttctatgaggaggtggccaacccactgctgacgggtgtggagatggagtaccccgagaacgctatcctggacctcacccagaacacttaccagcacttctacgatggctctgagatcgtggtggccgggcgcctggtggacgaggacatgaacagctttaaggcagatgtgaagggccatggggccaccaacgacctgaccttcacagaggaggtggacatgaaggagatggagaaggccctgcaggagcgggactacatcttcgggaattacattgagcggctctgggcctacctcaccattgagcagctgctggagaagcgcaagaacgcccatggcgaggagaaggagaacctcacggcccgggccctggacctgtccctcaagtatcactttgtgactccactgacctcaatggtggtgaccaagcctgaggacaacgaggatgagagggccattgccgacaagcctggggaaggtggggatagccacaccggtgagccccgccatgtcctacctgaccagctaccagcctcctcaaaacccctactactatgtggacggggatccccacttcatcatccaaattccggagaaagacgatgccctctgcttcaacatcgatgaagccccaggcacagtgctgcgccttattcaggatgcagtcacaggcctcacagttaatgggcagatcactggcgacaagagaggcagccctgactccaagaccagaaagacttactttggaaaactgggcatcgccaatgctcagatggacttccaggtggaggtgacaacggagaagatcaccctgtggaacagggccgtgccgagcactttcagctggctggacacagtcacagtcacgcaggatgggctgtccatgatgatcaacaggaagaacatggtggtctcctttggagatggggttaccttcgtggtcgtcctacaccaggtgtggaagaaacatcctgtccaccgtgactttctaggcttctacgtggtggacagtcaccggatgtcagcacagacgcatgggctgctggggcaattcttccaaccctttgactttaaagtgtctgacatccggccaggctctgaccccacaaagccagatgccacattggtggtgaagaaccatcagctgattgtcaccaggggctcccagaaagactacagaaaggatgccagcatcggcacgaaggttgtctgctggttcgtccacaacaacggagaagggctgattgatggtgtccacactgactacattgtccccaacctgttttgagtagacacaccagctcctgttgggatggatggcccggattttatggcatctggaacatgggcacagagaggggcctgtgggaggggctgggaaaataaagtccaaggtcgagaccagacagctgccagcctctacatgccttcatgagcctctgctccagggaacaggcaactgggacccacagcagctcaaaagaggggatggctagcaggaaggcaacttcttgggcctctccactgacacagctgagagacagagttggttggactagaactttagggattcaaatgtatgacagcttgggggaaaaaataaagaactgactctg

SEQ ID NO: 10206 - DNA, 1641 bp, Homo sapiens
  source 1..1641: mol_type = unassigned DNA
ataagtatcccagacctcggcttgcagtagtgttagactgaagataaagtaagtgctgtttgggctaacaggatctcctcttgcagtctgcagcccaggacgctgattccagcagcgccttaccgcgcagcccgaagattcactatggtgaaaatcgccttcaatacccctaccgccgtgcaaaaggaggaggcgcggcaagacgtggaggccctcctgagccgcacggtcagaactcagatactgaccggcaaggagctccgagttgccacccaggaaaaagagggctcctctgggagatgtatgcttactctcttaggcctttcattcatcttggcaggacttattgttggtggagcctgcatttacaagtacttcatgcccaagagcaccatttaccgtggagagatgtgcttttttgattctgaggatcctgcaaattcccttcgtggaggagagcctaacttcctgcctgtgactgaggaggctgacattcgtgaggatgacaacattgcaatcattgatgtgcctgtccccagtttctctgatagtgaccctgcagcaattattcatgactttgaaaagggaatgactgcttacctggacttgttgctggggaactgctatctgatgcccctcaatacttctattgttatgcctccaaaaaatctggtagagctctttggcaaactggcgagtggcagatatctgcctcaaacttatgtggttcgagaagacctagttgctgtggaggaaattcgtgatgttagtaaccttggcatctttatttaccaactttgcaataacagaaagtccttccgccttcgtcgcagagacctcttgctgggtttcaacaaacgtgccattgataaatgctggaagattagacacttccccaacgaatttattgttgagaccaagatctgtcaagagtaagaggcaacagatagagtgtccttggtaataagaagtcagagatttacaatatgactttaacattaaggtttatgggatactcaagatatttactcatgcatttactctattgcttatgctttaaaaaaaggaaaaaaaaaaactactaaccactgcaagctcttgtcaaattttagtttaattggcattgcttgttttttgaaactgaaattacatgagtttcattttttctttgaatttatagggtttagatttctgaaagcagcatgaatatatcacctaacatcctgacaataaattccatccgttgttttttttgtttgtttgttttttcttttcctttaagtaagctctttattcatcttatggtggagcaattttaaaatttgaaatattttaaattgtttttgaactttttgtgtaaaatatatcagatctcaacattgttggtttcttttgtttttcattttgtacaactttcttgaatttagaaattacatctttgcagttctgttaggtgctctgtaattaacctgacttatatgtgaacaattttcatgagacagtcatttttaactaatgcagtgattctttctcactactatctgtattgtggaatgcacaaaattgtgtaggtgctgaatgctgtaaggagtttaggttgtatgaattctacaaccctataataaattttactctatacaa

SEQ ID NO: 10207 - DNA, 879 bp, Homo sapiens
  source 1..879: mol_type = unassigned DNA
gtcactctgcattcccgcgtgtcgtgccatgttctgtctgttccagctcacaccagctgtcctggagggaggagctccgagttgccacccaggaaaaagagggctcctctgggagatgtatgcttactctcttaggcctttcattcatcttggcaggacttattgttggtggagcctgcatttacaagtacttcatgcccaagagcaccatttaccgtggagagatgtgcttttttgattctgaggatcctgcaaattcccttcgtggaggagagcctaacttcctgcctgtgactgaggaggctgacattcgtgaggatgacaacattgcaatcattgatgtgcctgtccccagtttctctgatagtgaccctgcagcaattattcatgactttgaaaagggaatgactgcttacctggacttgttgctggggaactgctatctgatgcccctcaatacttctattgttatgcctccaaaaaatctggtagagctctttggcaaactggcgagtggcagatatctgcctcaaacttatgtggttcgagaagacctagttgctgtggaggaaattcgtgatgttagtaaccttggcatctttatttaccaactttgcaataacagaaagtccttccgccttcgtcgcagagacctcttgctgggtttcaacaaacgtgccattgataaatgctggaagattagacacttccccaacgaatttattgttgagaccaagatctgtcaagagtaagaggcaacagatagagtgtccttggtaataagaagtcagagatttacaatatgactttaacattaaggtttatgggatactcaagatatttactcatgcatttactctattgcttatgctttaaaaa

SEQ ID NO: 10208 - DNA, 523 bp, Homo sapiens
  source 1..523: mol_type = unassigned DNA
agataaagtaagtgctgtttgggctaacaggatctcctcttgcagtctgcagcccaggacgctgattccagcagcgccttaccgcgcagcccgaagattcactatggtgaaaatcgccttcaatacccctaccgccgtgcaaaaggaggaggcgcggcaagacgtggaggccctcctgagccgcacggtcagaactcagatactgaccggcaagagcaccatttaccgtggagagatgtgcttttttgattctgaggatcctgcaaattcccttcgtggaggagagcctaacttcctgcctgtgactgaggaggctgacattcgtgaggatgacaacattgcaatcattgatgtgcctgtccccagtttctctgatagtgaccctgcagcaattattcatgactttgaaaagggaatgactgcttacctggacttgttgctggggaactgctatctgatgcccctcaatacttctattgttatgcctccaaaaaatctggtagagctctttggcaaactggcg

SEQ ID NO: 10209 - DNA, 190 bp, Homo sapiens
  source 1..190: mol_type = unassigned DNA
aggagctccgagttgccacccaggaaaaagagggctcctctgggagatgtatgcttactctcttaggcctttcattcatcttggcaggacttattgttggtggagcctgcatttacaagtacttcatgcccaaggttgtaattttccctttttgtcttttagagcaccatttaccgtggagagatgtgct

SEQ ID NO: 10210 - DNA, 291 bp, Homo sapiens
  source 1..291: mol_type = unassigned DNA
tcatagtcaggggctattgtggcctggacagaggcagaaagacacgacacagcaggcttccttcctgtcttgctcttatctgaagttgcagagagtgggtgggagtatgcctgaggtgcagtctgcagcccaggacgctgattccagcagcgccttaccgcgcagcccgaagattcactatggtgaaaatcgccttcaatacccctaccgccgtgcaaaaggaggaggcgcggcaagacgtggaggccctcctgagccgcacggtcagaactcagatactgaccggcaagg

SEQ ID NO: 10211 - DNA, 1698 bp, Homo sapiens
  source 1..1698: mol_type = unassigned DNA
gtgcaggtgaggcacgtttagcctgagccggccacggactccacttcccctgctcttcccccagtggcaaatccgcgccacctcgcaaacccccaactcaggcacttgggccccttttgggccccctctcgctcctccctttaggcacctccctgggcccgcccacggtctccccccagtttgggactgcgtcataagtatcccagacctcggcttgcagtagtgttagactgaagataaagtaagtgctgtttgggctaacaggatctcctcttgcagtctgcagcccaggacgctgattccagcagcgccttaccgcgcagcccgaagattcactatggtgaaaatcgccttcaatacccctaccgccgtgcaaaaggaggaggcgcggcaagacgtggaggccctcctgagccgcacggtcagaactcagatactgaccggcaagagcaccatttaccgtggagagatgtgcttttttgattctgaggatcctgcaaattcccttcgtggaggagagcctaacttcctgcctgtgactgaggaggctgacattcgtgaggatgacaacattgcaatcattgatgtgcctgtccccagtttctctgatagtgaccctgcagcaattattcatgactttgaaaagggaatgactgcttacctggacttgttgctggggaactgctatctgatgcccctcaatacttctattgttatgcctccaaaaaatctggtagagctctttggcaaactggcgagtggcagatatctgcctcaaacttatgtggttcgagaagacctagttgctgtggaggaaattcgtgatgttagtaaccttggcatctttatttaccaactttgcaataacagaaagtccttccgccttcgtcgcagagacctcttgctgggtttcaacaaacgtgccattgataaatgctggaagattagacacttccccaacgaatttattgttgagaccaagatctgtcaagagtaagaggcaacagatagagtgtccttggtaataagaagtcagagatttacaatatgactttaacattaaggtttatgggatactcaagatatttactcatgcatttactctattgcttatgctttaaaaaaaggaaaaaaaaaaactactaaccactgcaagctcttgtcaaattttagtttaattggcattgcttgttttttgaaactgaaattacatgagtttcattttttctttgaatttatagggtttagatttctgaaagcagcatgaatatatcacctaacatcctgacaataaattccatccgttgttttttttgtttgtttgttttttcttttcctttaagtaagctctttattcatcttatggtggagcaattttaaaatttgaaatattttaaattgtttttgaactttttgtgtaaaatatatcagatctcaacattgttggtttcttttgtttttcattttgtacaactttcttgaatttagaaattacatctttgcagttctgttaggtgctctgtaattaacctgacttatatgtgaacaattttcatgagacagtcatttttaactaatgcagtgattctttctcactactatctgtattgtggaatgcacaaaattgtgtaggtgctgaatgctgtaaggagtttaggttgtatgaattctacaaccctataataaattttactctat

SEQ ID NO: 10212 - DNA, 852 bp, Homo sapiens
  source 1..852: mol_type = unassigned DNA
ggggccttcaactctgctcaggagctcgggccggagaaaggccccgagacttgaagcccttgcccgggagggatgaacacgcaaaggaacccgaggaacgggcagccgcgccgcctttccacctcgtcggtctcctccactggctcctcgtcgctgctcgaggactcggaggacgacctgctgagcgacagtgagagccggagccgcggcaacgtgcagctggaagcgggcgaggacgtgggtcagaaaaaccactggcagaagatccggaccatggtcaatctgccggtcataagccctttcaagaagcgctacgcctgggtgcagctggcagggcacactgggagttttaaggcggcgggcaccagcgggctgatcctgaagcgctgctcggagccggagcgctactgcctggcgcggctgatggctgacgcgctgcgcggctgcgtgcctgccttccacggcgtggtggagcgcgacggcgaaagctacctgcagctgcaggacctgctcgatggcttcgacggaccttgtgtgctcgactgcaaaatgggcgtcaggacttacctagaggaggagctgaccaaggcccgtgagcggcccaagctgcggaaggacatgtacaagaaaatgctggcggtggatcctgaagctcccacggaggaggagcacgcgcagcgcgccgtcaccaagccgcgctacatgcagtggcgggaaggcatcagctccagcaccaccctcggcttccgcatcgagggcatcaagaaagcggacggctcctgcagcaccgacttcaagactacgcgaagccgagagcaggtgcttcgcgtctttgaagagtttgtgcaagga

SEQ ID NO: 10213 - DNA, 1824 bp, Homo sapiens
  source 1..1824: mol_type = unassigned DNA
gtccccggcgcgccgcgggctggtgggctcagcggcggcgccggcactgggaaatgaccctgcccgggggcccaacgggcatggcgcggccggggggcgcgaggccctgcagcccggggctggagcgggccccgcgccggagtgtcggggagctgcgcctgctcttcgaggcgcgctgtgcggcggtcgctgcggccgccgccgcgggggagccccgggcccgcggggccaagcggcgtgggggacaggtccccaacgggcttccgcgggctcccccggccccggtgatccctcagctgaccgtgacagccgaggagcccgacgtgcccccgaccagccctgggccgccggagcgggagagggactgcctcccggcagcgggctcttcgcacctgcagcagccgcgccgcctttccacctcgtcggtctcctccactggctcctcgtcgctgctcgaggactcggaggacgacctgctgagcgacagtgagagccggagccgcggcaacgtgcagctggaagcgggcgaggacgtgggtcagaaaaaccactggcagaagatccggaccatggtcaatctgccggtcataagccctttcaagaagcgctacgcctgggtgcagctggcagggcacactgggagttttaaggcggcgggcaccagcgggctgatcctgaagcgctgctcggagccggagcgctactgcctggcgcggctgatggctgacgcgctgcgcggctgcgtgcctgccttccacggcgtggtggagcgcgacggcgaaagctacctgcagctgcaggacctgctcgatggcttcgacggaccttgtgtgctcgactgcaaaatgggcgtcaggacttacctagaggaggagctgaccaaggcccgtgagcggcccaagctgcggaaggacatgtacaagaaaatgctggcggtggatcctgaagctcccacggaggaggagcacgcgcagcgcgccgtcaccaagccgcgctacatgcagtggcgggaaggcatcagctccagcaccaccctcggcttccgcatcgagggcatcaagaaagcggacggctcctgcagcaccgacttcaagactacgcgaagccgagagcaggtgcttcgcgtctttgaagagtttgtgcaaggagatgaggaagtgctgaggcggtatctgaaccgcctgcagcagatccgggacaccctggaggtatccgagttcttcaggaggcacgaggtgatcggcagctcgctcctctttgtgcacgatcactgccatcgcgccggcgtgtggctcatcgacttcggcaagaccacgcccctccccgatggccagatcctggaccaccggcggccctgggaggagggcaaccgcgaggacggctatttgctggggctggacaatctcattggcatcctggccagcctggctgagagatgaggctggactcctgtccccgcgggccgctcacctgacatgtggacctgcagctttgtccccactgtgcatgccggcttgagactggagccccgcggtgcagggcagttcaccgggtcctgcaggaccaggtgccagccactaagggggggcaccgccgatgccaggggttttgcccacccgggccccagcgttcccagagccaaatgacactaacttatagaaggggagggggcaaagggcttcttcctcaggccagctcttctgaggaggctctgccctctccagaggtgccagaccgcggattttatttagcaagcccagaccttccggtctaacgtctcacaccacgacggactccccttcctaataaaactcaaagacaaga

SEQ ID NO: 10214 - DNA, 854 bp, Homo sapiens
  source 1..854: mol_type = unassigned DNA
agaccttgaccctgtcgctttcagaaaaaccactggcagaagatccggaccatggtcaatctgccggtcataagccctttcaagaagcgctacgcctgggtgcagctggcagggcacactgggagttttaaggcggcgggcaccagcgggctgatcctgaagcgctgctcggagccggagcgctactgcctggcgcggctgatggctgacgcgctgcgcggctgcgtgcctgccttccacggcgtggtggagcgcgacggcgaaagctacctgcagctgcaggacctgctcgatggcttcgacggaccttgtgtgctcgactgcaaaatgggcgtcaggacttacctagaggaggagctgaccaaggcccgtgagcggcccaagctgcggaaggacatgtacaagaaaatgctggcggtggatcctgaagctcccacggaggaggagcacgcgcagcgcgccgtcaccaagccgcgctacatgcagtggcgggaaggcatcagctccagcaccaccctcggcttccgcatcgagggcatcaagaaagcggacggctcctgcagcaccgacttcaagactacgcgaagccgagagcaggtgcttcgcgtctttgaagagtttgtgcaaggagatgaggaagtgctgaggcggtatctgaaccgcctgcagcagatccgggacaccctggaggtatccgagttcttcaggaggcacgaggtgatcggcagctcgctcctctttgtgcacgatcactgccatcgcgccggcgtgtggctcatcgacttcggcaagaccacgcccctccccgatggccagatcctggaccaccggcggccctgggaggagggcaaccg

SEQ ID NO: 10215 - DNA, 507 bp, Homo sapiens
  source 1..507: mol_type = unassigned DNA
aggacctgctcgatggcttcgacggaccttgtgtgctcgactgcaaaatgggcgtcaggacttacctagaggaggagctgaccaaggcccgtgagcggcccaagctgcggaaggacatgtacaagaaaatgctggcggtggatcctgaagctcccacggaggaggagcacgcgcagcgcgccgtcaccaagccgcgctacatgcagtggcgggaaggcatcagctccagcaccaccctcggcttccgcatcgagggcatcaagaaagcggacggctcctgcagcaccgacttcaagactacgcgaagccgagagcaggtgcttcgcgtctttgaagagtttgtgcaaggagatgaggaagtgctggtgagagcgggatcccaaaccctgaggtgttggggagcctgaagccgaggactgcccctgtcatctggcccagtgccctcggctgtgtccccaccatggccctcaccgcgctggctcgcaactgctctacgctccttccctt

SEQ ID NO: 10216 - DNA, 5822 bp, Homo sapiens
  source 1..5822: mol_type = unassigned DNA
atggctgtgtactgctatgcgctcaatagcctggtgatcatgaatagcgccaacgagatgaagagcggcggcggcccggggcccagtggcagcgagacgcccccgcccccgaggagggcagtgctgagccccggcagcgttttcagccccgggagaggcgcctctttcctcttccccccagccgagtcgctgtcccccgaggagccccggagccccgggggctggcggagcggccggcgcaggctgaatagtagcagcggcagtggcagcggcagcagcggcagtagcgtgagcagcccaagttgggctggtcgcctgcgaggggaccggcagcaggtggtggcagccggtaccctctccccgccagggccggaggaggccaagaggaagctgcggatcttgcagcgcgagttgcagaacgtgcaggtgaaccagaaagtgggcatgtttgaggcgcacatccaggcacagagctccgccattcaagcgccccgcagcccgcgtttgggcagggctcgctcgccctccccgtgccccttccgcagcagcagtcagccccctggaagggtcctggttcagggcgcccggagcgaggaacggaggacaaagtcctggggggagcaatgtccagagacttcaggaaccgactccgggaggaaaggagggcccagcctatgctcctcgcaggtgaagaaaggaatgccacctcttcccggccgggctgcccctacaggatcagaggctcagggtccatccgcttttgtaaggatggagaagggtatccctgccagtccccgctgtggctcacccacagctatggaaattgacaaaaggggctctcctaccccgggaactcggagctgcctagctccctcattggggctgttcggagctagcttaacgatggccacggaagtggcagcgagagttacatccactgggccacaccgtccacaggatcttgccctcactgagccgtctgggagagcccgtgagcttgaggacctgcagcccccagaggccctggtggagaggcaggggcagtttctgggcagtgagacaagcccagccccagaaaggggcgggccccgcgatggagaaccccctgggaagatggggaaaggatatctgccctgtggcatgccgggctctggggagcctgaagtgggcaaaaggccagaggagacgactgtgagcgtgcaaagcgcagagtcctctgattccctgagctggtccaggctgcccagggccctggcctccgtaggccctgaggaggcccgaagtggggcccccgtgggcggggggcgttggcagctctccgacagagtggagggagggtccccaacgctgggcttgcttgggggcagcccctcagcacagccggggaccgggaatgtggaggcgggaattccttctggcagaatgctggagcctttgccctgttgggacgctgcgaaagatctgaaagaacctcagtgccctcctggggacagggtgggtgtgcagcctgggaactccagggtttggcagggcaccatggagaaagccggtttggcttggacgcgtggcacaggggtgcaatcagaggggacttgggaaagccagcggcaggacagtgatgccctcccaagtccggagctgctaccccaagatccggacaagcctttcctgaggaaggcctgcagccccagcaacatacctgctgtcatcattacagacatgggcacccaggaggatggggccttggaggagacgcagggaagccctcggggcaacctgcccctgaggaaactgtcctcttcctcggcctcctccacgggcttctcctcatcctacgaagactcagaggaggacatctccagtgaccctgagcgcaccctggaccccaactcagccttcctgcataccctggaccagcagaaacctagagtgagcaaatcatggaggaagataaaaaacatggtgcactggtctcccttcgtcatgtccttcaagaagaagtacccctggatccagctggcaggacacgcagggagtttcaaggcagctgccaatggcaggatcctgaagaagcactgtgagtcagagcagcgctgcctggaccggctgatggtggatgtgctgaggcccttcgtacctgcctaccatggggatgtggtgaaggacggggagcgctacaaccagatggacgacctgctggccgacttcgactcgccctgtgtgatggactgcaagatgggaatcaggacctacctggaggaggagctcacgaaggcccggaagaagcccagcctgcggaaggacatgtaccagaagatgatcgaggtggaccccgaggcccccaccgaggaggaaaaagcacagcgggctgtgaccaagccacggtacatgcagtggcgggagaccatcagctccacggccaccctggggttcaggatcgagggaatcaagaaagaagacggcaccgtgaaccgggacttcaagaagaccaaaacgagggagcaggtcaccgaggccttcagagagttcactaaaggaaaccataacatcctgatcgcctatcgggaccggctgaaggccattcgaaccactctagaagtttctcccttcttcaagtgccacgaggtcattggcagctccctcctcttcatccacgacaagaaggaacaggccaaagtgtggatgatcgactttgggaaaaccacgcccctgcctgagggccagaccctgcagcatgacgtcccctggcaggaggggaaccgggaggatggctacctctcggggctcaataacctcgtcgacatcctgaccgagatgtcccaggatgccccactcgcctgagctgcccacgccctccctggcccccgcctgggcctcctttcctcctcctgtgcttcctttctcgttcctaacttttccttcacttacacctgactgaccctcctgaactgcactacaagacactttgtagaagaggagatgagagtttctagtcattttcctaacttcagggcttggaggtggtgtttgcactgctttttgtagagagggtcacctactagaagagaaatgcccagtcttagaggtgggtcaggtgtagagctggagggggtccctggctgctgaggggaccctaccagatgagccctgcctctgggagccccctaggaagcaccagcctggacctaccacctgcggaggcctgctgccccctggcggccagtgctgttagagtgctgccaagcacagccttatttctgccggggcctccccaccggagagcccagggggccggccgggttcctggtccctggctgggagcagggctttctggtagttggggcacaaaaccatcggggaaccacatgttgactgtgagcaaagtgtcttccgattagcagcctcagggatgccctggtggcctctccagggctgctcaggcaaggccccccacccatctggtatggaaacctgccggctccaggccagacccaggagccaagagaaggctgaagccagcttggctgtgttctctgatctaggccttcccagaggaggcgagcagaagctgtgccacttggaattgcaacccatgagttcagaaggcacactctgccatgctgagctccaagggtgctaccaggggaagatgggatctatagagtctctgggccctggccccagggaggagcacatttttcttgaccctcacctacctggtgctagttggtcaaccctgcctgcatacatgggctcctgtcatggggcccagagtcccttgcagatatagaaataggggaggagctcaggtctgcgccaggcaggaagaaggcaggcttctggcttccagaggtgccgcggtggcctcctggcatcatttgttattgcctctgaaacaagccttactgcctggagggcttagattcctgcttctccaatgtagtgtgggtatcttgtagggtatgtggtggatgccagggcgtgctccaggcacctcttcctgaagtctctgcatttggagattcgtggagaacctatttaagcccaattttaactgaaagccagtgagtctgatatggaagggaatgtaaaatttgcctgacttcttaagaacaaaacccccagctctgtgccccatgctccttggggcttgccacccactcctttgctgtcagaggtacaggagctgggagagtccaggagctagggacacagagggagactatggaccaaggtgtgtgtgtctggaggaaccactgcccaccccaccaccccggggtctctggggaactgtcaacctgcccacgggacatgtacatttccccttttgtgctggaagtgtgagtgacacttgctgggggtggagggtgggacacatgaggatgtataagtacagattttaaaaaaggaaatcaacttacacttcctggctcttgtttaaaacagtggtgagctcctgtgtgggccgacttgctaaaggtcacacacgcgcccggtggagcacgagagacctcgtggcagcatgtgatctggaaggcaggcaggacgggggcgttggggagccaaagtcaactctgggcctctggagctatagtgacttttgggctagaagggaccctggtggtctgtgcttcagccatttgcagggcaggggcatcattaattcagacgtaaagattctatgaatatggactggccaaaagttatccttactccatctgtgaaagaagtttgctaaagcaaatcatgatatgaacaaaaattacaggggacctgtttaagagaacaaaatgttccaagcactttaggcagacaccagctgtttgcaaacaatgtgctaatatgcaaatgatgtgcttattaaaggaggcccatggggcctcttattggcaatacttggctgtgggttacattaaatatgtgaacatagtatgaagtagcatcattttagggttattctgttacttagggtttttgttttctgttttttttttctctttttttgtatttaccgtgctagttctcttctacacctactctgtctctcaagccattttgccactcgcttccctgccatctggcccttccctttgtctcagtgggatagatggattgtgaaatggaatctcccagaacccctgccctggcagcctggaagaccgtgcctgcccagccctcgtcaccacagggactccttgggtcctggcagtgcatgtgccagcaggcaggacaaactctgtgtacctgtgcccaggtgaatgggcgcagggtcctcttgccctgtcctgcggggggccccacgagttcctggcattcagcactgcttagcattctcggaaggtttcttcaactgcttgcttttcccaggcttgcctttagtgtcatgtaagacatttttaagttatatttattttgttgggttttaaaattgcacagaacactaagaccgaaaggctggactcttgtttctccttgaaagctttgcctttgttttgaacttcctttcccacttggtagaaagagcccagaagcagccctggccctgtaagatggactctttcatccttcagttgtatttagctttgagtttctctgcatctgtccaccccatgtgtatataacccagcccctggctctggggtggtcacctcgtcagtgccttttgttctggaggagaggaccccccccgcctgccgagaggctctcttcctgttctgcacccctctccccatgggaccttggagaaaactgaactgttacaaacccctgcacagtgcctgtcaaacagatgcaaaccttcctgaataaagccttggagacca

SEQ ID NO: 10217 - DNA, 3146 bp, Homo sapiens
  source 1..3146: mol_type = unassigned DNA
attgaacaaacactgaagtagcccggagcagacactgacaggggcagtatctccacggtcgaaaagggcgtgcagggccggcttggcgtcgccactgccgggatcgccgggcccctgaaccgaagagctttcccccctctttcgcactcctcttttttgtcttccatagcttgtgagaaaataatttctgagcatttttacttttaaagccatctcgtccctacgaggtttgcgcctctgggcatgtagtctacacaggacctgagaatctgagaaactgcagccgcacggttgtttatggagctttgggcgggggctgagcccgcggtcgtgcccccagcccgctgcccaggccatgccgccccatctgcgcgcggagccgcggctgccgggcctccggggctgagccgggagcgccgggaggaggaggcgccggcggcggagcaggagcgggagccgcggcggcgggcagcgcgggacccagtactatggctgtgtactgctatgcgctcaatagcctggtgatcatgaatagcgccaacgagatgaagagcggcggcggcccggggcccagtggcagcgagacgcccccgcccccgaggagggcagtgctgagccccggcagcgttttcagccccgggagaggcgcctctttcctcttccccccagccgagtcgctgtcccccgaggagccccggagccccgggggctggcggagcggccggcgcaggctgaatagtagcagcggcagtggcagcggcagcagcggcagtagcgtgagcagcccaagttgggctggtcgcctgcgaggggaccggcagcaggtggtggcagccggtaccctctccccgccagggccggaggaggccaagaggaagctgcggatcttgcagcgcgagttgcagaacgtgcaggtgaaccagaaagtgggcatgtttgaggcgcacatccaggcacagagctccgccattcaagcgccccgcagcccgcgtttgggcagggctcgctcgccctccccgtgccccttccgcagcagcagtcagccccctggaagggtcctggttcagggcgcccggagcgaggaacggaggacaaagtcctggggggagcaatgtccagagacttcaggaaccgactccgggaggaaaggagggcccagcctatgctcctcgcaggtgaagaaaggaatgccacctcttcccggccgggctgcccctacaggatcagaggctcagggtccatccgcttttgtaaggatggagaagggtatccctgccagtccccgctgtggctcacccacagctatggaaattgacaaaaggggctctcctaccccgggaactcggagctgcctagctccctcattggggctgttcggagctagcttaacgatggccacggaagtggcagcgagagttacatccactgggccacaccgtccacaggatcttgccctcactgagccgtctgggagagcccgtgagcttgaggacctgcagcccccagaggccctggtggagaggcaggggcagtttctgggcagtgagacaagcccagccccagaaaggggcgggccccgcgatggagaaccccctgggaagatggggaaaggatatctgccctgtggcatgccgggctctggggagcctgaagtgggcaaaaggccagaggagacgactgtgagcgtgcaaagcgcagagtcctctgattccctgagctggtccaggctgcccagggccctggcctccgtaggccctgaggaggcccgaagtggggcccccgtgggcggggggcgttggcagctctccgacagagtggagggagggtccccaacgctgggcttgcttgggggcagcccctcagcacagccggggaccgggaatgtggaggcgggaattccttctggcagaatgctggagcctttgccctgttgggacgctgcgaaagatctgaaagaacctcagtgccctcctggggacagggtgggtgtgcagcctgggaactccagggtttggcagggcaccatggagaaagccggtttggcttggacgcgtggcacaggggtgcaatcagaggggacttgggaaagccagcggcaggacagtgatgccctcccaagtccggagctgctaccccaagatccggacaagcctttcctgaggaaggcctgcagccccagcaacatacctgctgtcatcattacagacatgggcacccaggaggatggggccttggaggagacgcagggaagccctcggggcaacctgcccctgaggaaactgtcctcttcctcggcctcctccacgggcttctcctcatcctacgaagactcagaggaggacatctccagtgaccctgagcgcaccctggaccccaactcagccttcctgcataccctggaccagcagaaacctagagtgtgacttcttgggaagtgttcccctcagtggtactgctggggcaacgtccaataccaagaatgatgtatagcatatttcatcttcctacactactctctggaaagactgagccaattacggggtcatctgtaaagtctaagtgctgcagtttccctacgaccattggattttgtttgtagtttgatattgtcttactgtcccttgaagttgtaatttgtaattctttagttttcaagagggactctacatgtttccttgtgatgatggccttgagttactcatgtgtacactgcctatttatccccattgagcccccactgcccgaacatgttgatggcattttatatagtaagctgtcagttacttaatgtacaaatattcttccattccatgtttttctcttaaaattttactttattggccaggcgcagtggctcacatctgtaatcccagcactttaggaggccaaggcgggcggatcacctgaggtcaagagattgagaccagcctggccaacatggtgaaaccccgtctctactaaaaaatacaaaaattagccaggtgtagtggtgggcacctgtaatcccagctacttgggaggctgaggcaggagaattgcttgaacctgagaggcggaggttgcggtgagccgagatagcaccactgcactccagcctgggcgaaagagctaaactccatctcaaaaataaataaataaataaaaaa

SEQ ID NO: 10218 - DNA, 6162 bp, Homo sapiens
  source 1..6162: mol_type = unassigned DNA
cctcttttttgtcttccatagcttgtgagaaaataatttctgagcatttttacttttaaagccatctcgtccctacgaggtttgcgcctctgggcatgtagtctacacaggacctgagaatctgagaaactgcagccgcacggttgtttatggagctttgggcgggggctgagcccgcggtcgtgcccccagcccgctgcccaggccatgccgccccatctgcgcgcggagccgcggctgccgggcctccggggctgagccgggagcgccgggaggaggaggcgccggcggcggagcaggagcgggagccgcggcggcgggcagcgcgggacccagtactatggctgtgtactgctatgcgctcaatagcctggtgatcatgaatagcgccaacgagatgaagagcggcggcggcccggggcccagtggcagcgagacgcccccgcccccgaggagggcagtgctgagccccggcagcgttttcagccccgggagaggcgcctctttcctcttccccccagccgagtcgctgtcccccgaggagccccggagccccgggggctggcggagcggccggcgcaggctgaatagtagcagcggcagtggcagcggcagcagcggcagtagcgtgagcagcccaagttgggctggtcgcctgcgaggggaccggcagcaggtggtggcagccggtaccctctccccgccagggccggaggaggccaagaggaagctgcggatcttgcagcgcgagttgcagaacgtgcaggtgaaccagaaagtgggcatgtttgaggcgcacatccaggcacagagctccgccattcaagcgccccgcagcccgcgtttgggcagggctcgctcgccctccccgtgccccttccgcagcagcagtcagccccctggaagggtcctggttcagggcgcccggagcgaggaacggaggacaaagtcctggggggagcaatgtccagagacttcaggaaccgactccgggaggaaaggagggcccagcctatgctcctcgcaggtgaagaaaggaatgccacctcttcccggccgggctgcccctacaggatcagaggctcagggtccatccgcttttgtaaggatggagaagggtatccctgccagtccccgctgtggctcacccacagctatggaaattgacaaaaggggctctcctaccccgggaactcggagctgcctagctccctcattggggctgttcggagctagcttaacgatggccacggaagtggcagcgagagttacatccactgggccacaccgtccacaggatcttgccctcactgagccgtctgggagagcccgtgagcttgaggacctgcagcccccagaggccctggtggagaggcaggggcagtttctgggcagtgagacaagcccagccccagaaaggggcgggccccgcgatggagaaccccctgggaagatggggaaaggatatctgccctgtggcatgccgggctctggggagcctgaagtgggcaaaaggccagaggagacgactgtgagcgtgcaaagcgcagagtcctctgattccctgagctggtccaggctgcccagggccctggcctccgtaggccctgaggaggcccgaagtggggcccccgtgggcggggggcgttggcagctctccgacagagtggagggagggtccccaacgctgggcttgcttgggggcagcccctcagcacagccggggaccgggaatgtggaggcgggaattccttctggcagaatgctggagcctttgccctgttgggacgctgcgaaagatctgaaagaacctcagtgccctcctggggacagggtgggtgtgcagcctgggaactccagggtttggcagggcaccatggagaaagccggtttggcttggacgcgtggcacaggggtgcaatcagaggggacttgggaaagccagcggcaggacagtgatgccctcccaagtccggagctgctaccccaagatccggacaagcctttcctgaggaaggcctgcagccccagcaacatacctgctgtcatcattacagacatgggcacccaggaggatggggccttggaggagacgcagggaagccctcggggcaacctgcccctgaggaaactgtcctcttcctcggcctcctccacgggcttctcctcatcctacgaagactcagaggaggacatctccagtgaccctgagcgcaccctggaccccaactcagccttcctgcataccctggaccagcagaaacctagagtgagcaaatcatggaggaagataaaaaacatggtgcactggtctcccttcgtcatgtccttcaagaagaagtacccctggatccagctggcaggacacgcagggagtttcaaggcagctgccaatggcaggatcctgaagaagcactgtgagtcagagcagcgctgcctggaccggctgatggtggatgtgctgaggcccttcgtacctgcctaccatggggatgtggtgaaggacggggagcgctacaaccagatggacgacctgctggccgacttcgactcgccctgtgtgatggactgcaagatgggaatcaggacctacctggaggaggagctcacgaaggcccggaagaagcccagcctgcggaaggacatgtaccagaagatgatcgaggtggaccccgaggcccccaccgaggaggaaaaagcacagcgggctgtgaccaagccacggtacatgcagtggcgggagaccatcagctccacggccaccctggggttcaggatcgagggaatcaagaaagaagacggcaccgtgaaccgggacttcaagaagaccaaaacgagggagcaggtcaccgaggccttcagagagttcactaaaggaaaccataacatcctgatcgcctatcgggaccggctgaaggccattcgaaccactctagaagtttctcccttcttcaagtgccacgaggtcattggcagctccctcctcttcatccacgacaagaaggaacaggccaaagtgtggatgatcgactttgggaaaaccacgcccctgcctgagggccagaccctgcagcatgacgtcccctggcaggaggggaaccgggaggatggctacctctcggggctcaataacctcgtcgacatcctgaccgagatgtcccaggatgccccactcgcctgagctgcccacgccctccctggcccccgcctgggcctcctttcctcctcctgtgcttcctttctcgttcctaacttttccttcacttacacctgactgaccctcctgaactgcactacaagacactttgtagaagaggagatgagagtttctagtcattttcctaacttcagggcttggaggtggtgtttgcactgctttttgtagagagggtcacctactagaagagaaatgcccagtcttagaggtgggtcaggtgtagagctggagggggtccctggctgctgaggggaccctaccagatgagccctgcctctgggagccccctaggaagcaccagcctggacctaccacctgcggaggcctgctgccccctggcggccagtgctgttagagtgctgccaagcacagccttatttctgccggggcctccccaccggagagcccagggggccggccgggttcctggtccctggctgggagcagggctttctggtagttggggcacaaaaccatcggggaaccacatgttgactgtgagcaaagtgtcttccgattagcagcctcagggatgccctggtggcctctccagggctgctcaggcaaggccccccacccatctggtatggaaacctgccggctccaggccagacccaggagccaagagaaggctgaagccagcttggctgtgttctctgatctaggccttcccagaggaggcgagcagaagctgtgccacttggaattgcaacccatgagttcagaaggcacactctgccatgctgagctccaagggtgctaccaggggaagatgggatctatagagtctctgggccctggccccagggaggagcacatttttcttgaccctcacctacctggtgctagttggtcaaccctgcctgcatacatgggctcctgtcatggggcccagagtcccttgcagatatagaaataggggaggagctcaggtctgcgccaggcaggaagaaggcaggcttctggcttccagaggtgccgcggtggcctcctggcatcatttgttattgcctctgaaacaagccttactgcctggagggcttagattcctgcttctccaatgtagtgtgggtatcttgtagggtatgtggtggatgccagggcgtgctccaggcacctcttcctgaagtctctgcatttggagattcgtggagaacctatttaagcccaattttaactgaaagccagtgagtctgatatggaagggaatgtaaaatttgcctgacttcttaagaacaaaacccccagctctgtgccccatgctccttggggcttgccacccactcctttgctgtcagaggtacaggagctgggagagtccaggagctagggacacagagggagactatggaccaaggtgtgtgtgtctggaggaaccactgcccaccccaccaccccggggtctctggggaactgtcaacctgcccacgggacatgtacatttccccttttgtgctggaagtgtgagtgacacttgctgggggtggagggtgggacacatgaggatgtataagtacagattttaaaaaaggaaatcaacttacacttcctggctcttgtttaaaacagtggtgagctcctgtgtgggccgacttgctaaaggtcacacacgcgcccggtggagcacgagagacctcgtggcagcatgtgatctggaaggcaggcaggacgggggcgttggggagccaaagtcaactctgggcctctggagctatagtgacttttgggctagaagggaccctggtggtctgtgcttcagccatttgcagggcaggggcatcattaattcagacgtaaagattctatgaatatggactggccaaaagttatccttactccatctgtgaaagaagtttgctaaagcaaatcatgatatgaacaaaaattacaggggacctgtttaagagaacaaaatgttccaagcactttaggcagacaccagctgtttgcaaacaatgtgctaatatgcaaatgatgtgcttattaaaggaggcccatggggcctcttattggcaatacttggctgtgggttacattaaatatgtgaacatagtatgaagtagcatcattttagggttattctgttacttagggtttttgttttctgttttttttttctctttttttgtatttaccgtgctagttctcttctacacctactctgtctctcaagccattttgccactcgcttccctgccatctggcccttccctttgtctcagtgggatagatggattgtgaaatggaatctcccagaacccctgccctggcagcctggaagaccgtgcctgcccagccctcgtcaccacagggactccttgggtcctggcagtgcatgtgccagcaggcaggacaaactctgtgtacctgtgcccaggtgaatgggcgcagggtcctcttgccctgtcctgcggggggccccacgagttcctggcattcagcactgcttagcattctcggaaggtttcttcaactgcttgcttttcccaggcttgcctttagtgtcatgtaagacatttttaagttatatttattttgttgggttttaaaattgcacagaacactaagaccgaaaggctggactcttgtttctccttgaaagctttgcctttgttttgaacttcctttcccacttggtagaaagagcccagaagcagccctggccctgtaagatggactctttcatccttcagttgtatttagctttgagtttctctgcatctgtccaccccatgtgtatataacccagcccctggctctggggtggtcacctcgtcagtgccttttgttctggaggagaggaccccccccgcctgccgagaggctctcttcctgttctgcacccctctccccatgggaccttggagaaaactgaactgttacaaacccctgcacagtgcctgtcaaacagatgcaaaccttcctgaataaagccttggagacca

SEQ ID NO: 10219 - DNA, 2008 bp, Homo sapiens
  source 1..2008: mol_type = unassigned DNA
gtcgctttaaggcggaggcccgggagggggccgacccggctcgccagctccacgctcggctccagactccggcatttcctccccgctagctggcgcggcctcgcctccccctcggaagaggaaactcccggggtccgagtaacagggtcaggcgcggagaggagcggcgggagagccaggagggccgcccaggctatgtcctcctgcgctgtcgccacgctgtccggcagcgcttcctgcccgggtctccccgtctggagggtcacgccgccttctcctcgagacacttccgagagccgggcctcagcatcctgctggagagttactacgagcatgaggtgcgcctgtctccgcacgtgttgggccacagcaaggcgcacgtgagccggatcgtgggcgagctggtgcgggctggccgcgcccgggggtcccccggtctcattcctgggggagcgctggccttggccttccgcggagacttcatccaggtgggcagcgcctacgagcaacataaaatccgccggcccgacagcttcgacgtgctggtgccactgcgcctcccgccgcttgtggcgctggagccacggagcctgggcgaggagccagcgctggccccggccttccgcggctgcttcttgtgcgccctcaaggcaccaccctcaccatcgggggcctcggggggccactggcttcgggactgcaaaccctttgctgatgccttctgcgtggatgtgcgcgggcggcgtcacctctctgctactctggtgctgcgctggttccagtcgcatctgcagcgctccttggccactgtgcgttacagcctggaggggcgctgtcgggtcaccttgaccccaggtggcctggaacagccccccaccttacacatcttgccctgccgcactgactacggctgctgccgcctttctatggctgtgcgtctcatccccgctgtccatctgggagatggggtcttccttgtggcgccaccaccgccacccttgcccagcgcgcccctgttggagctccctgagggcctgcgtgcggaggcactgtggggtgtgaacacagcacgccaggagcagaagctgctgagttggctgcaggaacgggcagctccaggtgcctgctacctcaagtgcctgcagttgcttaaggctctgcgcgatctgggggcccgtgggctggactcagcggccgccacccagtggggacgcatcctatcctcatatgtgctcaagacagtgctgctggcagtgctgctgcgcaagggggcccctgggcaaggctgggacgaggagcacctgggaaggtgtttggaggagttggtgcagttccttagggactgcctgctgcgacgccatacgctcttccactgcgtcctgggccctggtggggcggctgccgaggtgggtcccctgcccaaggcactgagggaagccgccccagttgacctcctggccgctttcgacgggcacgcccgggaacttgcagcagcgcggttgctgtccacgtggcaaaggctgccccagcttctccgggcctacgggggtccccgctaccttgccaggtgccccccaccccggagtcagcgcacccagggcttccttgaaggtgaaccgtaaaccctgacagcacccccacctgaccaaatgctcctaaagcctttcccactgggtgggggtgggaatggcggtgaagccagttaaatgcaagattgcagaaggcattggaaaatttggtggctgccacaagctttagtggcttaaatatcaccttctcgcttcacagtccagtataatatgacatcttcacacccactagagtgtcctgggcaaaccatgggaagacatccaacaggagacccaagaattggttcaaatattgttctgtgtagacggattctgtagaaggatgtggcttttagagaagtccagtagaagaagcaagaactagctgcagggaaagttccttctgtcggtttttagacacagatctctctgcccaaatt

SEQ ID NO: 10220 - DNA, 7247 bp, Homo sapiens
  source 1..7247: mol_type = unassigned DNA
ctgtgcgcatgctgggcttgggtcgccgccggggcttgccccctgggctgctcggccaccgccgccccgggcgcccggcatgtcggtgcactacaccctcaatctacgcgtcttctggcccctggtgaccggcctgtgcaccgccctggtgtgcctctaccatgtcctgcggggaagcgggggcgcccgggccgagcccgccgacggcgtggatggcggcttcccgttgcttaaggtggccgtcctgctcctcctcagctatgtcctcctgcgctgtcgccacgctgtccggcagcgcttcctgcccgggtctccccgtctggagggtcacgccgccttctcctcgagacacttccgagagccgggcctcagcatcctgctggagagttactacgagcatgaggtgcgcctgtctccgcacgtgttgggccacagcaaggcgcacgtgagccggatcgtgggcgagctggtgcgggctggccgcgcccgggggtcccccggtctcattcctgggggagcgctggccttggccttccgcggagacttcatccaggtgggcagcgcctacgagcaacataaaatccgccggcccgacagcttcgacgtgctggtgccactgcgcctcccgccgcttgtggcgctggagccacggagcctgggcgaggagccagcgctggccccggccttccgcggctgcttcttgtgcgccctcaaggcaccaccctcaccatcgggggcctcggggggccactggcttcgggactgcaaaccctttgctgatgccttctgcgtggatgtgcgcgggcggcgtcacctctctgctactctggtgctgcgctggttccagtcgcatctgcagcgctccttggccactgtgcgttacagcctggaggggcgctgtcgggtcaccttgaccccaggtggcctggaacagccccccaccttacacatcttgccctgccgcactgactacggctgctgccgcctttctatggctgtgcgtctcatccccgctgtccatctgggagatggggtcttccttgtggcgccaccaccgccacccttgcccagcgcgcccctgttggagctccctgagggcctgcgtgcggaggcactgtggggtgtgaacacagcacgccaggagcagaagctgctgagttggctgcaggaacgggcagctccaggtgcctgctacctcaagtgcctgcagttgcttaaggctctgcgcgatctgggggcccgtgggctggactcagcggccgccacccagtggggacgcatcctatcctcatatgtgctcaagacagtgctgctggcagtgctgctgcgcaagggggcccctgggcaaggctgggacgaggagcacctgggaaggtgtttggaggagttggtgcagttccttagggactgcctgctgcgacgccatacgctcttccactgcgtcctgggccctggtggggcggctgccgaggtgggtcccctgcccaaggcactgagggaagccgccccagttgacctcctggccgctttcgacgggcacgcccgggaacttgcagcagcgcggttgctgtccacgtggcaaaggctgccccagcttctccgggcctacgggggtccccgctaccttgccaggtgccccccaccccggagtcagcgcacccagggcttccttgaaggtgaaccgtaaaccctgacagcacccccacctgaccaaatgctcctaaagcctttcccactgggtgggggtgggaatggcggtgaagccagttaaatgcaagattgcagaaggcattggaaaatttggtggctgccacaagctttagtggcttaaatatcaccttctcgcttcacagtccagtataatatgacatcttcacacccactagagtgtcctgggcaaaccatgggaagacatccaacaggagacccaagaattggttcaaatattgttctgtgtagacggattctgtagaaggatgtggcttttagagaagtccagtagaagaagcaagaactagctgcagggaaagttccttctgtcggtttttagacacagatctctctgcccaaattaaaaaaaaacaaaacaaaacactaaagtttttgacacaattacttgctaggtactgggttcctgattgtctttaaaaagaaaaatctgaatctttatttgcaactggaattgaagttctattttaggggctaatgtttagaggaacataatttccactgttcaaattaatattaatgtatttttaaaatggtgcaatcacaggtgtttgacaagattgtcaacaagttaagtcacatagatggaaaggcaatcgagagttggttagagaagcttccagagaaaatagcactttatattgatcaattcactcattttgtggtaattgctagcaccaagcattgcatctgaaagggaagccagttatatttattattaaatgtacaaccttgaaaagcagccagcatgcttgcctaactaacatcgccgcaggccacaagctgggatatgtacctgtccgtcaacatccattcattaaactacctactaccagccagagatgtctggaaccaaagtagcaaccaaatacatattcaagacaacactggtgaaggcataaaacatgttggctttggagaaagatgtgttttaggctttgcctgtaaaggtgtttctccaaggctggctgctggctggagacagaaaacttttttgttttaaggtttttagcaaactccttcacaaagagatttctttctgagcttaatgagctaatgaagaggaaatgcctgctgcttagcatgtggtttgtgctgggtctctaaccattgatggttcttccttgtccaggcagtcttacgtggtccaagagacctgttgattcagcacaggtcttgcaaaacatttcacttatagttcagtatcttgggctctgtgcttgaagatcagttactccctggtcgtgggcagaggagacaaattaggaaaagagcaagggagacagcccttgacggcagtctgtctcttttctctttaggtgtcagtatcaccaggttgggtgtattttgcagctgggaggagccggtcctggaattcttccttgttctcccaaatttataacagtcctcaattgcagtttaagttcagcatggcccctcatctgcttgcctgattggaaatgcagccagtccaagtgttacaaattgggatttttttgttttctaaataaaaacatgtacttcctcagactcttaaagctaaaatttggaagacagaaatgcctatgtgaatagaatcattgttgaagttctgagctcttttgagggaactctataagccttctttctttaggggatccacttgcctgctgtgggaaatcatagtgagtgatttacaggaatccttctcctccaagctgcattggcttcttatatcctttgcgaccttgggctgaaagagaaacagctgcaaatgttgtgctgtctctttgaggttgtcttggggacagttccccgcaaaggtcattcctagcttttgaggtcaatgttgggtcataaggtactgcattgtgcaaagaagtcagtctgctaactttatgcaaagatagaaactgcacggtattttttaaaattagtttttaaaataaatgccaagagtagatcttatatatatatatatgtatacatattttatatatatatatatttccatactcaaccacaacttcctctgtactcattgtttactacagtgggggacatcaagggttggaaggattataaagctttaaggctgggcgtggtggctcacgcctgtaatcccagcactttgggaggcgaggtgggcggatcacctgaggtcaggagttcaagaccagcctagccaacatagtgaaactctgtctctactaaaaaatacaaaaattagctgggcgtggtggcgggcgcctgtaatcccagatactcgggaggctaaggcaggagaatcacttgaacccgggaggtgaaggttgcagagagccaagatcacaccactgcactccagcctgggtgaccgagcgagactccgtctcaaaaaaaaaaaaaaaaagctttaaaaagctgaattttagaaatatttctagcagtgtcagtgagttcctcttttaatagtgttttaaagtataaatctggtaacatactgttcttgtagttttttgttagttttgtttttcaggttaattacccaaagcctcatccatcctcaaggtttttaaattttatttttttaaaataaattgtgcattgtatttgtgaatttttaaaatattactgttttatttaaatgccatgctgagcaattgttctctgtacatggtaaccaaaacttagagatttcgatcaattttgatcaatgtttagtaaaccaaaacatgtactgtgtacaacggaaataatatggcatattagccaggcatgatggttgcccaagacagttaaattaagctcaattctgtattttattagggctctgttatgtccttcatctgaaatgtacacatttttggtgtatgcttggtactggagattcatatatgcaaatattctcatgcaagaagttccacagtaacaacagcaaaaagaaaaaattagttgtccagccagtgctggaggaaaatgtttctggggaagatgactcagtcattttgtggcgagacaccctttggtaactcccactgaccagtcttgggagccttcctggaatgatcgtgggctgagcggagatgttttttgcaaaatgaaactgaagctgaaagaaaggagaattcgagtgaaccaagagaaatccaaagacctggggaaggaggacttaagatgaaagtgaagcaagagagggaaggggaaatgaagtgaaaatggcgtgagggtgtgagagaggtttgggttaggaaacatgtttttagtgctatttccaaccaggggtcgcaaactcagcagcctgtagaaacaggggtgggaggtgggggggaagctgtgcccacctttaaagagggggccattgctcagccatgcagaaaaaaatggggcaacaagctggaaatcaggttttttttttttaaagtgaaacttgatgatttttaaacaagtaattaaaaaaatgtccaaaacaccatgtgggccaaacatttgtttgagcctgggggccaccagtttgcgaccactgccttacgtagttaacaccctgagtatgtatacagtcatattttttgttttggatatggtagtgttatatatacttgggggcgtgatatttgaagtcatctttatctctcagagttaagctttattgtagaagaaaaaaaaaaaagttaacacagccatagataacacttaactcacagttcccaggaggacacttgatctcgaagctgctctttttgagtcagatcctacatcaaaccacttagggccagtttttggcatttccttcctggtgatttggggtaaacttctttgctctgtcggagtttgcagatgagtaatcagaaggattgcagaataacttgtttctttgtattttattcttacatttaaattaattttggggggttagtggtatcctagctcgtgcctttacagggatgattggtggctagatttggggtgcaagcttcttaggctcataccatttcaactaccaagaacacaggtttttgtttttgttttttgagacagggtctcagtctgttgcccaggctggagtgcagtggcaagattgcagctcattgcagccttgacctcctgggctcaagcgatcctcctgcctcggcctcccaactagctgggaccacaggtatgtgccactacacccagcgaatttttaaattatttgtagagtcagggtctccctatgttgcccaggctggtcttgaactactggactcaagccatcctcccacctcggcctcccaaagtgttgggattataggcgcgagccaccacacctggcctaaaagcgtcgttctgatcagacttcacccctgaatgtttctatcattttcttttctttttttttttttttcgagacagagttttgctcttgttttacaggctggggtgcggtgggatgatcttggctcactgcaatctcctcctcccaggttcaagtgattcttgggccttagcctcccgagtagctgggattacaggcacctgccaccacgcctggctaatatatatatatatatatatatattttttttttttttttttagtagagatggggtttcatcatgttggccaggctggtctcgaactcctgacctcaggtgatctacctgcctcggcctcccaaagtgcagggattacaggtgtgagtgagccaccgcggccggcctctatcattttctgactcagcagctccaccaaaattgacatcctagcaaacactgtgaaggaattaacctaagtgcttccagagcatctcatgtaacctctatggagtaagtcactttttctgtaacatgtggcttttgaccttgatgaagactttgacttctcatccctgtctacatggaggaagatgattcagtggtggggaaaatgaacctcggtaacatttccaatgtccttcaagagggaaacaagttcagtgttatcatcgtggcattcgttagtttttttttttttaaatcacttgtttagatacaactttatttttttatacctacatagcacatgactggggggataaagcatgtataagttgggagagggtaaagaatgtgtgactatgtatacagaaaatagactaaaatgtgcagcaaaatgatatatactgtaatctggtttttgaagtatctactattctggaatattgttaaacaactttttgcttttgaaaaaaaaaggtgccttgattcagttgcgtgacttagaacattcatcctattttattgtgatttttaatgtcttctgaccccaaactgtgtttttggttgcagtctggcggctgcaggcatagcgtcggttttgttccaataacagagaccaaagagttaatcagatatggttcagctgctacaattgtatgattcaaaggcaatttaatcaccccaaatttccatggcccccacagtcaagacctgccattcgttttctcttgcaggttggagtaaatttgcactttgaatcatgtgggtcatttggggaccttgttcttttctattttgctttattaataaaggaacttgtagaaa

SEQ ID NO: 10221 - DNA, 2035 bp, Homo sapiens
  source 1..2035: mol_type = unassigned DNA
aacagtccatgctctaccctggctcctgtctggcagaggagacagacattacacacgatttcagacccagcaggctgtgggctgctcataagcgagggatactggatgcagaggagggaagggatctgggaggtagatgtgggatcagacctgcatcttgaaggatgagtaggatgctgacgggcagagaaagcaggcagggcagaaagagcaagcaggggcttcctagcaggcaacacagcctggggaaaggcacagggcagccagatgctgggctgttgggcccagggcagtggcagatggggacagggagccggtagtgttatggttggtttgaaagacagggtctgcatccttggagaagagattaatgagacttgtcttcctcttttgtagcccgctcccaaaagacttcaggcattgggcgcctgatggtgcatgtcattgaagctacagaattaaaagcctgcaaaccaaatggaaagagcaacccatactgtgaaatcagcatgggctcccagagctacaccaccaggaccatccaggacacactcaatcccaagtggaattttaactgccagttctttattaaggatctctaccaagacgtgctgtgtctcaccctgtttgacagagaccagttttcaccagatggtaagtgtcgctcagccaggggatctaaaggctttcccagtttcctagatcctggagtccagatctaggggcttcagctgtgtgcagaccccatgccacttcagggaagtgacacaggcctgtgtcatctcgctttggcagcaggtgggtggccttcctcaggggaggaggtggcctgagatgtgtttcaggtctttgacccatcactccctacacacacgacgtgaacaccactcctggagcattctcagaatggagatttgaattccatgtggcagcttctcacacacaaacctgccatcattccccacacacccactcacgacattcaacagccatgagccaaaagaagttccttgtttcagatttgaaggttttatgaatccacttcttccggatgtagctctttaatgattttataaagaagaaagacttctgactctcctgtgtttattcaccagatttcctgggtcgtactgaaattccagtggcaaaaattcgaacagaacaggaaagcaaaggccctatgacccgccgactgctgctgcatgaggtccccaccggggaggtctgggtccgttttgacctgcagctttttgagcaaaaaactctcctgtaggggttctaaaggacagcaccagcgggacagcccacaaggctggggctggagaatgagagactgcgctctcttggggctgagggagcaccatgcagcttcacccctcacaaagccatgcacgctgggggctctgttttcctgcacactaaatagctagcaatctatgcaaacacctttcccataaagaaaccaaaccccatagtacagtgccttgtcctagtgttcacatgttcagctctgtttgtttagatgccaaggtttccattttcagggctataaaaagtattacttggaaatgaggcatcagaccaccagatgttaccgctcggttgaatgtgtccaccgtggagtggtttggtgacgctgtaaccattccacgccagtgacctctgctgggtcacagccactcaggaggggaagggtcaggatgagaggctgcagcctcgacacttggcgcggcctgatactgaaatagcgtctactcgtgcactgaataaaaacagaaacttgatcattttattcctgattagattttatcactctctgctaagacaatatagtctggagtataagtgggaaagcttgatttaaatactgtgaactctaataatgtggaaaatatttttcaactttaattttctgaagtataaattatttatgtaaattcattgtttttgcatatttcttaggacatgcatctttaagctttatcattgcccatatgtacagaaagagaataaagacatatgtttatggatggaa

SEQ ID NO: 10222 - DNA, 5814 bp, Homo sapiens
  source 1..5814: mol_type = unassigned DNA
cgccagatggctgagagctagcaaggaaaactcaggaccatgatggctcagtttcccacagctatgaatggagggccaaacatgtgggctattacctctgaagaacgtactaagcatgacaggcagtttgataacctcaaaccttcaggaggttacataacaggtgatcaagcacgtaattttttcctacaatcaggtctgccggcccctgttttagctgaaatatgggctttatcagacctaaacaaggatgggaagatggatcagcaagagttctccatagctatgaaactcatcaaactgaagcttcaaggccaacagttgcctgtggttctccctcctattatgaagcaaccccctatgttttctccattaatttctgctcgttttggaatgggaagcatgcccaatctgtccattcctcagccattgcctccagctgcacctataacatcattgtcttctgcgacttcagggaccaaccttcctcccttaatgatgcccactcccctagtgccttctgttagcacatcatcattaccaaatggaaccgccagtctcattcagcctttacccattccttattcttcttcaacattgcctcatgggtcatcttatagtctgatgatgggaggatttggaggtgctagtatacagaaagcgcagtctctgattgatttaggatctagtagctcaacttcctcgactgcttcactctcagggaactcacccaagactgggacctcagagtgggcagttcctcagcctacaagattaaaatatcggcaaaaatttaatactcttgacaaaagtatgagtggatatctctcaggttttcaagctagaaatgcccttcttcagtcaaatctttctcaaactcagctggctactatttggactctggctgacgttgatggtgatggacagctaaaagcagaagagtttattcttgcaatgcaccttactgacatggccaaagctggacagccattaccactgactttacctcctgagcttgttcctccatctttcagaggaggaaagcaaattgattccattaatggaactctgccttcatatcagaaaatgcaagaagaggagcctcagaagaaattaccagttacttttgaggacaaacggaaagccaactatgagcgagggaacatggagctggaaaagcgacgccaagccttgatggagcagcaacaaagggaggcagaacgtaaagcccagaaagaaaaggaagagtgggaacgaaaacagagagaattacaagaacaagaatggaagaaacaacttgaattagaaaaacgcttagagaagcaacgggaattggagagacaacgagaggaagaaaggagaaaagacatagaaagacgagaggcagcaaaacaggaacttgaacgacaacgtcgcttagaatgggagagaattcggcgacaggagcttctcaatcaaaagaatagagaacaagaagaaattgtcaggttaaactctaaaaagaagaatcttcatcttgagttggaagcactgaatggcaaacatcagcagatctcaggcagacttcaggatgtccgactcaaaaagcaaactcaaaagactgagctggaagttctggataagcagtgtgacttggaaattatggaaatcaagcaacttcaacaggaacttcaggaatatcagaataagcttatctatctggtacctgagaagcaattattaaatgaaagaattaaaaacatgcagttcagtaacacacctgattcaggggtcagtttacttcataaaaaatcattagaaaaggaagaattatgccaaagacttaaagaacagttagatgctcttgaaaaagaaactgcatctaagctgtcagaaatggattcttttaacaatcaactaaaggaactgagagaaacctacaacacacagcagttagcccttgaacagctttataagatcaaacgtgacaagttgaaggaaattgaaaggaaaagattagaactaatgcagaaaaagaaactagaagatgaggctgcaaggaaagcaaagcaaggaaaagaaaacttatggaaagaaaatcttagaaaggaggaagaagaaaaacaaaagcgactccaggaagaaaaaacacaagaaaaaattcaagaagaggaacggaaagctgaggagaaacaacgtaaggataaggatactttgaaagctgaggagaaaaaacgtgagacagctagtgttttggtgaattatagagcattatacccctttgaagcaaggaaccatgatgagatgagttttaattctggagatataattcaggttgatgaaaaaaccgtaggagaacctggttggctttatggtagttttcaaggaaattttggctggtttccatgcaattatgtagaaaaaatgccatcaagtgaaaatgaaaaagctgtatctccaaagaaggccttacttcctcctacagtttctttatctgctacctcaacttcctctgaaccactttcttcaaatcaaccagcatcagtgactgattatcaaaatgtatctttttcaaacctaactgtaaatacatcatggcagaaaaaatcagccttcactcgaactgtgtcccctggatctgtatcacctattcatggacagggacaagtggtagaaaacttaaaagcacaggccctttgttcctggactgcaaagaaagataaccacttgaacttctcaaaacatgacattattactgtcttggagcagcaagaaaattggtggtttggggaggtgcatggaggaagaggatggtttcccaaatcttatgtcaagatcattcctgggagtgaagtaaaacgggaagaaccagaagctttgtatgcagctgtaaataagaaacctacctcggcagcctattcagttggagaagaatatattgcactttatccatattcaagtgtggaacctggagatttgactttcacagaaggtgaagaaatattggtgacccagaaagatggagagtggtggacaggaagtattggagatagaagtggaatttttccatcaaactatgtcaaaccaaaggatcaagagagttttgggagtgctagcaagtctggagcatcaaataaaaaacctgagattgctcaggtaacttcagcatatgttgcttctggttctgaacaacttagccttgcaccaggacagttaatattaattctaaagaaaaatacaagtgggtggtggcaaggagagttacaggccagaggaaaaaagcgacagaaaggatggtttcctgccagtcatgttaaacttttgggtccaagtagtgaaagagccacacctgcctttcatcctgtatgtcaggtgattgctatgtatgactatgcagcaaataatgaagatgagctcagtttctccaagggacaactcattaatgttatgaacaaagatgatcctgattggtggcaaggagagatcaacggggtgactggtctctttccttcaaactacgttaagatgacgacagactcagatccaagtcaacagtggtgtgctgatctgcaaaccctggacacaatgcagccaattgagaggaaaagacagggctatattcatgagctgattcagaccgaagagcggtacatggctgaccttcagctcgtcgtcgaggtttttcagaaacgcatggcagagtcaggctttctcactgaaggggagatggccctgatttttgttaactggaaggagctcatcatgtccaacacaaagctgctgaaggctttgcgggtgcggaagaagaccgggggcgagaagatgccggtgcagatgattggggacatcctggccgctgagctgtcccacatgcaggcttacatcaggttctgcagctgccagcttaatggagcagctctgttacagcagaagacagatgaagacacagatttcaaagaatttttaaagaagctggcatctgacccgcggtgtaaaggaatgcccctctccagcttcctgctgaaacccatgcagaggatcacccgctacccactgctcatcagaagtattctggagaacaccccggagagccatgcagaccattcctccctaaagctggccctcgagcgggcagaggagctgtgctctcaagtgaatgagggagttcgggagaaggaaaactcggaccgactggagtggatccaggcgcacgtgcagtgtgaaggcctcgcggagcaacttattttcaactctctcaccaactgcctggggccccggaagctcttacacagtgggaaattatacaagaccaagagcaacaaggaactgcacggattcctcttcaatgacttcctgcttcttacctacatggtcaagcagtttgctgtttcctctggctctgagaaacttttcagctcgaagtccaatgctcaattcaaaatgtataaaacgcccattttcctgaatgaagtcttggtgaaactgcccacagacccttccagcgatgagcctgtcttccacatttcccacattgatcgggtctacaccctccgaacagacaacattaatgagaggaccgcctgggtgcagaagatcaaggcggcgtctgagcagtacatcgacaccgagaagaagaagcgtgagaaagcttaccaagcccgctcccaaaagacttcaggcattgggcgcctgatggtgcatgtcattgaagctacagaattaaaagcctgcaaaccaaatggaaagagcaacccatactgtgaaatcagcatgggctcccagagctacaccaccaggaccatccaggacacactcaatcccaagtggaattttaactgccagttctttattaaggatctctaccaagacgtgctgtgtctcaccctgtttgacagagaccagttttcaccagatgatttcctgggtcgtactgaaattccagtggcaaaaattcgaacagaacaggaaagcaaaggccctatgacccgccgactgctgctgcatgaggtccccaccggggaggtctgggtccgttttgacctgcagctttttgagcaaaaaactctcctgtaggggttctaaaggacagcaccagcgggacagcccacaaggctggggctggagaatgagagactgcgctctcttggggctgagggagcaccatgcagcttcacccctcacaaagccatgcacgctgggggctctgttttcctgcacactaaatagctagcaatctatgcaaacacctttcccataaagaaaccaaaccccatagtacagtgccttgtcctagtgttcacatgttcagctctgtttgtttagatgccaaggtttccattttcagggctataaaaagtattacttggaaatgaggcatcagaccaccagatgttaccgctcggttgaatgtgtccaccgtggagtggtttggtgacgctgtaaccattccacgccagtgacctctgctgggtcacagccactcaggaggggaagggtcaggatgagaggctgcagcctcgacacttggcgcggcctgatactgaaatagcgtctactcgtgcactgaataaaaacagaaacttgatcattttattcctgattagattttatcactctctgctaagacaatatagtctggagtataagtgggaaagcttgatttaaatactgtgaactctaataatgtggaaaatatttttcaactttaattttctgaagtataaattatttatgtaaattcattgtttttgcatatttcttaggacatgcatctttaagctttatcattgcccatatgtacagaaagagaataaagacatatgtttatggatggaa

SEQ ID NO: 10223 - DNA, 6300 bp, Homo sapiens
  source 1..6300: mol_type = unassigned DNA
gcttcggacccgaccgactcggagcagaccttcagggttcaatgccccggaactcctggggcgaggagccacgcccgggcagtttcgggctccggagggtggggagtcggtgcccggcagcgggcgggccgtcagctgcccggcccggcgcctacctccccgccccccggcttcctgcggaggccgcggccgccatgttgttgtggggctgaggcggcgccggcggagccctgagcggctgtgacaggctacgcaacaggttcgcgggcggcggcctgacgaccaagccagctgcagtggcggcgacggcggcagagcagggtctccccgcgcctgcccgcgcccaggctgccggtgctgagggacgcggagtcgcgctgtgacgagcgggaggcgcggcgagggcgccagatggctgagagctagcaaggaaaactcaggaccatgatggctcagtttcccacagctatgaatggagggccaaacatgtgggctattacctctgaagaacgtactaagcatgacaggcagtttgataacctcaaaccttcaggaggttacataacaggtgatcaagcacgtaattttttcctacaatcaggtctgccggcccctgttttagctgaaatatgggctttatcagacctaaacaaggatgggaagatggatcagcaagagttctccatagctatgaaactcatcaaactgaagcttcaaggccaacagttgcctgtggttctccctcctattatgaagcaaccccctatgttttctccattaatttctgctcgttttggaatgggaagcatgcccaatctgtccattcctcagccattgcctccagctgcacctataacatcattgtcttctgcgacttcagggaccaaccttcctcccttaatgatgcccactcccctagtgccttctgttagcacatcatcattaccaaatggaaccgccagtctcattcagcctttacccattccttattcttcttcaacattgcctcatgggtcatcttatagtctgatgatgggaggatttggaggtgctagtatacagaaagcgcagtctctgattgatttaggatctagtagctcaacttcctcgactgcttcactctcagggaactcacccaagactgggacctcagagtgggcagttcctcagcctacaagattaaaatatcggcaaaaatttaatactcttgacaaaagtatgagtggatatctctcaggttttcaagctagaaatgcccttcttcagtcaaatctttctcaaactcagctggctactatttggactctggctgacgttgatggtgatggacagctaaaagcagaagagtttattcttgcaatgcaccttactgacatggccaaagctggacagccattaccactgactttacctcctgagcttgttcctccatctttcagaggaggaaagcaaattgattccattaatggaactctgccttcatatcagaaaatgcaagaagaggagcctcagaagaaattaccagttacttttgaggacaaacggaaagccaactatgagcgagggaacatggagctggaaaagcgacgccaagccttgatggagcagcaacaaagggaggcagaacgtaaagcccagaaagaaaaggaagagtgggaacgaaaacagagagaattacaagaacaagaatggaagaaacaacttgaattagaaaaacgcttagagaagcaacgggaattggagagacaacgagaggaagaaaggagaaaagacatagaaagacgagaggcagcaaaacaggaacttgaacgacaacgtcgcttagaatgggagagaattcggcgacaggagcttctcaatcaaaagaatagagaacaagaagaaattgtcaggttaaactctaaaaagaagaatcttcatcttgagttggaagcactgaatggcaaacatcagcagatctcaggcagacttcaggatgtccgactcaaaaagcaaactcaaaagactgagctggaagttctggataagcagtgtgacttggaaattatggaaatcaagcaacttcaacaggaacttcaggaatatcagaataagcttatctatctggtacctgagaagcaattattaaatgaaagaattaaaaacatgcagttcagtaacacacctgattcaggggtcagtttacttcataaaaaatcattagaaaaggaagaattatgccaaagacttaaagaacagttagatgctcttgaaaaagaaactgcatctaagctgtcagaaatggattcttttaacaatcaactaaagtgtgggaatatggatgactctgttcttcagtgccttttgtctctgctaagctgtctcaacaacctcttcctcttacttaaggaactgagagaaacctacaacacacagcagttagcccttgaacagctttataagatcaaacgtgacaagttgaaggaaattgaaaggaaaagattagaactaatgcagaaaaagaaactagaagatgaggctgcaaggaaagcaaagcaaggaaaagaaaacttatggaaagaaaatcttagaaaggaggaagaagaaaaacaaaagcgactccaggaagaaaaaacacaagaaaaaattcaagaagaggaacggaaagctgaggagaaacaacgtaaggataaggatactttgaaagctgaggagaaaaaacgtgagacagctagtgttttggtgaattatagagcattatacccctttgaagcaaggaaccatgatgagatgagttttaattctggagatataattcaggttgatgaaaaaaccgtaggagaacctggttggctttatggtagttttcaaggaaattttggctggtttccatgcaattatgtagaaaaaatgccatcaagtgaaaatgaaaaagctgtatctccaaagaaggccttacttcctcctacagtttctttatctgctacctcaacttcctctgaaccactttcttcaaatcaaccagcatcagtgactgattatcaaaatgtatctttttcaaacctaactgtaaatacatcatggcagaaaaaatcagccttcactcgaactgtgtcccctggatctgtatcacctattcatggacagggacaagtggtagaaaacttaaaagcacaggccctttgttcctggactgcaaagaaagataaccacttgaacttctcaaaacatgacattattactgtcttggagcagcaagaaaattggtggtttggggaggtgcatggaggaagaggatggtttcccaaatcttatgtcaagatcattcctgggagtgaagtaaaacgggaagaaccagaagctttgtatgcagctgtaaataagaaacctacctcggcagcctattcagttggagaagaatatattgcactttatccatattcaagtgtggaacctggagatttgactttcacagaaggtgaagaaatattggtgacccagaaagatggagagtggtggacaggaagtattggagatagaagtggaatttttccatcaaactatgtcaaaccaaaggatcaagagagttttgggagtgctagcaagtctggagcatcaaataaaaaacctgagattgctcaggtaacttcagcatatgttgcttctggttctgaacaacttagccttgcaccaggacagttaatattaattctaaagaaaaatacaagtgggtggtggcaaggagagttacaggccagaggaaaaaagcgacagaaaggatggtttcctgccagtcatgttaaacttttgggtccaagtagtgaaagagccacacctgcctttcatcctgtatgtcaggtgattgctatgtatgactatgcagcaaataatgaagatgagctcagtttctccaagggacaactcattaatgttatgaacaaagatgatcctgattggtggcaaggagagatcaacggggtgactggtctctttccttcaaactacgttaagatgacgacagactcagatccaagtcaacagtggtgtgctgatctgcaaaccctggacacaatgcagccaattgagaggaaaagacagggctatattcatgagctgattcagaccgaagagcggtacatggctgaccttcagctcgtcgtcgaggtttttcagaaacgcatggcagagtcaggctttctcactgaaggggagatggccctgatttttgttaactggaaggagctcatcatgtccaacacaaagctgctgaaggctttgcgggtgcggaagaagaccgggggcgagaagatgccggtgcagatgattggggacatcctggccgctgagctgtcccacatgcaggcttacatcaggttctgcagctgccagcttaatggagcagctctgttacagcagaagacagatgaagacacagatttcaaagaatttttaaagaagctggcatctgacccgcggtgtaaaggaatgcccctctccagcttcctgctgaaacccatgcagaggatcacccgctacccactgctcatcagaagtattctggagaacaccccggagagccatgcagaccattcctccctaaagctggccctcgagcgggcagaggagctgtgctctcaagtgaatgagggagttcgggagaaggaaaactcggaccgactggagtggatccaggcgcacgtgcagtgtgaaggcctcgcggagcaacttattttcaactctctcaccaactgcctggggccccggaagctcttacacagtgggaaattatacaagaccaagagcaacaaggaactgcacggattcctcttcaatgacttcctgcttcttacctacatggtcaagcagtttgctgtttcctctggctctgagaaacttttcagctcgaagtccaatgctcaattcaaaatgtataaaacgcccattttcctgaatgaagtcttggtgaaactgcccacagacccttccagcgatgagcctgtcttccacatttcccacattgatcgggtctacaccctccgaacagacaacattaatgagaggaccgcctgggtgcagaagatcaaggcggcgtctgagcagtacatcgacaccgagaagaagaagcgtgagaaagcttaccaagcccgctcccaaaagacttcaggcattgggcgcctgatggtgcatgtcattgaagctacagaattaaaagcctgcaaaccaaatggaaagagcaacccatactgtgaaatcagcatgggctcccagagctacaccaccaggaccatccaggacacactcaatcccaagtggaattttaactgccagttctttattaaggatctctaccaagacgtgctgtgtctcaccctgtttgacagagaccagttttcaccagatgatttcctgggtcgtactgaaattccagtggcaaaaattcgaacagaacaggaaagcaaaggccctatgacccgccgactgctgctgcatgaggtccccaccggggaggtctgggtccgttttgacctgcagctttttgagcaaaaaactctcctgtaggggttctaaaggacagcaccagcgggacagcccacaaggctggggctggagaatgagagactgcgctctcttggggctgagggagcaccatgcagcttcacccctcacaaagccatgcacgctgggggctctgttttcctgcacactaaatagctagcaatctatgcaaacacctttcccataaagaaaccaaaccccatagtacagtgccttgtcctagtgttcacatgttcagctctgtttgtttagatgccaaggtttccattttcagggctataaaaagtattacttggaaatgaggcatcagaccaccagatgttaccgctcggttgaatgtgtccaccgtggagtggtttggtgacgctgtaaccattccacgccagtgacctctgctgggtcacagccactcaggaggggaagggtcaggatgagaggctgcagcctcgacacttggcgcggcctgatactgaaatagcgtctactcgtgcactgaataaaaacagaaacttgatcattttattcctgattagattttatcactctctgctaagacaatatagtctggagtataagtgggaaagcttgatttaaatactgtgaactctaataatgtggaaaatatttttcaactttaattttctgaagtataaattatttatgtaaattcattgtttttgcatatttcttaggacatgcatctttaagctttatcattgcccatatgtacagaaagagaataaagacatatgtttatggatggaa

SEQ ID NO: 10224 - DNA, 974 bp, Homo sapiens
  source 1..974: mol_type = unassigned DNA
aggaactgcacggattcctcttcaatgacttcctgcttcttacctacatggtcaagcagtttgctgtttcctctggctctgagaaacttttcagctcgaagtccaatgctcaattcaaaatgtataaaacggaccgcctgggtgcagaagatcaaggcggcgtctgagcagtacatcgacaccgagaagaagaagcgtgagaaagcttaccaagcccgctcccaaaagacttcaggcattgggcgcctgatggtgcatgtcattgaagctacagaattaaaagcctgcaaaccaaatggaaagagcaacccatactgtgaaatcagcatgggctcccagagctacaccaccaggaccatccaggacacactcaatcccaagtggaattttaactgccagttctttattaaggatctctaccaagacgtgctgtgtctcaccctgtttgacagagaccagttttcaccagatgatttcctgggtcgtactgaaattccagtggcaaaaattcgaacagaacaggaaagcaaaggccctatgacccgccgactgctgctgcatgaggtccccaccggggaggtctgggtccgttttgacctgcagctttttgagcaaaaaactctcctgtaggggttctaaaggacagcaccagcgggacagcccacaaggctggggctggagaatgagagactgcgctctcttggggctgagggagcaccatgcagcttcacccctcacaaagccatgcacgctgggggctctgttttcctgcacactaaatagctagcaatctatgcaaacacctttcccataaagaaaccaaaccccatagtacagtgccttgtcctagtgttcacatgttcagctctgtttgtttagatgccaaggtttccattttcagggctataaaaagtattacttggaaatgaggcatcagaccaccagatgttaccgctcggttgaatgtgtccacc

SEQ ID NO: 10225 - DNA, 252 bp, Homo sapiens
  source 1..252: mol_type = unassigned DNA
cgcctgggtgcagaagatcaaggcggcgtctgagcagtacatcgacaccgagaagaagaagcgtgagaaagcttaccaaggtttcccccattttgttatatactcctaaaagcccgctcccaaaagacttcaggcattgggcgcctgatggtgcatgtcattgaagctacagaattaaaagcctgcaaaccaaatggaaagagcaacccatactgtgaaatcagcatgggctcccagagctacaccaccagg

SEQ ID NO: 10226 - DNA, 749 bp, Homo sapiens
  source 1..749: mol_type = unassigned DNA
ggattgtcatcttcctttctcctaaggagagaacactgggattttttgttttgagttctttgaattcagctggtagaatcagtgttctgtggctagaagtaatgattttcactgggccagtttggactctgaagagtaatgtatttaaggatctttcatgcaaagtgaatgattctagccacattcccacctagaaaactccaccacagtatcctcaggcccagggcactggcctctcaggggcactggatggtttgtgccgggatttaaaaagtgaaattttctttctctttaagcaacttattttcaactctctcaccaactgcctggggccccggaagctcttacacagtgggaaattatacaagaccaagagcaacaaggaactgcacggattcctcttcaatgacttcctgcttcttacctacatggtcaagcagtttgctgtttcctctggctctgagaaacttttcagctcgaagtccaatgctcaattcaaaatgtataaaacgcccattttcctgaatgaagtcttggtgaaactgcccacagacccttccagcgatgagcctgtcttccacatttcccacattgatcgggtctacaccctccgaacagacaacattaatgagaggaccgcctgggtgcagaagatcaaggcggcgtctgagcagtacatcgacaccgagaagaagaagcgtgagaaagcttaccaagcccgctcccaaaagacttcaggcattgggcgc

SEQ ID NO: 10227 - DNA, 4563 bp, Homo sapiens
  source 1..4563: mol_type = unassigned DNA
ggctgaggcggcgccggcggagccctgagcggctgtgacaggctacgcaacaggttcgcgggcggcggcctgacgaccaagccagctgcagtggcggcgacggcggcagagcagggtctccccgcgcctgcccgcgcccaggctgccggtgctgagggacgcggagtcgcgctgtgacgagcgggaggcgcggcgagggcgccagatggctgagagctagcaaggaaaactcaggaccatgatggctcagtttcccacagctatgaatggagggccaaacatgtgggctattacctctgaagaacgtactaagcatgacaggcagtttgataacctcaaaccttcaggaggttacataacaggtgatcaagcacgtaattttttcctacaatcaggtctgccggcccctgttttagctgaaatatgggctttatcagacctaaacaaggatgggaagatggatcagcaagagttctccatagctatgaaactcatcaaactgaagcttcaaggccaacagttgcctgtggttctccctcctattatgaagcaaccccctatgttttctccattaatttctgctcgttttggaatgggaagcatgcccaatctgtccattcctcagccattgcctccagctgcacctataacatcattgtcttctgcgacttcagggaccaaccttcctcccttaatgatgcccactcccctagtgccttctgttagcacatcatcattaccaaatggaaccgccagtctcattcagcctttacccattccttattcttcttcaacattgcctcatgggtcatcttatagtctgatgatgggaggatttggaggtgctagtatacagaaagcgcagtctctgattgatttaggatctagtagctcaacttcctcgactgcttcactctcagggaactcacccaagactgggacctcagagtgggcagttcctcagcctacaagattaaaatatcggcaaaaatttaatactcttgacaaaagtatgagtggatatctctcaggttttcaagctagaaatgcccttcttcagtcaaatctttctcaaactcagctggctactatttggactctggctgacgttgatggtgatggacagctaaaagcagaagagtttattcttgcaatgcaccttactgacatggccaaagctggacagccattaccactgactttacctcctgagcttgttcctccatctttcagaggaggaaagcaaattgattccattaatggaactctgccttcatatcagaaaatgcaagaagaggagcctcagaagaaattaccagttacttttgaggacaaacggaaagccaactatgagcgagggaacatggagctggaaaagcgacgccaagccttgatggagcagcaacaaagggaggcagaacgtaaagcccagaaagaaaaggaagagtgggaacgaaaacagagagaattacaagaacaagaatggaagaaacaacttgaattagaaaaacgcttagagaagcaacgggaattggagagacaacgagaggaagaaaggagaaaagacatagaaagacgagaggcagcaaaacaggaacttgaacgacaacgtcgcttagaatgggagagaattcggcgacaggagcttctcaatcaaaagaatagagaacaagaagaaattgtcaggttaaactctaaaaagaagaatcttcatcttgagttggaagcactgaatggcaaacatcagcagatctcaggcagacttcaggatgtccgactcaaaaagcaaactcaaaagactgagctggaagttctggataagcagtgtgacttggaaattatggaaatcaagcaacttcaacaggaacttcaggaatatcagaataagcttatctatctggtacctgagaagcaattattaaatgaaagaattaaaaacatgcagttcagtaacacacctgattcaggggtcagtttacttcataaaaaatcattagaaaaggaagaattatgccaaagacttaaagaacagttagatgctcttgaaaaagaaactgcatctaagctgtcagaaatggattcttttaacaatcaactaaagtgtgggaatatggatgactctgttcttcagtgccttttgtctctgctaagctgtctcaacaacctcttcctcttacttaaggaactgagagaaacctacaacacacagcagttagcccttgaacagctttataagatcaaacgtgacaagttgaaggaaattgaaaggaaaagattagaactaatgcagaaaaagaaactagaagatgaggctgcaaggaaagcaaagcaaggaaaagaaaacttatggaaagaaaatcttagaaaggaggaagaagaaaaacaaaagcgactccaggaagaaaaaacacaagaaaaaattcaagaagaggaacggaaagctgaggagaaacaacgtaaggataaggatactttgaaagctgaggagaaaaaacgtgagacagctagtgttttggtgaattatagagcattatacccctttgaagcaaggaaccatgatgagatgagttttaattctggagatataattcaggttgatgaaaaaaccgtaggagaacctggttggctttatggtagttttcaaggaaattttggctggtttccatgcaattatgtagaaaaaatgccatcaagtgaaaatgaaaaagctgtatctccaaagaaggccttacttcctcctacagtttctttatctgctacctcaacttcctctgaaccactttcttcaaatcaaccagcatcagtgactgattatcaaaatgtatctttttcaaacctaactgtaaatacatcatggcagaaaaaatcagccttcactcgaactgtgtcccctggatctgtatcacctattcatggacagggacaagtggtagaaaacttaaaagcacaggccctttgttcctggactgcaaagaaagataaccacttgaacttctcaaaacatgacattattactgtcttggagcagcaagaaaattggtggtttggggaggtgcatggaggaagaggatggtttcccaaatcttatgtcaagatcattcctgggagtgaagtaaaacgggaagaaccagaagctttgtatgcagctgtaaataagaaacctacctcggcagcctattcagttggagaagaatatattgcactttatccatattcaagtgtggaacctggagatttgactttcacagaaggtgaagaaatattggtgacccagaaagatggagagtggtggacaggaagtattggagatagaagtggaatttttccatcaaactatgtcaaaccaaaggatcaagagagttttgggagtgctagcaagtctggagcatcaaataaaaaacctgagattgctcaggtaacttcagcatatgttgcttctggttctgaacaacttagccttgcaccaggacagttaatattaattctaaagaaaaatacaagtgggtggtggcaaggagagttacaggccagaggaaaaaagcgacagaaaggatggtttcctgccagtcatgttaaacttttgggtccaagtagtgaaagagccacacctgcctttcatcctgtatgtcaggtgattgctatgtatgactatgcagcaaataatgaagatgagctcagtttctccaagggacaactcattaatgttatgaacaaagatgatcctgattggtggcaaggagagatcaacggggtgactggtctctttccttcaaactacgttaagatgacgacagactcagatccaagtcaacagtggtgtgctgatctgcaaaccctggacacaatgcagccaattgagaggaaaagacagggctatattcatgagctgattcagaccgaagagcggtacatggctgaccttcagctcgtcgtcgaggtgaggaggctgctgctggctagctctcggggtatctgctgtctctcatgagagatggtgggcatcagactcagggctgcctccacgcagagtcaaagcaaggcatcacttttgatgtgtgaattcacaaatagtgacggaagctctcacatcctccaaatgctgtctctgcctgccggataatgcttgagattgaaagtctctaatgagctctttcccccagatgaggtcactcagagtgaagcgggagaacaagagggcattcgcatggcttcgttggatgtggcaggagccccatcaaggaaggacggggatagagtggatgggaagggcctatggcagaccgtagcttccttggatatttgcctaatatctgttttaacatctgacattttcataaactggtatctctggaggaactgtgaaacagtgaaagtgttcacctcatggttgtatcagtttggaaaacccaatgggagcatattgtaaaatagttcccaaatatcatatagctactgtttgtttataccagtgacctctacgctgatgacagctatccttattcgagtagcactttaaaatgatttgtgcttgagtgaacaaaagaagactttccatttctacta

SEQ ID NO: 10228 - DNA, 3634 bp, Homo sapiens
  source 1..3634: mol_type = unassigned DNA
gccttgcaccaggacagttaatattaattctaaagaaaaatacaagtgggtggtggcaaggagagttacaggccagaggaaaaaagcgacagaaaggatggtttcctgccagtcatgttaaacttttgggtccaagtagtgaaagagccacacctgcctttcatcctgtatgtcaggtgattgctatgtatgactatgcagcaaataatgaagatgagctcagtttctccaagggacaactcattaatgttatgaacaaagatgatcctgattggtggcaaggagagatcaacggggtgactggtctctttccttcaaactacgttaagatgacgacagactcagatccaagtcaacagtgacccaatgttgtcttccagttgtgaaagcaccccagagacccactatccaagtttcactctagcgtggaggcagggcaggcagccctgatcaaatatctcctacacaattcgtttacttcgtttgaatgttagagccacttgtgattatttttttgtgtttctaacttacagtttaaatttatttgtaaaaagttaaaggatagtgggtctttgtgtggctttccctgctgttcactctggcatctttagcatttttcttcttttttaatttgataattgtaggtcattagcatgcatattgagtttgcccttatgtggtgggagttcaaacacacaaagacccactatttgcacaaactattcttactggtttggaataggctgccatgcttttttaatgttattgcaacatgtgtattcatttacagaattcagataaaatttgcttatgttctgctattatgtttgatctaatcctaatcacagtgagctcttaattagctcaatatgtggtttgccctcaagtgtgcactgtttattactttgtaatatgccactatgagtactgacatttagatttgtttaaaggccaagaactggaaacagccatgccctgttttctgtgtatttgggatgggaataacaacattttgggggagctttttaaatctcagagaagaggaaagtggcctgctctggcaggtatgtgcagtgtttcatttgttccagtcccaagaatgagcactgtcctatggtagttcgcttaggatctttatgtgctctgggctaatgaaggtactgcatcatgtgctgcagcgtgtgtattctttttcgatgacctataaagggattatttttgaggaatgaaaggctcccatcattgactgtgagatgggaaaaacctttcctagcttagagcatttatatcttaatccattttaaagtcagagttcattgttacctgttttaatcaggtgactacatgtcccagtatacaaaggggcactggttgacattcttcttaatgtatttagtaaatatcataagaaatcctttaagagtttaaatgtccccaaaacagacatgtgggctctagtcaagaatgaattagagtgaaggaaagctgtgtaacacctggcattcctctgtgttcatggagcttctttgaggctctaagattgattttaccatcagacttctctaatacctgttcttcaaccatattggctactttgacataagaatttacttcttttcctggaatggaaaacactttaaaaaataataacaaacattattataaactaatatatgtgagagtacttagttgatacaaaaaggagttttagtagacagtattatactatatttgaaaatcaaggagaattttatgcaacttaaaatgtttacaaactgcagtgcaatctactgtttgtgaatgtcaaagtatcaggaaaagtgtatatacaatcacagagtcatatttcctcacaaagttatttacaaagagtgaaatatgtttttgtacctctcagtttcagttagaggcatattttgtgcaatatttatgttaatgtgcctatacattatgaatgaattatttcagtcatacattgcctaaatcataactttatgatgcttgggaaagaatcaacagttaaaacttcataaagttataatgtctgtgttccaaaatacatcacattattaggatgtagggagataagtatgtgtgctccctagggtggcaatttctagttactagaccacctctatttttagcatttggcatcctcatgatacttttataaatatgacattaataggaaagcaataatttcattttacagatagaataacagatttgcctgcattcactgaaagagtgcaaagactgggtccttgtgaattcaactgactctcccaaattgtattaattacctgttcttgccttttattttctgaacttgctgcttttgcattcttttgagttcaaagacagttactttaaatccatttttaaaccctcggggtagaaatcataccactgttaatcagccacattatttggtctaaggttttttctttataattctgaaactgagtttatctaatacattgatgaattatttcaaacgtatttttatagttcaaatcacttcacttttacactgataaatataaattactgggaatgaccttcagacagcgtttagcatctgtaaccaacctgaaaataatatgttcatcaggtacctatggattaaatcatatactggcgtatttaagctgaatgtcagtctggaaaataaatttactatattaactgaaataccactctttgtgtaggtattttgtcatgtatttaagaaaaagataaaaagaatggaaatcatatgacataataacttaagtctttcttaaaagtgcatgctgtcttttgcaatacctcattcagccaagtatttgttctcttcctcattcagtataagtcagctttcaatttgcttagaaggcaacattagaaggttagagttcatcagaaacatagaattttaaaatgtgagttcaactgaataaatttgaatttctgtaggaggtaaagaatcaaaatacctgtttaaagattgcaattgcaatgtataataatcacttttaaattatttgattaaaccttttaggttttccagaaatgaaaaaaatcagttctaaaaccaaagctgatttttagaaaatttgagaatgtaaatcagccctatccataatatagtttctctaaaactttatcttaaagagtcattttaaaataatataactattaaaaatgtaactgatatttaaatgttttgaaataaaacattttaaaatataaatactgtagtttaaaagaaagaaactgggggaaagaaaagtagagaaagaaataccaattccagtccaaagctttatttgccaggttttcttagaatgacttttaccagtttatgaattcttgtaaacagaatctataatggaaatactgaaagacttttgcctaaagtggcattattgaatgctgctgtgatgctactgtaatgtaataaattattaaattgttgcaaagtgctgtttttgccttaaaattttattttgtgtgtcttgaaaattatagtattaaaggtattgagattgtgcaaatgctgggcacgcttggcatgagataatctgtttttatttttacaaaattgtaatataactatgcaagtgtgtttattaaaagaacacaaactata

SEQ ID NO: 10229 - DNA, 2066 bp, Homo sapiens
  source 1..2066: mol_type = unassigned DNA
gggctgaggcggcgccggcggagccctgagcggctgtgacaggctacgcaacaggttcgcgggcggcggcctgacgaccaagccagctgcagtggcggcgacggcggcagagcagggtctccccgcgcctgcccgcgcccaggctgccggtgctgagggacgcggagtcgcgctgtgacgagcgggaggcgcggcgagggcgccagatggctgagagctagcaaggaaaactcaggaccatgatggctcagtttcccacagctatgaatggagggccaaacatgtgggctattacctctgaagaacgtactaagcatgacaggcagtttgataacctcaaaccttcaggaggttacataacaggtgatcaagcacgtaattttttcctacaatcaggtctgccggcccctgttttagctgaaatatgggctttatcagacctaaacaaggatgggaagatggatcagcaagagttctccatagctatgaaactcatcaaactgaagcttcaaggccaacagttgcctgtggttctccctcctattatgaagcaaccccctatgttttctccattaatttctgctcgttttggaatgggaagcatgcccaatctgtccattcctcagccattgcctccagctgcacctataacatcattgtcttctgcgacttcagggaccaaccttcctcccttaatgatgcccactcccctagtgccttctgttagcacatcatcattaccaaatggaaccgccagtctcattcagcctttacccattccttattcttcttcaacattgcctcatgggtcatcttatagtctgatgatgggaggatttggaggtgctagtatacagaaagcgcagtctctgattgatttaggatctagtaggagctggagctcaggtagtagtgctcactcacctgccactcaccgagccccgctgtccagcccggttcctaacagctcaacttcctcgactgcttcactctcagggaactcacccaagactgggacctcagagtgggcagttcctcagcctacaagattaaaatatcggcaaaaatttaatactcttgacaaaagtatgagtggatatctctcaggttttcaagctagaaatgcccttcttcagtcaaatctttctcaaactcagctggctactatttggactctggctgacgttgatggtgatggacagctaaaagcagaagagtttattcttgcaatgcaccttactgacatggccaaagctggacagccattaccactgactttacctcctgagcttgttcctccatctttcagaggaggaaagcaaattgattccattaatggaactctgccttcatatcagaaaatgcaagaagaggagcctcagaagaaattaccagttacttttgaggacaaacggaaagccaactatgagcgagggaacatggagctggaaaagcgacgccaagccttgatggagcagcaacaaagggaggcagaacgtaaagcccagaaagaaaaggaagagtgggaacgaaaacagagagaattacaagaacaagaatggaagaaacaacttgaattagaaaaacgcttagagaagcaacgggaattggagagacaacgagaggaagaaaggagaaaagacatagaaagacgagaggcagcaaaacaggaacttgaacgacaacgtcgcttagaatgggagagaattcggcgacaggagcttctcaatcaaaagaatagagaacaagaagaaattgtcaggttaaactctaaaaagaagaatcttcatcttgagttggaagcactgaatggcaaacatcagcagatctcaggcagacttcaggatgtccgactcaaaaagcaaactcaaaagactgagctggaagttctggataagcagtgtgacttggaaattatggaaatcaagcaacttcaacaggaacttcaggaatatcagaataagcttatctatctggtacctgagaagcaattattaaatgaaagaattaaaaacatgcagttcagtaacacacctgattcaggggtcagtttacttcataaaaaa

SEQ ID NO: 10230 - DNA, 563 bp, Homo sapiens
  source 1..563: mol_type = unassigned DNA
tgtgacttggaaattatggaaatcaagcaacttcaacaggaacttcaggaatatcagaataagcttatctatctggtacctgagaagcaattattaaatgaaagaattaaaaacatgcagttcagtaacacacctggtaagtctctaaggtttgtctgattacttttatccttttctgaatgactgtatcagtcacattgttacttttttaaaattaaaaaaagtattctgttataaataacactttttgcctgtaagtttaaagtttcaaaataaagtgaaaaatatcccagatgttagagcatttttagtgataaaaagtagataaaaataaaatagtaatgattgtggtatgacttcatatcttgatgatatttttatgtatataattgaaacatcaaataaagtgttagactataagatataaatttggctctaacacaagactacatgtgcattttgaaaagtcctgcactgattttaaagaactgttcaggaggaggctttatggtggggccgcacctgggattctagggtgttagcgtgcagcagtcataggctta

SEQ ID NO: 10231 - DNA, 902 bp, Homo sapiens
  source 1..902: mol_type = unassigned DNA
ggagccctgagcggctgtgacaggctacgcaacaggttcgcgggcggcggcctgacgaccaagccagctgcagtggcggcgacggcggcagagcagggtctccccgcgcctgcccgcgcccaggctgccggtgctgagggacgcggagtcgcgctgtgacgagcgggaggcgcggcgagggcgccagatggctgagagctagcaaggaaaactcaggaccatgatggctcagtttcccacagctatgaatgaacctattatttaaggattaatgttaatgctgggggctcagtgagttgctgcatataaagtccctgacaatagtcagggttcaataaaggagggccaaacatgtgggctattacctctgaagaacgtactaagcatgacaggcagtttgataacctcaaaccttcaggaggttacataacaggtgatcaagcacgtaattttttcctacaatcaggtctgccggcccctgttttagctgaaatatgggctttatcagacctaaacaaggatgggaagatggatcagcaagagttctccatagctatgaaactcatcaaactgaagcttcaaggccaacagttgcctgtggttctccctcctattatgaagcaaccccctatgttttctccattaatttctgctcgttttggaatgggaagcatgcccaatctgtccattcctcagccattgcctccagctgcacctataacatcattgtcttctgcgacttcagggaccaaccttcctcccttaatgatgcccactcccctagtgccttctgttagcacatcatcattaccaaatggaaccgccagtctcattcagcctttacccattccttattcttcttcaacattgcctcatgggtcatcttatagtctgatgatggg

SEQ ID NO: 10232 - DNA, 597 bp, Homo sapiens
  source 1..597: mol_type = unassigned DNA
gacaggctacgcaacaggttcgcgggcggcggcctgacgaccaagccagctgcagtggcggcgacggcggcagagcagggtctccccgcgcctgcccgcgcccaggctgccggtgctgagggacgcggagtcgcgctgtgacgagcgggaggcgcggcgagggcgccagatggctgagagctagcaaggaaaactcaggaccatgatggctcagtttcccacagctatgaatggagggccaaacatgtgggctattacctctgaagaacgtactaagcatgacaggcagtttgataacctcaaaccttcaggaggttacataacaggtgatcaagcacgtaattttttcctacaatcaggtctgccggcccctgttttagctgaaatatgggctttatcagacctaaacaaggatgggaagatggatcagcaagagttctccatagctatgaaactcatcaaactgaagcttcaaggccaacagttgcctgtggttctccctcctattatgaagcaaccccctatgttttctccattaatttctgctcgttttggcaatttcttataattatatgtgagaagcactcattttgaatg

SEQ ID NO: 10233 - DNA, 5805 bp, Homo sapiens
  source 1..5805: mol_type = unassigned DNA
cagatggctgagagccaaggaaaactcaggaccatgatggctcagtttcccacagctatgaatggagggccaaacatgtgggctattacctctgaagaacgtactaagcatgacaggcagtttgataacctcaaaccttcaggaggttacataacaggtgatcaagcacgtaattttttcctacaatcaggtctgccggcccctgttttagctgaaatatgggctttatcagacctaaacaaggatgggaagatggatcagcaagagttctccatagctatgaaactcatcaaactgaagcttcaaggccaacagttgcctgtggttctccctcctattatgaagcaaccccctatgttttctccattaatttctgctcgttttggaatgggaagcatgcccaatctgtccattcctcagccattgcctccagctgcacctataacatcattgtcttctgcgacttcagggaccaaccttcctcccttaatgatgcccactcccctagtgccttctgttagcacatcatcattaccaaatggaaccgccagtctcattcagcctttacccattccttattcttcttcaacattgcctcatgggtcatcttatagtctgatgatgggaggatttggaggtgctagtatacagaaagcgcagtctctgattgatttaggatctagtagctcaacttcctcgactgcttcactctcagggaactcacccaagactgggacctcagagtgggcagttcctcagcctacaagattaaaatatcggcaaaaatttaatactcttgacaaaagtatgagtggatatctctcaggttttcaagctagaaatgcccttcttcagtcaaatctttctcaaactcagctggctactatttggactctggctgacgttgatggtgatggacagctaaaagcagaagagtttattcttgcaatgcaccttactgacatggccaaagctggacagccattaccactgactttacctcctgagcttgttcctccatctttcagaggaggaaagcaaattgattccattaatggaactctgccttcatatcagaaaatgcaagaagaggagcctcagaagaaattaccagttacttttgaggacaaacggaaagccaactatgagcgagggaacatggagctggaaaagcgacgccaagccttgatggagcagcaacaaagggaggcagaacgtaaagcccagaaagaaaaggaagagtgggaacgaaaacagagagaattacaagaacaagaatggaagaaacaacttgaattagaaaaacgcttagagaagcaacgggaattggagagacaacgagaggaagaaaggagaaaagacatagaaagacgagaggcagcaaaacaggaacttgaacgacaacgtcgcttagaatgggagagaattcggcgacaggagcttctcaatcaaaagaatagagaacaagaagaaattgtcaggttaaactctaaaaagaagaatcttcatcttgagttggaagcactgaatggcaaacatcagcagatctcaggcagacttcaggatgtccgactcaaaaagcaaactcaaaagactgagctggaagttctggataagcagtgtgacttggaaattatggaaatcaagcaacttcaacaggaacttcaggaatatcagaataagcttatctatctggtacctgagaagcaattattaaatgaaagaattaaaaacatgcagttcagtaacacacctgattcaggggtcagtttacttcataaaaaatcattagaaaaggaagaattatgccaaagacttaaagaacagttagatgctcttgaaaaagaaactgcatctaagctgtcagaaatggattcttttaacaatcaactaaaggaactgagagaaacctacaacacacagcagttagcccttgaacagctttataagatcaaacgtgacaagttgaaggaaattgaaaggaaaagattagaactaatgcagaaaaagaaactagaagatgaggctgcaaggaaagcaaagcaaggaaaagaaaacttatggaaagaaaatcttagaaaggaggaagaagaaaaacaaaagcgactccaggaagaaaaaacacaagaaaaaattcaagaagaggaacggaaagctgaggagaaacaacgtaaggataaggatactttgaaagctgaggagaaaaaacgtgagacagctagtgttttggtgaattatagagcattatacccctttgaagcaaggaaccatgatgagatgagttttaattctggagatataattcaggttgatgaaaaaaccgtaggagaacctggttggctttatggtagttttcaaggaaattttggctggtttccatgcaattatgtagaaaaaatgccatcaagtgaaaatgaaaaagctgtatctccaaagaaggccttacttcctcctacagtttctttatctgctacctcaacttcctctgaaccactttcttcaaatcaaccagcatcagtgactgattatcaaaatgtatctttttcaaacctaactgtaaatacatcatggcagaaaaaatcagccttcactcgaactgtgtcccctggatctgtatcacctattcatggacagggacaagtggtagaaaacttaaaagcacaggccctttgttcctggactgcaaagaaagataaccacttgaacttctcaaaacatgacattattactgtcttggagcagcaagaaaattggtggtttggggaggtgcatggaggaagaggatggtttcccaaatcttatgtcaagatcattcctgggagtgaagtaaaacgggaagaaccagaagctttgtatgcagctgtaaataagaaacctacctcggcagcctattcagttggagaagaatatattgcactttatccatattcaagtgtggaacctggagatttgactttcacagaaggtgaagaaatattggtgacccagaaagatggagagtggtggacaggaagtattggagatagaagtggaatttttccatcaaactatgtcaaaccaaaggatcaagagagttttgggagtgctagcaagtctggagcatcaaataaaaaacctgagattgctcaggtaacttcagcatatgttgcttctggttctgaacaacttagccttgcaccaggacagttaatattaattctaaagaaaaatacaagtgggtggtggcaaggagagttacaggccagaggaaaaaagcgacagaaaggatggtttcctgccagtcatgttaaacttttgggtccaagtagtgaaagagccacacctgcctttcatcctgtatgtcaggtgattgctatgtatgactatgcagcaaataatgaagatgagctcagtttctccaagggacaactcattaatgttatgaacaaagatgatcctgattggtggcaaggagagatcaacggggtgactggtctctttccttcaaactacgttaagatgacgacagactcagatccaagtcaacagtggtgtgctgatctgcaaaccctggacacaatgcagccaattgagaggaaaagacagggctatattcatgagctgattcagaccgaagagcggtacatggctgaccttcagctcgtcgtcgaggtttttcagaaacgcatggcagagtcaggctttctcactgaaggggagatggccctgatttttgttaactggaaggagctcatcatgtccaacacaaagctgctgaaggctttgcgggtgcggaagaagaccgggggcgagaagatgccggtgcagatgattggggacatcctggccgctgagctgtcccacatgcaggcttacatcaggttctgcagctgccagcttaatggagcagctctgttacagcagaagacagatgaagacacagatttcaaagaatttttaaagaagctggcatctgacccgcggtgtaaaggaatgcccctctccagcttcctgctgaaacccatgcagaggatcacccgctacccactgctcatcagaagtattctggagaacaccccggagagccatgcagaccattcctccctaaagctggccctcgagcgggcagaggagctgtgctctcaagtgaatgagggagttcgggagaaggaaaactcggaccgactggagtggatccaggcgcacgtgcagtgtgaaggcctcgcggagcaacttattttcaactctctcaccaactgcctggggccccggaagctcttacacagtgggaaattatacaagaccaagagcaacaaggaactgcacggattcctcttcaatgacttcctgcttcttacctacatggtcaagcagtttgctgtttcctctggctctgagaaacttttcagctcgaagtccaatgctcaattcaaaatgtataaaacgcccattttcctgaatgaagtcttggtgaaactgcccacagacccttccagcgatgagcctgtcttccacatttcccacattgatcgggtctacaccctccgaacagacaacattaatgagaggaccgcctgggtgcagaagatcaaggcggcgtctgagcagtacatcgacaccgagaagaagaagcgtgagaaagcttaccaagcccgctcccaaaagacttcaggcattgggcgcctgatggtgcatgtcattgaagctacagaattaaaagcctgcaaaccaaatggaaagagcaacccatactgtgaaatcagcatgggctcccagagctacaccaccaggaccatccaggacacactcaatcccaagtggaattttaactgccagttctttattaaggatctctaccaagacgtgctgtgtctcaccctgtttgacagagaccagttttcaccagatgatttcctgggtcgtactgaaattccagtggcaaaaattcgaacagaacaggaaagcaaaggccctatgacccgccgactgctgctgcatgaggtccccaccggggaggtctgggtccgttttgacctgcagctttttgagcaaaaaactctcctgtaggggttctaaaggacagcaccagcgggacagcccacaaggctggggctggagaatgagagactgcgctctcttggggctgagggagcaccatgcagcttcacccctcacaaagccatgcacgctgggggctctgttttcctgcacactaaatagctagcaatctatgcaaacacctttcccataaagaaaccaaaccccatagtacagtgccttgtcctagtgttcacatgttcagctctgtttgtttagatgccaaggtttccattttcagggctataaaaagtattacttggaaatgaggcatcagaccaccagatgttaccgctcggttgaatgtgtccaccgtggagtggtttggtgacgctgtaaccattccacgccagtgacctctgctgggtcacagccactcaggaggggaagggtcaggatgagaggctgcagcctcgacacttggcgcggcctgatactgaaatagcgtctactcgtgcactgaataaaaacagaaacttgatcattttattcctgattagattttatcactctctgctaagacaatatagtctggagtataagtgggaaagcttgatttaaatactgtgaactctaataatgtggaaaatatttttcaactttaattttctgaagtataaattatttatgtaaattcattgtttttgcatatttcttaggacatgcatctttaagctttatcattgcccatatgtacagaaagagaataaagacatatgtttatggatg

SEQ ID NO: 10234 - DNA, 6048 bp, Homo sapiens
  source 1..6048: mol_type = unassigned DNA
gggaggggcgtgcccagggtgagcacgccctctcatgaatattaataagcgcgcatgcgccctgcccggcgtgctgggtagaggtggccagccccggccgctgctgccagacgggctctccgggtccttctccgagagccgggcgggcacgcgtcattgtgttacctgcggccggcccgcgagctaggctggtttttttttttctcccctccctcccccctttttccatgcagctgatctaaaagggaataaaaggctgcgcataatcataataataaaagaaggggagcgcgagagaaggaaagaaagccgggaggtggaagaggagggggagcgtctcaaagaagcgatcagaataataaaaggaggccgggctctttgccttctggaacgggccgctcttgaaagggcttttgaaaagtggtgttgttttccagtcgtgcatgctccaatcggcggagtatattagagccgggacgcggcggccgcaggggcagcggcgacggcagcaccggcggcagcaccagcgcgaacagcagcggcggcgtcccgagtgcccgcggcgcgcggcgcagcgatgcgttccccacggacgcgcggccggtccgggcgccccctaagcctcctgctcgccctgctctgtgccctgcgagccaaggtgtgtggggcctcgggtcagttcgagttggagatcctgtccatgcagaacgtgaacggggagctgcagaacgggaactgctgcggcggcgcccggaacccgggagaccgcaagtgcacccgcgacgagtgtgacacatacttcaaagtgtgcctcaaggagtatcagtcccgcgtcacggccggggggccctgcagcttcggctcagggtccacgcctgtcatcgggggcaacaccttcaacctcaaggccagccgcggcaacgaccgcaaccgcatcgtgctgcctttcagtttcgcctggccgaggtcctatacgttgcttgtggaggcgtgggattccagtaatgacaccgttcaacctgacagtattattgaaaaggcttctcactcgggcatgatcaaccccagccggcagtggcagacgctgaagcagaacacgggcgttgcccactttgagtatcagatccgcgtgacctgtgatgactactactatggctttggctgcaataagttctgccgccccagagatgacttctttggacactatgcctgtgaccagaatggcaacaaaacttgcatggaaggctggatgggccccgaatgtaacagagctatttgccgacaaggctgcagtcctaagcatgggtcttgcaaactcccaggtgactgcaggtgccagtacggctggcaaggcctgtactgtgataagtgcatcccacacccgggatgcgtccacggcatctgtaatgagccctggcagtgcctctgtgagaccaactggggcggccagctctgtgacaaagatctcaattactgtgggactcatcagccgtgtctcaacgggggaacttgtagcaacacaggccctgacaaatatcagtgttcctgccctgaggggtattcaggacccaactgtgaaattgctgagcacgcctgcctctctgatccctgtcacaacagaggcagctgtaaggagacctccctgggctttgagtgtgagtgttccccaggctggaccggccccacatgctctacaaacattgatgactgttctcctaataactgttcccacgggggcacctgccaggacctggttaacggatttaagtgtgtgtgccccccacagtggactgggaaaacgtgccagttagatgcaaatgaatgtgaggccaaaccttgtgtaaacgccaaatcctgtaagaatctcattgccagctactactgcgactgtcttcccggctggatgggtcagaattgtgacataaatattaatgactgccttggccagtgtcagaatgacgcctcctgtcgggatttggttaatggttatcgctgtatctgtccacctggctatgcaggcgatcactgtgagagagacatcgatgaatgtgccagcaacccctgtttgaatgggggtcactgtcagaatgaaatcaacagattccagtgtctgtgtcccactggtttctctggaaacctctgtcagctggacatcgattattgtgagcctaatccctgccagaacggtgcccagtgctacaaccgtgccagtgactatttctgcaagtgccccgaggactatgagggcaagaactgctcacacctgaaagaccactgccgcacgaccccctgtgaagtgattgacagctgcacagtggccatggcttccaacgacacacctgaaggggtgcggtatatttcctccaacgtctgtggtcctcacgggaagtgcaagagtcagtcgggaggcaaattcacctgtgactgtaacaaaggcttcacgggaacatactgccatgaaaatattaatgactgtgagagcaacccttgtagaaacggtggcacttgcatcgatggtgtcaactcctacaagtgcatctgtagtgacggctgggagggggcctactgtgaaaccaatattaatgactgcagccagaacccctgccacaatgggggcacgtgtcgcgacctggtcaatgacttctactgtgactgtaaaaatgggtggaaaggaaagacctgccactcacgtgacagtcagtgtgatgaggccacgtgcaacaacggtggcacctgctatgatgagggggatgcttttaagtgcatgtgtcctggcggctgggaaggaacaacctgtaacatagcccgaaacagtagctgcctgcccaacccctgccataatgggggcacatgtgtggtcaacggcgagtcctttacgtgcgtctgcaaggaaggctgggaggggcccatctgtgctcagaataccaatgactgcagccctcatccctgttacaacagcggcacctgtgtggatggagacaactggtaccggtgcgaatgtgccccgggttttgctgggcccgactgcagaataaacatcaatgaatgccagtcttcaccttgtgcctttggagcgacctgtgtggatgagatcaatggctaccggtgtgtctgccctccagggcacagtggtgccaagtgccaggaagtttcagggagaccttgcatcaccatggggagtgtgataccagatggggccaaatgggatgatgactgtaatacctgccagtgcctgaatggacggatcgcctgctcaaaggtctggtgtggccctcgaccttgcctgctccacaaagggcacagcgagtgccccagcgggcagagctgcatccccatcctggacgaccagtgcttcgtccacccctgcactggtgtgggcgagtgtcggtcttccagtctccagccggtgaagacaaagtgcacctctgactcctattaccaggataactgtgcgaacatcacatttacctttaacaaggagatgatgtcaccaggtcttactacggagcacatttgcagtgaattgaggaatttgaatattttgaagaatgtttccgctgaatattcaatctacatcgcttgcgagccttccccttcagcgaacaatgaaatacatgtggccatttctgctgaagatatacgggatgatgggaacccgatcaaggaaatcactgacaaaataatcgatcttgttagtaaacgtgatggaaacagctcgctgattgctgccgttgcagaagtaagagttcagaggcggcctctgaagaacagaacagatttccttgttcccttgctgagctctgtcttaactgtggcttggatctgttgcttggtgacggccttctactggtgcctgcggaagcggcggaagccgggcagccacacacactcagcctctgaggacaacaccaccaacaacgtgcgggagcagctgaaccagatcaaaaaccccattgagaaacatggggccaacacggtccccatcaaggattatgagaacaagaactccaaaatgtctaaaataaggacacacaattctgaagtagaagaggacgacatggacaaacaccagcagaaagcccggtttgccaagcagccggcgtacacgctggtagacagagaagagaagccccccaacggcacgccgacaaaacacccaaactggacaaacaaacaggacaacagagacttggaaagtgcccagagcttaaaccgaatggagtacatcgtatagcagaccgcgggcactgccgccgctaggtagagtctgagggcttgtagttctttaaactgtcgtgtcatactcgagtctgaggccgttgctgacttagaatccctgtgttaatttaagttttgacaagctggcttacactggcaatggtagtttctgtggttggctgggaaatcgagtgccgcatctcacagctatgcaaaaagctagtcaacagtaccctggttgtgtgtccccttgcagccgacacggtctcggatcaggctcccaggagcctgcccagccccctggtctttgagctcccacttctgccagatgtcctaatggtgatgcagtcttagatcatagttttatttatatttattgactcttgagttgtttttgtatattggttttatgatgacgtacaagtagttctgtatttgaaagtgcctttgcagctcagaaccacagcaacgatcacaaatgactttattatttattttttttaattgtatttttgttgttgggggaggggagactttgatgtcagcagttgctggtaaaatgaagaatttaaagaaaaaaatgtcaaaagtagaactttgtatagttatgtaaataattcttttttattaatcactgtgtatatttgatttattaacttaataatcaagagccttaaaacatcattcctttttatttatatgtatgtgtttagaattgaaggtttttgatagcattgtaagcgtatggctttatttttttgaactcttctcattacttgttgcctataagccaaaattaaggtgtttgaaaatagtttattttaaaacaataggatgggcttctgtgcccagaatactgatggaatttttttgtacgacgtcagatgtttaaaacaccttctatagcatcacttaaaacacgttttaaggactgactgaggcagtttgaggattagtttagaacaggtttttttgtttgtttgttttttgtttttctgctttagacttgaaaagagacaggcaggtgatctgctgcagagcagtaagggaacaagttgagctatgacttaacatagccaaaatgtgagtggttgaatatgattaaaaatatcaaattaattgtgtgaacttggaagcacaccaatcttactttgtaaattctgatttcttttcaccattcgtacataatactgaaccacttgtagatttgatttttttttttaatctactgcatttagggagtattctaataagctagttgaatacttgaaccataaaatgtccagtaagatcactgtttagatttgccatagagtacactgcctgccttaagtgaggaaatcaaagtgctattacgaagttcaagatcaaaaaggcttataaaacagagtaatcttgttggttcaccattgagaccgtgaagatactttgtattgtcctattagtgttatatgaacatacaaatgcatctttgatgtgttgttcttggcaataaattttgaaaagtaatatttattaaatttttttgtatgaaaacatggaacagtgtggcctcttctgagcttacgtagttctaccggctttgccatgtgcttctgccaccctgctgagtctgttctggtaatcggggtataataggctctgcctgacagagggatggaggaagaactgaaaggcttttcaaccacaaaactcatctggagttctcaaagacctggggctgctgtgaagctggaactgcgggagccccatctaggggagccttgattcccttgttattcaacagcaagtgtgaatactgcttgaataaacaccactggattaatggcc

SEQ ID NO: 10235 - DNA, 3758 bp, Homo sapiens
  source 1..3758: mol_type = unassigned DNA
attgaaacaatccacccggtagagtgaacagcttgaggttgatcctggcctgtgataagagccaggtcagtatacttgttagggacatgtgagagacctccccgccacactgcagcattcacagcacctttcctggacctcctgtcacctcgcaggtcagggagttatgtcccctgggaacccagggcttgtccagagctacccacagttgtctgcatttccaggtagcccgattttggggttctaggatgtttcatctcctgggggggtaatcaaatccctggaagaggacaagaaagactgagaacctgacagtattattgaaaaggcttctcactcgggcatgatcaaccccagccggcagtggcagacgctgaagcagaacacgggcgttgcccactttgagtatcagatccgcgtgacctgtgatgactactactatggctttggctgcaataagttctgccgccccagagatgacttctttggacactatgcctgtgaccagaatggcaacaaaacttgcatggaaggctggatgggccccgaatgtaacagagctatttgccgacaaggctgcagtcctaagcatgggtcttgcaaactcccaggtgactgcaggtgccagtacggctggcaaggcctgtactgtgataagtgcatcccacacccgggatgcgtccacggcatctgtaatgagccctggcagtgcctctgtgagaccaactggggcggccagctctgtgacaaagatctcaattactgtgggactcatcagccgtgtctcaacgggggaacttgtagcaacacaggccctgacaaatatcagtgttcctgccctgaggggtattcaggacccaactgtgaaattgctgagcacgcctgcctctctgatccctgtcacaacagaggcagctgtaaggagacctccctgggctttgagtgtgagtgttccccaggctggaccggccccacatgctctacaaacattgatgactgttctcctaataactgttcccacgggggcacctgccaggacctggttaacggatttaagtgtgtgtgccccccacagtggactgggaaaacgtgccagttagatgcaaatgaatgtgaggccaaaccttgtgtaaacgccaaatcctgtaagaatctcattgccagctactactgcgactgtcttcccggctggatgggtcagaattgtgacataaatattaatgactgccttggccagtgtcagaatgacgcctcctgtcgggatttggttaatggttatcgctgtatctgtccacctggctatgcaggcgatcactgtgagagagacatcgatgaatgtgccagcaacccctgtttgaatgggggtcactgtcagaatgaaatcaacagattccagtgtctgtgtcccactggtttctctggaaacctctgtcagctggacatcgattattgtgagcctaatccctgccagaacggtgcccagtgctacaaccgtgccagtgactatttctgcaagtgccccgaggactatgagggcaagaactgctcacacctgaaagaccactgccgcacgaccccctgtgaagtgattgacagctgcacagtggccatggcttccaacgacacacctgaaggggtgcggtatatttcctccaacgtctgtggtcctcacgggaagtgcaagagtcagtcgggaggcaaattcacctgtgactgtaacaaaggcttcacgggaacatactgccatgaaaatattaatgactgtgagagcaacccttgtagaaacggtggcacttgcatcgatggtgtcaactcctacaagtgcatctgtagtgacggctgggagggggcctactgtgaaaccaatattaatgactgcagccagaacccctgccacaatgggggcacgtgtcgcgacctggtcaatgacttctactgtgactgtaaaaatgggtggaaaggaaagacctgccactcacgtgacagtcagtgtgatgaggccacgtgcaacaacggtggcacctgctatgatgagggggatgcttttaagtgcatgtgtcctggcggctgggaaggaacaacctgtaacatagcccgaaacagtagctgcctgcccaacccctgccataatgggggcacatgtgtggtcaacggcgagtcctttacgtgcgtctgcaaggaaggctgggaggggcccatctgtgctcagaataccaatgactgcagccctcatccctgttacaacagcggcacctgtgtggatggagacaactggtaccggtgcgaatgtgccccgggttttgctgggcccgactgcagaataaacatcaatgaatgccagtcttcaccttgtgcctttggagcgacctgtgtggatgagatcaatggctaccggtgtgtctgccctccagggcacagtggtgccaagtgccaggaagtttcagggagaccttgcatcaccatggggagtgtgataccagatggggccaaatgggatgatgactgtaatacctgccagtgcctgaatggacggatcgcctgctcaaaggtctggtgtggccctcgaccttgcctgctccacaaagggcacagcgagtgccccagcgggcagagctgcatccccatcctggacgaccagtgcttcgtccacccctgcactggtgtgggcgagtgtcggtcttccagtctccagccggtgaagacaaagtgcacctctgactcctattaccaggataactgtgcgaacatcacatttacctttaacaaggagatgatgtcaccaggtcttactacggagcacatttgcagtgaattgaggaatttgaatattttgaagaatgtttccgctgaatattcaatctacatcgcttgcgagccttccccttcagcgaacaatgaaatacatgtggccatttctgctgaagatatacgggatgatgggaacccgatcaaggaaatcactgacaaaataatcgatcttgttagtaaacgtgatggaaacagctcgctgattgctgccgttgcagaagtaagagttcagaggcggcctctgaagaacagaacagatttccttgttcccttgctgagctctgtcttaactgtggcttggatctgttgcttggtgacggccttctactggtgcctgcggaagcggcggaagccgggcagccacacacactcagcctctgaggacaacaccaccaacaacgtgcgggagcagctgaaccagatcaaaaaccccattgagaaacatggggccaacacggtccccatcaaggattatgagaacaagaactccaaaatgtctaaaataaggacacacaattctgaagtagaagaggacgacatggacaaacaccagcagaaagcccggtttgccaagcagccggcgtacacgctggtagacagagaagagaagccccccaacggcacgccgacaaaacacccaaactggacaaacaaacaggacaacagagacttggaaagtgcccagagcttaaaccgaatggagtacatcgtatagcagaccgcgggcactgccgccgctagtgtggcctcttctgagcttacgtagttctaccggctttgccatgtgcttctgccaccctgctgagtctgttctggtaatcggggtataataggctctgcctgacagagggatggaggaagaactgaaaggcttttcaaccacaaaactcatctggagttctcaaagacctggggctgctgtgaagctggaactgcgggagccccatcta

SEQ ID NO: 10236 - DNA, 580 bp, Homo sapiens
  source 1..580: mol_type = unassigned DNA
acacgtgtgtgggtttttaaaaatcgttttagggtcttactacggagcacatttgcagtgaattgaggaatttgaatattttgaagaatgtttccgctgaatattcaatctacatcgcttgcgagccttccccttcagcgaacaatgaaatacatgtggccattgtaagtataagacccattcacacctcattattcgatggcaaggcagttcggttaaccagtgtctgaatggagcaaattcactgacaaaaagctttgcagacacagattgtcgagtaattttgaagaaaggctgctttgagtattcctctgactctcaagtctgacaattgtttttccagtctgctgaagatatacgggatgatgggaacccgatcaaggaaatcactgacaaaataatcgatcttgttagtaaacgtgatggaaacagctcgctgattgctgccgttgcagaagtaagagttcagaggcggcctctgaagaacagaacagatttccttgttcccttgctgagctctgtcttaactgtggcttggatctgttgcttggtgacggccttctactggtgcctgcggaag

SEQ ID NO: 10237 - DNA, 1161 bp, Homo sapiens
  source 1..1161: mol_type = unassigned DNA
ctaggttgggtgattcctcttttctgtaggagtttcttccccactttcacctagtaccggtgactaaatgcccatgtgagggcattaagtgggtaaggcactctctggaagcttctgcttgataagccgcctgtctaatttgagaaacagccctgatggagggtagcaggtggaggtgccaggtgcattgtgtcaggagggagccatgaaaactgctgaacagtgcttgtctatggcttcacaagtccttcagttctttttttgctttactttgtttcatagatattaatgactgtgagagcaacccttgtagaaacggtggcacttgcatcgatggtgtcaactcctacaagtgcatctgtagtgacggctgggagggggcctactgtgaaaccaatattaatgactgcagccagaacccctgccacaatgggggcacgtgtcgcgacctggtcaatgacttctactgtgactgtaaaaatgggtggaaaggaaagacctgccactcacgtgacagtcagtgtgatgaggccacgtgcaacaacggtggcacctgctatgatgagggggatgcttttaagtgcatgtgtcctggcggctgggaaggaacaacctgtaacatagcccgaaacagtagctgcctgcccaacccctgccataatgggggcacatgtgtggtcaacggcgagtcctttacgtgcgtctgcaaggaaggctgggaggggcccatctgtgctcagagtgagtgtcctccccccttgaactctcccagggctgtcggagcagatcctgacacccttggggacttgcaatggaaaccagaagcagagctgtttgatgtctgcttttgtatcacctgggtctgcattaatgacttgatgggatacagccctgacctgggcatgagaaagtcgccaataagataagtggagacagatggcgtctcagttcccagctctgggtctgaccagcagcctgtctccttccattctcacccccacccctatcccctaccagggcctcttcctgtgtacatgtgtcccacagcaaatgaaactaagtgtggtgcgggcctggttccaatttagcaaaggtattttgctggtgttaactacgactttatcatttgggtattaggaaaataagtggtggttttactta

SEQ ID NO: 10238 - DNA, 586 bp, Homo sapiens
  source 1..586: mol_type = unassigned DNA
aaatgctttaaaactctttgcctggagtctcaactttgcctgtcataatgtgatgtggcacgttgccagtatcttggcttccctggggtgtgtctcattagccagagggtccctgtctccaggaaagtgggcttggcccaggcccttggcttaggaatgccgcatctgtgggtgcatggctgtgatctgatcccaagcctatcttctagtgattgacagctgcacagtggccatggcttccaacgacacacctgaaggggtgcggtatatttcctccaacgtctgtggtcctcacgggaagtgcaagagtcagtcgggaggcaaattcacctgtgactgtaacaaaggcttcacgggaacatactgccatgaaaatattaatgactgtgagagcaacccttgtagaaacggtggcacttgcatcgatggtgtcaactcctacaagtgcatctgtagtgacggctgggagggggcctactgtgaaaccaatattaatgactgcagccagaacccctgccacaatgggggcacgtgtcgcgacctggtcaatgacttctactgtgactgtaaaaatgggtggaaagga

SEQ ID NO: 10239 - DNA, 597 bp, Homo sapiens
  source 1..597: mol_type = unassigned DNA
gccccgaggactatgagggcaagaactgctcacacctgaaagaccactgccgcacgaccccctgtgaagtgattgacagctgcacagtggccatggcttccaacgacacacctgaaggggtgcggtatatttcctccaacgtctgtggtcctcacgggaagtgcaagagtcagtcgggaggcaaattcacctgtgactgtaacaaaggcttcacgggaacatactgccatgaaaatattaatgactgtgagagcaacccttgtagaaacggtggcacttgcatcgatggtgtcaactcctacaagtgcatctgtagtgacggctgggagggggcctactgtgaaaccagtgagtctgccactctttggggagctctgggatgtatgggtcatgttggagggatcccacttcaacgtgggaaaactttctttgtactggaaatctctggaagcaagaccgcagtgatttctgcactgggacagtatcacttgtgtctcatttgcatttatgagtcctgatgatagcttatggggaggagcttctgctgaggacctatagaattagactgtgtaataaatattcctgcttgcaaggaaa

SEQ ID NO: 10240 - DNA, 507 bp, Homo sapiens
  source 1..507: mol_type = unassigned DNA
gtgccagttagatgcaaatgaatgtgaggccaaaccttgtgtaaacgccaaatcctgtaagaatctcattgccagctactactgcgactgtcttcccggctggatgggtcagaattgtgacataaatattaatgactgccttggccagtgtcagaatgacgcctcctgtcgggcgatcactgtgagagagacatcgatgaatgtgccagcaacccctgtttgaatgggggtcactgtcagaatgaaatcaacagattccagtgtctgtgtcccactggtttctctggaaacctctgtcagctggacatcgattattgtgagcctaatccctgccagaacggtgcccagtgctacaaccgtgccagtgactatttctgcaagtgccccgaggactatgagggcaagaactgctcacacctgaaagaccactgccgcacgaccccctgtgaagtgattgacagctgcacagtggccatggcttccaacgacacacctgaaggggtgcgg

SEQ ID NO: 10241 - DNA, 756 bp, Homo sapiens
  source 1..756: mol_type = unassigned DNA
aagaatctcattgccagctactactgcgactgtcttcccggctggatgggtcagaattgtgacataaatattaatgactgccttggccagtgtcagaatgacgcctcctgtcgggtatgtaaatctttgcttaaatcaaaactttgacaattgacaacaaatctttagatttgtgcgacactaggagagctctgtccctgtgagatttaaaaatttgggtgaaaaaagagtctcttggaagtttcgctagggcttatgttaccccagcctcgtgggagtcattttgaaggcatgcacatagaaattcctctaaccactttcagaggtttagcatttggctatttcagtgaaccagctaaaccgcaacagtcatgctaaaccgctgaagccctgtgtttgtggaatacatagaaaaaaagcatgtgtctctctctccccttctcctcttctaggatttggttaatggttatcgctgtatctgtccacctggctatgcaggcgatcactgtgagagagacatcgatgaatgtgccagcaacccctgtttgaatgggggtcactgtcagaatgaaatcaacagattccagtgtctgtgtcccactggtttctctggaaacctctgtcagctggacatcgattattgtgagcctaatccctgccagaacggtgcccagtgctacaaccgtgccagtgactatttctgcaagtgccccgaggactatgagggcaagaactgctcacacctgaaagaccact

SEQ ID NO: 10242 - DNA, 837 bp, Homo sapiens
  source 1..837: mol_type = unassigned DNA
gtctaccttcctgtccccagaaacaaaacagaaaaagcctggactttgcagtcttccatttgaattgtacaggtgtctcttaacgttcaaaaggctaacctggaggtgtgctgtgtgtctccaggtgccagtacggctggcaaggcctgtactgtgataagtgcatcccacacccgggatgcgtccacggcatctgtaatgagccctggcagtgcctctgtgagaccaactggggcggccagctctgtgacaaagatctcaattactgtgggactcatcagccgtgtctcaacgggggaacttgtagcaacacaggccctgacaaatatcagtgttcctgccctgaggggtattcaggacccaactgtgaaattgctgagcacgcctgcctctctgatccctgtcacaacagaggcagctgtaaggagacctccctgggctttgagtgtgagtgttccccaggctggaccggccccacatgctctacaagtaagtccaattttcagcctgtgtccattctaaggatccttgtgccaagataccacgctggggagaggtacctaggcttgtccagtgtgaatgtctcggtgagagaggggcgggtgcaggcctaagtctggtaagcagtctggtggcttgtgtgtttggaagtctcccagcacccccatcctgtcccactaaggtagcgcatgtatctgttcttggaaggaacgtcctcgtggaatcgcttgttcctttgcatctgcttcctggagctggccaccttccaattgtggttattcttcttgcagccatggagaggctgccttcaggggaggttgtcacttactactggat

SEQ ID NO: 10243 - DNA, 1757 bp, Homo sapiens
  source 1..1757: mol_type = unassigned DNA
agccaacgaggggaagaaaggagttggggcaaaacaggaggcgtttccctacccgcatacatccccgtccccgagacacccaatccccccacccccagcctgcccgcgcctcccgcccccagctcctcgccctggggacagctggcagccccgcgcggaccagacacaaagccgatcaatcccggaggcgtgggggcggagggacgacccgccggggctttcccgggcgctgctctcctcctgctgccccctcgctaggacccggcggacgcctcgtctggttttcacgccctctagcccctacccccacacccccaaaacagaacagacccccatccctgggctggaggacccgcctcttggcagccagctgagaaggcgccccggggagggggaaactgacatcccatctagagccgtccctcctcttcctcccctcccgactctctgctcctttcccgccccagaagttcaagggcccccggcctcctgcgctcctgccgccgggaccctcgacctcctcagagcagccggctgccgccccgggaagatggcgaggaggagccgccaccgcctcctcctgctgctgctgcgctacctggtggtcgccctgggctatcataaggcctatgggttttctgccccaaaagaccaacaagtagtcacagcagtagagtaccaagaggctattttagcctgcaaaaccccaaagaagactgtttcctccagattagagtggaagaaactgggtcggagtgtctcctttgtctactatcaacagactcttcaaggtgattttaaaaatcgagctgagatgatagatttcaatatccggatcaaaaatgtgacaagaagtgatgcggggaaatatcgttgtgaagttagtgccccatctgagcaaggccaaaacctggaagaggatacagtcactctggaagtattagtggctccagcagttccatcatgtgaagtaccctcttctgctctgagtggaactgtggtagagctacgatgtcaagacaaagaagggaatccagctcctgaatacacatggtttaaggatggcatccgtttgctagaaaatcccagacttggctcccaaagcaccaacagctcatacacaatgaatacaaaaactggaactctgcaatttaatactgtttccaaactggacactggagaatattcctgtgaagcccgcaattctgttggatatcgcaggtgtcctgggaaacgaatgcaagtagatgatctcaacataagtggcatcatagcagccgtagtagttgtggccttagtgatttccgtttgtggccttggtgtatgctatgctcagaggaaaggctacttttcaaaagaaacctccttccagaagagtaattcttcatctaaagccacgacaatgagtgaaaatgtgcagtggctcacgcctgtaatcccagcactttggaaggccgcggcgggcggatcacgaggtcaggagttctagaccagtctggccaatatggtgaaaccccatctctactaaaatacaaaaattagctgggcatggtggcatgtgcctgcagttccagctgcttgggagacaggagaatcacttgaacccgggaggcggaggttgcagtgagctgagatcacgccactgcagtccagcctgggtaacagagcaagattccatctcaaaaaataaaataaataaataaataaatactggtttttacctgtagaattcttacaataaatatagcttgatattc

SEQ ID NO: 10244 - DNA, 4337 bp, Homo sapiens
  source 1..4337: mol_type = unassigned DNA
agccaacgaggggaagaaaggagttggggcaaaacaggaggcgtttccctacccgcatacatccccgtccccgagacacccaatccccccacccccagcctgcccgcgcctcccgcccccagctcctcgccctggggacagctggcagccccgcgcggaccagacacaaagccgatcaatcccggaggcgtgggggcggagggacgacccgccggggctttcccgggcgctgctctcctcctgctgccccctcgctaggacccggcggacgcctcgtctggttttcacgccctctagcccctacccccacacccccaaaacagaacagacccccatccctgggctggaggacccgcctcttggcagccagctgagaaggcgccccggggagggggaaactgacatcccatctagagccgtccctcctcttcctcccctcccgactctctgctcctttcccgccccagaagttcaagggcccccggcctcctgcgctcctgccgccgggaccctcgacctcctcagagcagccggctgccgccccgggaagatggcgaggaggagccgccaccgcctcctcctgctgctgctgcgctacctggtggtcgccctgggctatcataaggcctatgggttttctgccccaaaagaccaacaagtagtcacagcagtagagtaccaagaggctattttagcctgcaaaaccccaaagaagactgtttcctccagattagagtggaagaaactgggtcggagtgtctcctttgtctactatcaacagactcttcaaggtgattttaaaaatcgagctgagatgatagatttcaatatccggatcaaaaatgtgacaagaagtgatgcggggaaatatcgttgtgaagttagtgccccatctgagcaaggccaaaacctggaagaggatacagtcactctggaagtattagtggctccagcagttccatcatgtgaagtaccctcttctgctctgagtggaactgtggtagagctacgatgtcaagacaaagaagggaatccagctcctgaatacacatggtttaaggatggcatccgtttgctagaaaatcccagacttggctcccaaagcaccaacagctcatacacaatgaatacaaaaactggaactctgcaatttaatactgtttccaaactggacactggagaatattcctgtgaagcccgcaattctgttggatatcgcaggtgtcctgggaaacgaatgcaagtagatgatctcaacataagtggcatcatagcagccgtagtagttgtggccttagtgatttccgtttgtggccttggtgtatgctatgctcagaggaaaggctacttttcaaaagaaacctccttccagaagagtaattcttcatctaaagccacgacaatgagtgaaaatgatttcaagcacacaaaatcctttataatttaaagactccactttagagatacaccaaagccaccgttgttacacaagttattaaactattataaaactctgctttgtccgacatttgcaaagaggtacacgaggaaatggaattggtatttcattttaattttcatgactactaactcacctgaacttgctattttaaacaaatagttctgtcgacacctaaaatataatctggcttcttgtgtctggactaagttaaaagaattaaaatactttgtaatgtcctgggctttgggaaatgttaaccacgtcctaacttctagagaacgttactaaaatataacatactgattgtgaagtcaatccacaggtcatgaaaatataaatcagactctgcacgagagtctgatttagggggtccaacaaatactctgacagatgcaaaaggaacctctggtctcatttctgccagaatcctcttttctcccctaatatcatccttattctgatgctcgttcatcactaacacacccacagaaaggaggaagcgggatgggtcttatgcccaaggatttgcactttgtgtttacttccattcctgggaactaaaagcaacatcaaaagaaatgcctaatggctggagcccacaggtgtgcaccacaggatttgcctggtgtgtgtcactgatttcttcattaaacgtaatttagatggtcaaacacaaacccaagtggcttatttcacccctactgctgcttgccactgcttccttcttgtaagatttctttgaagaggatcagtgactttgacatcagaactcaccactggagcctacacaagtttgcagatacctttccctgcaggagtggtgacttcacatctttctgtctctaaaaattgtgcagtgacattccgggccaagtcccttagtcaggggttgacaattctgcttttggacaaggagggatgtggagggaagaagtaatagtctaccaggaaaatgagacgaaaaagctcagtatgactccctgcatctggtacccctcttgaaacacagtgggcacatgagcaatggctcaaacgaaaagtggatctaatgtgggtttctcaaccgatgaaccacaaaagcttccagctactattacaatgtgaaaattccaatgatccgtttaccagagcaattagactatgttaaaaattcatatcatttgtaacttcttttaattactgaattgatattaaaaacaaaatatggctagggcatgtcctattcttctgggcaaatgtggatgaaaaggtcacttgctacctttgacaactatgaacatgatggttaatcttctttctttttttttttttttttttgagacggagtctcactctgtcgcccaggctggagtacagtggcacaatcttggctcactgcaacctccgcctcccctccgcctcccagattcaagcacttctcctgcctcagcctcccaagtagctgagattataggcgtgtaccaccacacctggctaatttttgtattttagtagagaagggtttcaccatgttggccaggctggtctcaaacctctgacctcaaatgatccacccccatcagcctcccaaagtgctgggattataggcatgagccactgcactgggcaggttaatcttctttcaaaagagtctgctctttctacccaattggcgaagcaaatccccaggattcaccgaacaaatggattaagcacccactgagtgcctagcatgtgcctggacaccaggccaccgggaagatgctccccctttgacttgtctatgacatgctatgtctctcaccagatcccttcctggaggtcgggcttctgtaacatggctctgcccccaaaataaaattttcaccacgagtcagggatcggcaaacattttctgtaaagagccagaaagtagatattttaagtcataaggtccctgttaacaactacttgactctgccattgtagcacaaaggcagccacagacaaaacaagcaagtagtcatgtctgtgttccaataagactttatttacaaaaacagcaggcacagacaagatttggcccacaggcatagattcccaactcatggtggtgaagtacagaaaaaaacacctgtctacaagcttttgtaagaaatcaggctaaatgttacctatgttttggttggaagatttctttggtttgaggaatgctttcctcttgcattggcatgccaagaggatagatgactctgaaagacgcctcttcagacatacctgtcatcacacaagatcaacttcttcagtttaaatgacacaaatccatattgtggaaggaaaatatgtagtgccttagcttcactaatagttgtaaaacttctttttaagacatcaaaggctagaggattcattttatgcagtgcgaacatctaataacactctctgtgtcaaatatatattgtacattaccttaaactattgtaatagctaggtaaaaatccttgtataaaagaatgttttcccccacacaaagggcagagtattgagcactaatttcctattaaaagtatatatatgtatctgtgggtcactggtgtccagacttgtatttgcatttgtgtttacttgaggaacttgaacactaacaactggtaaaatcccattgtaattcttacagcattttgactttattttcctgcagtgaattgtgttgtgtaaagattagggctttaaaatcttattagcaagctttgttttgttttaattattgttgctgttgtaactagatttaatttatttttagttggaggtttgacctaagtctggaccaattgattgcttttcaatacaactttgcaaagaacttcctttttccacaggtggctttgttcgattaaagtctacactaataaaaata

SEQ ID NO: 10245 - DNA, 1025 bp, Homo sapiens
  source 1..1025: mol_type = unassigned DNA
aggctattttagcctgcaaaaccccaaagaagactgtttcctccagattagagtggaagaaactgggtcggagtgtctcctttgtctactatcaacagactcttcaaggtgattttaaaaatcgagctgagatgatagatttcaatatccggatcaaaaatgtgacaagaagtgatgcggggaaatatcgttgtgaagttagtgccccatctgagcaaggccaaaacctggaagaggatacagtcactctggaagtattagtggctccagcagttccatcatgtgaagtaccctcttctgctctgagtggaactgtggtagagctacgatgtcaagacaaagaagggaatccagctcctgaatacacatggtttaaggatggcatccgtttgctagaaaatcccagacttggctcccaaagcaccaacagctcatacacaatgaatacaaaaactggaactctgcaatttaatactgtttccaaactggacactggagaatattcctgtgaagcccgcaattctgttggatatcgcaggtgtcctgggaaacgaatgcaagtagatgatctcaacataagtggcatcatagcagccgtagtagttgtggccttagtgatttccgtttgtggccttggtgtatgctatgctcagaggaaaggctacttttcaaaagaaacctccttccaatctggcagacctaactttggctctatgggcgtagagagaagatggatgacaaactatctgaggctatggcagctgggagtggagaagatatactgaagccatggcttcagacagtttgtcatctcctaattcctttgaagaatcatctgccattgacttcctgttcccagatttctggctcaatcctggtctctcagtctcgaagagtaattcttcatctaaagccacgacaatgagtgaaaatgatttcaagcacacaaaatcctttataatttaaagactccactttagagatacaccaaagccaccgttgttacacaagttattaaactatta

SEQ ID NO: 10246 - DNA, 946 bp, Homo sapiens
  source 1..946: mol_type = unassigned DNA
tactgtttccaaactggacactggagaatattcctgtgaagcccgcaattctgttggatatcgcaggtgtcctgggaaacgaatgcaagtagatgatctcaacataagtggcatcatagcagccgtagtagttgtggccttagtgatttccgtttgtggccttggtgtatgctatgctcagaggaaaggctacttttcaaaagaaacctccttccagtaagtatactttcctacaatgcatgtctttctcctatgtcaactaattttctattaatcatctgtttaaagtcaaaagagagaagttgggttatttgtgtaggtttactctcacaagaagttactcaagtttatcaagaaatacatctgtattaggctgttcttgcattgctgtaagaaaatacccgagactgggtagtttattgtaaaaagaggtttaattggctcacggttctgcaagctgtacaatcctggcaccaacactgcttggcttttggggaggcctcaggaagctttttactcatggctgaaggcaaagcgggagcaggcacgtcacatggcaaaagcaggagcaaggttggggaggtgccacatacttttaaacaaccagatttcaagaaaactcagtcactattctgaggacagcatcaagggggcggtactaaaccattcatgagaaatccgcccccatgatttaatcggctccaacaaaccccacctccaacattggggattacaattcaacataagatttgggcaaggcaaatatccagactctatcaacatcccacttcacacttcatacctacttgtaaatggtagtacagagagaatgatgattacccagcctacttgtaaatggtagtacagagagaatgatgattacccagacaagaaatatggtcactaatttgatttcataggcatttgtataaactaacttaaaaaa

SEQ ID NO: 10247 - DNA, 311 bp, Homo sapiens
  source 1..311: mol_type = unassigned DNA
ctctatgggcgtagagagaagatggatgacaaactatctgaggctatggcagctgggagtggagaagatatactgaagccatggcttcagacagtttgtcatctcctaattcctttgaagaatcatctgccattgacttcctgttcccagatttctggctcaatcctggaagagtaattcttcatctaaagccacgacaatgagtgaaaatgatttcaagcacacaaaatcctttataatttaaagactccactttagagatacaccaaagccaccgttgttacacaagttattaaactattataaaactc

SEQ ID NO: 10248 - DNA, 614 bp, Homo sapiens
  source 1..614: mol_type = unassigned DNA
aaaatattaaatgttaatatattaaattaaaagttagtaagtctctggtttgtgtattccacaaaaatctttagtatactagccacaagctacatttacgtgcacaaggcttcacactgatgttttgttgcatgactttctctgtgaatattgtctgtaaatataagaaattcagtaagaattgtctttttttctacctaagatatatgttcatgttcttgctgagaaaatgtatggaagtaaaattaactaaaagagcatatatgttccagattggaagtgataatgtagtaaatattgtcttttatattccacaaacaggaagagtaattcttcatctaaagccacgacaatgagtgaaaatgatttcaagcacacaaaatcctttataatttaaagactccactttagagatacaccaaagccaccgttgttacacaagttattaaactattataaaactctgctttgtccgacatttgcaaagaggtacacgaggaaatggaattggtatttcattttaattttcatgactactaactcacctgaacttgctattttaaacaaatagttctgtcgacacctaaaatataatctggcttcttgtgtctgga

SEQ ID NO: 10249 - DNA, 4209 bp, Homo sapiens
  source 1..4209: mol_type = unassigned DNA
gggaagaaaggagttggggcaaaacaggaggcgtttccctacccgcatacatccccgtccccgagacacccaatccccccacccccagcctgcccgcgcctcccgcccccagctcctcgccctggggacagctggcagccccgcgcggaccagacacaaagccgatcaatcccggaggcgtgggggcggagggacgacccgccggggctttcccgggcgctgctctcctcctgctgccccctcgctaggacccggcggacgcctcgtctggttttcacgccctctagcccctacccccacacccccaaaacagaacagacccccatccctgggctggaggacccgcctcttggcagccagctgagaaggcgccccggggagggggaaactgacatcccatctagagccgtccctcctcttcctcccctcccgactctctgctcctttcccgccccagaagttcaagggcccccggcctcctgcgctcctgccgccgggaccctcgacctcctcagagcagccggctgccgccccgggaagatggcgaggaggagccgccaccgcctcctcctgctgctgctgcgctacctggtggtcgccctgggctatcataaggcctatgggttttctgccccaaaagaccaacaagtagtcacagcagtagagtaccaaggtgattttaaaaatcgagctgagatgatagatttcaatatccggatcaaaaatgtgacaagaagtgatgcggggaaatatcgttgtgaagttagtgccccatctgagcaaggccaaaacctggaagaggatacagtcactctggaagtattagtggctccagcagttccatcatgtgaagtaccctcttctgctctgagtggaactgtggtagagctacgatgtcaagacaaagaagggaatccagctcctgaatacacatggtttaaggatggcatccgtttgctagaaaatcccagacttggctcccaaagcaccaacagctcatacacaatgaatacaaaaactggaactctgcaatttaatactgtttccaaactggacactggagaatattcctgtgaagcccgcaattctgttggatatcgcaggtgtcctgggaaacgaatgcaagtagatgatctcaacataagtggcatcatagcagccgtagtagttgtggccttagtgatttccgtttgtggccttggtgtatgctatgctcagaggaaaggctacttttcaaaagaaacctccttccagaagagtaattcttcatctaaagccacgacaatgagtgaaaatgatttcaagcacacaaaatcctttataatttaaagactccactttagagatacaccaaagccaccgttgttacacaagttattaaactattataaaactctgctttgtccgacatttgcaaagaggtacacgaggaaatggaattggtatttcattttaattttcatgactactaactcacctgaacttgctattttaaacaaatagttctgtcgacacctaaaatataatctggcttcttgtgtctggactaagttaaaagaattaaaatactttgtaatgtcctgggctttgggaaatgttaaccacgtcctaacttctagagaacgttactaaaatataacatactgattgtgaagtcaatccacaggtcatgaaaatataaatcagactctgcacgagagtctgatttagggggtccaacaaatactctgacagatgcaaaaggaacctctggtctcatttctgccagaatcctcttttctcccctaatatcatccttattctgatgctcgttcatcactaacacacccacagaaaggaggaagcgggatgggtcttatgcccaaggatttgcactttgtgtttacttccattcctgggaactaaaagcaacatcaaaagaaatgcctaatggctggagcccacaggtgtgcaccacaggatttgcctggtgtgtgtcactgatttcttcattaaacgtaatttagatggtcaaacacaaacccaagtggcttatttcacccctactgctgcttgccactgcttccttcttgtaagatttctttgaagaggatcagtgactttgacatcagaactcaccactggagcctacacaagtttgcagatacctttccctgcaggagtggtgacttcacatctttctgtctctaaaaattgtgcagtgacattccgggccaagtcccttagtcaggggttgacaattctgcttttggacaaggagggatgtggagggaagaagtaatagtctaccaggaaaatgagacgaaaaagctcagtatgactccctgcatctggtacccctcttgaaacacagtgggcacatgagcaatggctcaaacgaaaagtggatctaatgtgggtttctcaaccgatgaaccacaaaagcttccagctactattacaatgtgaaaattccaatgatccgtttaccagagcaattagactatgttaaaaattcatatcatttgtaacttcttttaattactgaattgatattaaaaacaaaatatggctagggcatgtcctattcttctgggcaaatgtggatgaaaaggtcacttgctacctttgacaactatgaacatgatggttaatcttctttctttttttttttttttttttgagacggagtctcactctgtcgcccaggctggagtacagtggcacaatcttggctcactgcaacctccgcctcccctccgcctcccagattcaagcacttctcctgcctcagcctcccaagtagctgagattataggcgtgtaccaccacacctggctaatttttgtattttagtagagaagggtttcaccatgttggccaggctggtctcaaacctctgacctcaaatgatccacccccatcagcctcccaaagtgctgggattataggcatgagccactgcactgggcaggttaatcttctttcaaaagagtctgctctttctacccaattggcgaagcaaatccccaggattcaccgaacaaatggattaagcacccactgagtgcctagcatgtgcctggacaccaggccaccgggaagatgctccccctttgacttgtctatgacatgctatgtctctcaccagatcccttcctggaggtcgggcttctgtaacatggctctgcccccaaaataaaattttcaccacgagtcagggatcggcaaacattttctgtaaagagccagaaagtagatattttaagtcataaggtccctgttaacaactacttgactctgccattgtagcacaaaggcagccacagacaaaacaagcaagtagtcatgtctgtgttccaataagactttatttacaaaaacagcaggcacagacaagatttggcccacaggcatagattcccaactcatggtggtgaagtacagaaaaaaacacctgtctacaagcttttgtaagaaatcaggctaaatgttacctatgttttggttggaagatttctttggtttgaggaatgctttcctcttgcattggcatgccaagaggatagatgactctgaaagacgcctcttcagacatacctgtcatcacacaagatcaacttcttcagtttaaatgacacaaatccatattgtggaaggaaaatatgtagtgccttagcttcactaatagttgtaaaacttctttttaagacatcaaaggctagaggattcattttatgcagtgcgaacatctaataacactctctgtgtcaaatatatattgtacattaccttaaactattgtaatagctaggtaaaaatccttgtataaaagaatgttttcccccacacaaagggcagagtattgagcactaatttcctattaaaagtatatatatgtatctgtgggtcactggtgtccagacttgtatttgcatttgtgtttacttgaggaacttgaacactaacaactggtaaaatcccattgtaattcttacagcattttgactttattttcctgcagtgaattgtgttgtgtaaagattagggctttaaaatcttattagcaagctttgttttgttttaattattgttgctgttgtaactagatttaatttatttttagttggaggtttgacctaagtctggaccaattgattgcttttcaatacaactttgcaaagaacttcctttttccacaggtggctttgttcgattaaagtctacact

SEQ ID NO: 10250 - DNA, 3912 bp, Homo sapiens
  source 1..3912: mol_type = unassigned DNA
tagacctcagcttcctctgtcaccatggtgccggctcggctgggcccggcggtcgccatggtaactggggcgggtcgcagggtcctggcaggctgggcgcatgcgcgcggggactacaagccgcgccgcgctgccgctggcccctcagcaaccctcgacatggcgctgaggcggccaccgcgactccggctctgcgctcggctgcctgacttcttcctgctgctgcttttcaggggctgcctgataggggctgtaaatctcaaatccagcaatcgaaccccagtggtacaggaatttgaaagtgtggaactgtcttgcatcattacggattcgcagacaagtgaccccaggatcgagtggaagaaaattcaagatgaacaaaccacatatgtgttttttgacaacaaaattcagggagacttggcgggtcgtgcagaaatactggggaagacatccctgaagatctggaatgtgacacggagagactcagccctttatcgctgtgaggtcgttgctcgaaatgaccgcaaggaaattgatgagattgtgatcgagttaactgtgcaagtgaagccagtgacccctgtctgtagagtgccgaaggctgtaccagtaggcaagatggcaacactgcactgccaggagagtgagggccacccccggcctcactacagctggtatcgcaatgatgtaccactgcccacggattccagagccaatcccagatttcgcaattcttctttccacttaaactctgaaacaggcactttggtgttcactgctgttcacaaggacgactctgggcagtactactgcattgcttccaatgacgcaggctcagccaggtgtgaggagcaggagatggaagtctatgacctgaacattggcggaattattgggggggttctggttgtccttgctgtactggccctgatcacgttgggcatctgctgtgcatacagacgtggctacttcatcaacaataaacaggatggagaaagttacaagaacccagggaaaccagatggagttaactacatccgcactgacgaggagggcgacttcagacacaagtcatcgtttgtgatctgagacccgcggtgtggctgagagcgcacagagcgcacgtgcacatacctctgctagaaactcctgtcaaggcagcgagagctgatgcactcggacagagctagacactcattcagaagcttttcgttttggccaaagttgaccactactcttcttactctaacaagccacatgaatagaagaattttcctcaagatggacccggtaaatataaccacaaggaagcgaaactgggtgcgttcactgagttgggttcctaatctgtttctggcctgattcccgcatgagtattagggtgatcttaaagagtttgctcacgtaaacgcccgtgctgggccctgtgaagccagcatgttcaccactggtcgttcagcagccacgacagcaccatgtgagatggcgaggtggctggacagcaccagcagcgcatcccggcgggaacccagaaaaggcttcttacacagcagccttacttcatcggcccacagacaccaccgcagtttcttcttaaaggctctgctgatcggtgttgcagtgtccattgtggagaagctttttggatcagcattttgtaaaaacaaccaaaatcaggaaggtaaattggttgctggaagagggatcttgcctgaggaaccctgcttgtccaacagggtgtcaggatttaaggaaaaccttcgtcttaggctaagtctgaaatggtactgaaatatgcttttctatgggtcttgtttattttataaaattttacatctaaatttttgctaaggatgtattttgattattgaaaagaaaatttctatttaaactgtaaatatattgtcatacaatgttaaataacctatttttttaaaaaagttcaacttaaggtagaagttccaagctactagtgttaaattggaaaatatcaataattaagagtattttacccaaggaatcctctcatggaagtttactgtgatgttccttttctcacacaagttttagcctttttcacaagggaactcatactgtctacacatcagaccatagttgcttaggaaacctttaaaaattccagttaagcaatgttgaaatcagtttgcatctcttcaaaagaaacctctcaggttagctttgaactgcctcttcctgagatgactaggacagtctgtacccagaggccacccagaagccctcagatgtacatacacagatgccagtcagctcctggggttgcgccaggcgcccccgctctagctcactgttgcctcgctgtctgccaggaggccctgccatccttgggccctggcagtggctgtgtcccagtgagctttactcacgtggcccttgcttcatccagcacagctctcaggtgggcactgcagggacactggtgtcttccatgtagcgtcccagctttgggctcctgtaacagacctctttttggttatggatggctcacaaaatagggcccccaatgctattttttttttttaagtttgtttaattatttgttaagattgtctaaggccaaaggcaattgcgaaatcaagtctgtcaagtacaataacatttttaaaagaaaatggatcccactgttcctctttgccacagagaaagcacccagacgccacaggctctgtcgcatttcaaaacaaaccatgatggagtggcggccagtccagccttttaaagaacgtcaggtggagcagccaggtgaaaggcctggcggggaggaaagtgaaacgcctgaatcaaaagcagttttctaattttgactttaaatttttcatccgccggagacactgctcccatttgtggggggacattagcaacatcactcagaagcctgtgttcttcaagagcaggtgttctcagcctcacatgccctgccgtgctggactcaggactgaagtgctgtaaagcaaggagctgctgagaaggagcactccactgtgtgcctggagaatggctctcactactcaccttgtctttcagcttccagtgtcttgggttttttatactttgacagcttttttttaattgcatacatgagactgtgttgactttttttagttatgtgaaacactttgccgcaggccgcctggcagaggcaggaaatgctccagcagtggctcagtgctccctggtgtctgctgcatggcatcctggatgcttagcatgcaagttccctccatcattgccaccttggtagagagggatggctccccaccctcagcgttggggattcacgctccagcctccttcttggttgtcatagtgatagggtagccttattgccccctcttcttataccctaaaaccttctacactagtgccatgggaaccaggtctgaaaaagtagagagaagtgaaagtagagtctgggaagtagctgcctataactgagactagacggaaaaggaatactcgtgtattttaagatatgaatgtgactcaagactcgaggccgatacgaggctgtgattctgcctttggatggatgttgctgtacacagatgctacagacttgtactaacacaccgtaatttggcatttgtttaacctcatttataaaagcttcaaaaaaacccaaacattgcttcattctttgttatttgctcttacgttgggtttgtctcttcttcctagcatttcagtggttaggcatgcacactaaaaatgctatcaatcacccatccaccagggaagtcagtgctgggcaggaggtcagcctgtgtgctcaagagcagtgctgcgcctctccgccaccgagcccacctgtgttgcggttcccacttgggatggcagtgggcagatctcagtggcatcccatcccccaaa

SEQ ID NO: 10251 - DNA, 564 bp, Homo sapiens
  source 1..564: mol_type = unassigned DNA
agcaaccctcgacatggcgctgaggcggccaccgcgactccggctctgcgctcggctgcctgacttcttcctgctgctgcttttcagggagtcaagtctagtctgctttccaaggctgcattctaagtagtgaagcctcaacttcatatttacctaaagcaggacaccacactcttcccctggcagccatccgcaggctgcctgataggggctgtaaatctcaaatccagcaatcgaaccccagtggtacaggaatttgaaagtgtggaactgtcttgcatcattacggattcgcagacaagtgaccccaggatcgagtggaagaaaattcaagatgaacaaaccacatatgtgttttttgacaacaaaattcagggagacttggcgggtcgtgcagaaatactggggaagacatccctgaagatctggaatgtgacacggagagactcagccctttatcgctgtgaggtcgttgctcgaaatgaccgcaaggaaattgatgagattgtgatcgagttaactgtgcaagtgaagccagtgacccctgtctgtagagtgccgaag

SEQ ID NO: 10252 - DNA, 385 bp, Homo sapiens
  source 1..385: mol_type = unassigned DNA
agcaaccctcgacatggcgctgaggcggccaccgcgactccggctctgcgctcggctgcctgacttcttcctgctgctgcttttcaggggagacttggcgggtcgtgcagaaatactggggaagacatccctgaagatctggaatgtgacacggagagactcagccctttatcgctgtgaggtcgttgctcgaaatgaccgcaaggaaattgatgagattgtgatcgagttaactgtgcaagtgaagccagtgacccctgtctgtagagtgccgaaggctgtaccagtaggcaagatggcaacactgcactgccaggagagtgagggccacccccggcctcactacagctggtatcgcaatgatgtaccactgcccacggattcc

SEQ ID NO: 10253 - DNA, 3363 bp, Homo sapiens
  source 1..3363: mol_type = unassigned DNA
agcaaccctcgacatggcgctgaggcggccaccgcgactccggctctgcgctcggctgcctgacttcttcctgctgctgcttttcaggggctgcctgataggggctgtaaatctcaaatccagcaatcgaaccccagtggtacaggaatttgaaagtgtggaactgtcttgcatcattacggattcgcagacaagtgaccccaggatcgagtggaagaaaattcaagatgaacaaaccacatatgtgttttttgacaacaaaattcaggtgaagccagtgacccctgtctgtagagtgccgaaggctgtaccagtaggcaagatggcaacactgcactgccaggagagtgagggccacccccggcctcactacagctggtatcgcaatgatgtaccactgcccacggattccagagccaatcccagatttcgcaattcttctttccacttaaactctgaaacaggcactttggtgttcactgctgttcacaaggacgactctgggcagtactactgcattgcttccaatgacgcaggctcagccaggtgtgaggagcaggagatggaagtctatgacctgaacattggcggaattattgggggggttctggttgtccttgctgtactggccctgatcacgttgggcatctgctgtgcatacagacgtggctacttcatcaacaataaacaggatggagaaagttacaagaacccagggaaaccagatggagttaactacatccgcactgacgaggagggcgacttcagacacaagtcatcgtttgtgatctgagacccgcggtgtggctgagagcgcacagagcgcacgtgcacatacctctgctagaaactcctgtcaaggcagcgagagctgatgcactcggacagagctagacactcattcagaagcttttcgttttggccaaagttgaccactactcttcttactctaacaagccacatgaatagaagaattttcctcaagatggacccggtaaatataaccacaaggaagcgaaactgggtgcgttcactgagttgggttcctaatctgtttctggcctgattcccgcatgagtattagggtgatcttaaagagtttgctcacgtaaacgcccgtgctgggccctgtgaagccagcatgttcaccactggtcgttcagcagccacgacagcaccatgtgagatggcgaggtggctggacagcaccagcagcgcatcccggcgggaacccagaaaaggcttcttacacagcagccttacttcatcggcccacagacaccaccgcagtttcttcttaaaggctctgctgatcggtgttgcagtgtccattgtggagaagctttttggatcagcattttgtaaaaacaaccaaaatcaggaaggtaaattggttgctggaagagggatcttgcctgaggaaccctgcttgtccaacagggtgtcaggatttaaggaaaaccttcgtcttaggctaagtctgaaatggtactgaaatatgcttttctatgggtcttgtttattttataaaattttacatctaaatttttgctaaggatgtattttgattattgaaaagaaaatttctatttaaactgtaaatatattgtcatacaatgttaaataacctatttttttaaaaaagttcaacttaaggtagaagttccaagctactagtgttaaattggaaaatatcaataattaagagtattttacccaaggaatcctctcatggaagtttactgtgatgttccttttctcacacaagttttagcctttttcacaagggaactcatactgtctacacatcagaccatagttgcttaggaaacctttaaaaattccagttaagcaatgttgaaatcagtttgcatctcttcaaaagaaacctctcaggttagctttgaactgcctcttcctgagatgactaggacagtctgtacccagaggccacccagaagccctcagatgtacatacacagatgccagtcagctcctggggttgcgccaggcgcccccgctctagctcactgttgcctcgctgtctgccaggaggccctgccatccttgggccctggcagtggctgtgtcccagtgagctttactcacgtggcccttgcttcatccagcacagctctcaggtgggcactgcagggacactggtgtcttccatgtagcgtcccagctttgggctcctgtaacagacctctttttggttatggatggctcacaaaatagggcccccaatgctattttttttttttaagtttgtttaattatttgttaagattgtctaaggccaaaggcaattgcgaaatcaagtctgtcaagtacaataacatttttaaaagaaaatggatcccactgttcctctttgccacagagaaagcacccagacgccacaggctctgtcgcatttcaaaacaaaccatgatggagtggcggccagtccagccttttaaagaacgtcaggtggagcagccaggtgaaaggcctggcggggaggaaagtgaaacgcctgaatcaaaagcagttttctaattttgactttaaatttttcatccgccggagacactgctcccatttgtggggggacattagcaacatcactcagaagcctgtgttcttcaagagcaggtgttctcagcctcacatgccctgccgtgctggactcaggactgaagtgctgtaaagcaaggagctgctgagaaggagcactccactgtgtgcctggagaatggctctcactactcaccttgtctttcagcttccagtgtcttgggttttttatactttgacagcttttttttaattgcatacatgagactgtgttgactttttttagttatgtgaaacactttgccgcaggccgcctggcagaggcaggaaatgctccagcagtggctcagtgctccctggtgtctgctgcatggcatcctggatgcttagcatgcaagttccctccatcattgccaccttggtagagagggatggctccccaccctcagcgttggggattcacgctccagcctccttcttggttgtcatagtgatagggtagccttattgccccctcttcttataccctaaaaccttctacactagtgccatgggaaccaggtctgaaaaagtagagagaagtgaaagtagagtctgggaagtagctgcctataactgagactagacggaaaaggaatactcgtgtattttaagatatgaatgtgactcaagactcgaggccgatacgaggctgtgattctgcctttggatggatgttgctgtacacagatgctacagacttgtactaacacaccgtaatttggcatttgtttaacctcatttataaaagcttcaaaaaaaccc

SEQ ID NO: 10254 - DNA, 1048 bp, Homo sapiens
  source 1..1048: mol_type = unassigned DNA
tggcgctgaggcggccaccgcgactccggctctgcgctcggctgcctgacttcttcctgctgctgcttttcaggggctgcctgataggggctgtaaatctcaaatccagcaatcgaaccccagtggtacaggaatttgaaagtgtggaactgtcttgcatcattacggattcgcagacaagtgaccccaggatcgagtggaagaaaattcaagatgaacaaaccacatatgtgttttttgacaacaaaattcagggagacttggcgggtcgtgcagaaatactggggaagacatccctgaagatctggaatgtgacacggagagactcagccctttatcgctgtgaggtcgttgctcgaaatgaccgcaaggaaattgatgagattgtgatcgagttaactgtgcaagtgaagccagtgacccctgtctgtagagtgccgaaggctgtaccagtaggcaagatggcaacactgcactgccaggagagtgagggccacccccggcctcactacagctggtatcgcaatgatgtaccactgcccacggattccagagccaatcccagatttcgcaattcttctttccacttaaactctgaaacaggcactttggtaagatctcttctaagaggtgaggatggagatgtctttgttggggcaagagatgcttattgtgaaaagaagattaggagagatactgaaacttcttgataagacaggagtcaaaaatctagaatgttagggattctacaggaaaaatgacccttcttccttttataaacaagtacattcttagggggtaaaataaggaagagaaagaaaccatagattgagaccgaagagggatattaagcaaatgttactagggccctgatcggataatcaactgtaaaagtcattagacaatcggggaaattggattactaggtggtatttgatgatctattaagcaactgttcattgctttaggcatgatgaaggtattgtggttacgattttttacagtcttgtagagatactgaagtatttatggataaaaggtgtttgga

SEQ ID NO: 10255 - DNA, 678 bp, Homo sapiens
  source 1..678: mol_type = unassigned DNA
atggatggccacagtgcgctccatccctgccatctctctttgtcatcctctgtcttgcccatgctgcagtgccttgcagatttgtttatatgcatgactttgtcatctgttgctgagagctgaggaaaacctcctgactggctgcctgataggggctgtaaatctcaaatccagcaatcgaaccccagtggtacaggaatttgaaagtgtggaactgtcttgcatcattacggattcgcagacaagtgaccccaggatcgagtggaagaaaattcaagatgaacaaaccacatatgtgttttttgacaacaaaattcagggagacttggcgggtcgtgcagaaatactggggaagacatccctgaagatctggaatgtgacacggagagactcagccctttatcgctgtgaggtcgttgctcgaaatgaccgcaaggaaattgatgagattgtgatcgagttaactgtgcaagtgaagccagtgacccctgtctgtagagtgccgaaggctgtaccagtaggcaagatggcaacactgcactgccaggagagtgagggccacccccggcctcactacagctggtatcgcaatgatgtaccactgcccacggattccagagccaatcccagatttcgcaattcttctttccacttaaactctgaaacaggcactttggt

SEQ ID NO: 10256 - DNA, 660 bp, Homo sapiens
  source 1..660: mol_type = unassigned DNA
tctctttcccttggctccttccagtgaaggtcagatttgagagagaaagcagttaacttggcttacctaagagactttattgtggaatatttttccatcctctgtggctgcctgataggggctgtaaatctcaaatccagcaatcgaaccccagtggtacaggaatttgaaagtgtggaactgtcttgcatcattacggattcgcagacaagtgaccccaggatcgagtggaagaaaattcaagatgaacaaaccacatatgtgttttttgacaacaaaattcagggagacttggcgggtcgtgcagaaatactggggaagacatccctgaagatctggaatgtgacacggagagactcagccctttatcgctgtgaggtcgttgctcgaaatgaccgcaaggaaattgatgagattgtgatcgagttaactgtgcaagtgaagccagtgacccctgtctgtagagtgccgaaggctgtaccagtaggcaagatggcaacactgcactgccaggagagtgagggccacccccggcctcactacagctggtatcgcaatgatgtaccactgcccacggattccagagccaatcccagatttcgcaattcttctttccacttaaactctgaaacaggcactttggtaagatctcttctaaga

SEQ ID NO: 10257 - DNA, 997 bp, Homo sapiens
  source 1..997: mol_type = unassigned DNA
tttaagtgtacattcatctttgagaaccaatacactaggataaaggagatttttttaaaacttccaagttacttggctcttgttgataaattccctgcatagttttccatgtgtcgcttgcttgaaggaacggctgccagagccccatatgaaagtgacccagtgcctttgcccagtgtatagacatgagaaaagggttccagggggtttcctctcagagggcttatagatcggaggtcaggcagccggcagagacaaagctctagttcttacctaggattctttacttgtttgttttttgagacagattctttaaggcttgaagctacctttcttccccgcagcaatctgcaacaaagggaggccctggaaattagggattcttttcttcttgggatcctggctcctaatcttgtcctcataaccatttcctccataagtaatctcaggcattcagccagaggatttttaagcctacagtgccaagcccactttaatacacttttcagtgcgactgcatttcaactgtagaagtctcagtacttttcacgtgtgaagttaggagttatggtgtcctatatgttctaggctagaaggattgtaagtgttctctcttctagctggggtaggcctgagggggcagggggcaagtgggtttggggtgaaggaaggaggcacagcagggccagggcctttttaaataacagatagtgtgtatcatggcttccaccaaacctccttttcttcagatgacctgaacattggcggaattattgggggggttctggttgtccttgctgtactggccctgatcacgttgggcatctgctgtgcatacagacgtggctacttcatcaacaataaacaggatggagaaagttacaagaacccagggaaaccagatggagttaactacatccgcactgacgaggagggcgacttcagacacaagtcatcgtttgtgatctgagacccgcggtgtggctgagagcgcaca

SEQ ID NO: 10258 - DNA, 1485 bp, Homo sapiens
  source 1..1485: mol_type = unassigned DNA
agttgagcttggggactgcagctgtggggagatttcagtgcattgcctcccctgggtgctcttcatcttggatttgaaagttgagagcagcatgttttgcccactgaaactcatcctgctgccagtgttactggattattccttgggcctgaatgacttgaatgtttccccgcctgagctaacagtccatgtgggtgattcagctctgatgggatgtgttttccagagcacagaagacaaatgtatattcaagatagactggactctgtcaccaggagagcacgccaaggacgaatatgtgctatactattactccaatctcagtgtgcctattgggcgcttccagaaccgcgtacacttgatgggggacatcttatgcaatgatggctctctcctgctccaagatgtgcaagaggctgaccagggaacctatatctgtgaaatccgcctcaaaggggagagccaggtgttcaagaaggcggtggtactgcatgtgcttccagaggagcccaaagagctcatggtccatgtgggtggattgattcagatgggatgtgttttccagagcacagaagtgaaacacgtgaccaaggtagaatggatattttcaggacggcgcgcaaaggaggagattgtatttcgttactaccacaaactcaggatgtctgtggagtactcccagagctggggccacttccagaatcgtgtgaacctggtgggggacattttccgcaatgacggttccatcatgcttcaaggagtgagggagtcagatggaggaaactacacctgcagtatccacctagggaacctggtgttcaagaaaaccattgtgctgcatgtcagcccggaagagcctcgaacactggtgaccccggcagccctgaggcctctggtcttgggtggtaatcagttggtgatcattgtgggaattgtctgtgccacaatcctgctgctccctgttctgatattgatcgtgaagaagacctgtggaaataagagttcagtgaattctacagtcttggtgaagaacacgaagaagactaatccagagataaaagaaaaaccctgccattttgaaagatgtgaaggggaggtgaacacacgcttcagcctaaaacactaagtagatgcaggcctgggccgttctcatacccccgggaaccatatcttacccattgtatgtcgcagcttgcaggccagtgcttggcacagagcagggactcaggaagcctttgtcactaaagtaagagcctctgcggagtacagtgcatggggtcggctgggacagccccaggcagcagatcctggtattgggctgaggaaagagcactgcgcttggagtcagtaagatctgccacctccctgagtctcatcagcaaaatgaggataaagataaagatactatagttgcccagcctgcttgacagggttgttgtaaggttcacataagatgatgatatgcaaatgctttgtaatctagga

SEQ ID NO: 10259 - DNA, 623 bp, Homo sapiens
  source 1..623: mol_type = unassigned DNA
gagcacagaagacaaatgtatattcaagatagactggactctgtcaccaggagagcacgccaaggacgaatatgtgctatactattactccaatctcagtgtgcctattgggcgcttccagaaccgcgtacacttgatgggggacatcttatgcaatgatggctctctcctgctccaagatgtgcaagaggctgaccagggaacctatatctgtgaaatccgcctcaaaggggagagccaggtgttcaagaaggcggtggtactgcatgtgcttccagaggagcccaaagagctcatggtccatgtgggtggattgattcagatgggatgtgttttccagagcacagaagtgaaacacgtgaccaaggtagaatggatattttcaggacggcgcgcaaaggtaacaaggaggaaacatcactgtgttagagaaggctctggctgatggtatcaggacaaaggtagaatcaggcacatgaggaggtgttgcaagagcctgggctttggtgcttatcagaactggaccttctcctagcaatttcagctttctggtgggaaagataactccaatgaagaacaagaacaagaagatgatgatgatgcttaactttttggatgccgat

SEQ ID NO: 10260 - DNA, 591 bp, Homo sapiens
  source 1..591: mol_type = unassigned DNA
atcagaaaggagagacttctggggtttcccttatttctttagaaaggttgggaggaagaattccagaaaagtgtaaggggctggataggaggagggagccagatagcatttattgtagtatgaagattgcagaatccttctgatgagccatatagattattccttgggcctgaatgacttgaatgtttccccgcctgagctaacagtccatgtgggtgattcagctctgatgggatgtgttttccagagcacagaagacaaatgtatattcaagatagactggactctgtcaccaggagagcacgccaaggacgaatatgtgctatactattactccaatctcagtgtgcctattgggcgcttccagaaccgcgtacacttgatgggggacatcttatgcaatgatggctctctcctgctccaagatgtgcaagaggctgaccagggaacctatatctgtgaaatccgcctcaaaggggagagccaggtgttcaagaaggcggtggtactgcatgtgcttccagaggagcccaaagagctcatggtccatgtgggtggattgattcagatgggatgtgttttccagagcac

SEQ ID NO: 10261 - DNA, 547 bp, Homo sapiens
  source 1..547: mol_type = unassigned DNA
gtttgcatctctgcaaccacttcagaaggcacgtgtttggtttgctctgagcctaacctagagtgctcgcagcagtctttcagttgagcttggggactgcagctgtggggagatttcagtgcattgcctcccctgggtgctcttcatcttggatttgaaagttgagagcagcatgttttgcccactgaaactcatcctgctgccagtgttactggagcacagaagacaaatgtatattcaagatagactggactctgtcaccaggagagcacgccaaggacgaatatgtgctatactattactccaatctcagtgtgcctattgggcgcttccagaaccgcgtacacttgatgggggacatcttatgcaatgatggctctctcctgctccaagatgtgcaagaggctgaccagggaacctatatctgtgaaatccgcctcaaaggggagagccaggtgttcaagaaggcggtggtactgcatgtgcttccagaggagcccaaagagctcatggtccatgtgggtggattgattcagatgggatgtgt

SEQ ID NO: 10262 - DNA, 574 bp, Homo sapiens
  source 1..574: mol_type = unassigned DNA
gtagacctaaaaacatctgagagcctagaagtgcacagcagtgtgcagatagattgagaggacttggctctgcaggtggacaacactctatttgaaagttgagagcagcatgttttgcccactgaaactcatcctgctgccagtgttactggattattccttgggcctgaatgacttgaatgtttccccgcctgagctaacagtccatgtgggtgattcagctctgatgggatgtgttttccagagcacagaagacaaatgtatattcaagatagactggactctgtcaccaggagagcacgccaaggacgaatatgtgctatactattactccaatctcagtgtgcctattgggcgcttccagaaccgcgtacacttgatgggggacatcttatgcaatgatggctctctcctgctccaagatgtgcaagaggctgaccagggaacctatatctgtgaaatccgcctcaaaggggagagccaggtgttcaagaaggcggtggtactgcatgtgcttccagaggagcccaaagagctcatggtccatgtgggtggattgattcagatgggatgt

SEQ ID NO: 10263 - DNA, 951 bp, Homo sapiens
  source 1..951: mol_type = unassigned DNA
ctgtttgcatctctgcaaccacttcagaaggcacgtgtttggtttgctctgagcctaacctagagtgctcgcagcagtctttcagttgagcttggggactgcagctgtggggagatttcagtgcattgcctcccctgggtgctcttcatcttggatttgaaagttgagagcagcatgttttgcccactgaaactcatcctgctgccagtgttactggattattccttgggcctgaatgacttgaatgtttccccgcctgagctaacagtccatgtgggtgattcagctctgatgggatgtgttttccagagcacagaagacaaatgtatattcaagatagactggactctgtcaccaggagagcacgccaaggacgaatatgtgctatactattactccaatctcagtgtgcctattgggcgcttccagaaccgcgtacacttgatgggggacatcttatgcaatgatggctctctcctgctccaagatgtgcaagaggctgaccagggaacctatatctgtgaaatccgcctcaaaggggagagccaggtgttcaagaaggcggtggtactgcatgtgcttccagaggagcccaaagagctcatggtccatgtgggtggattgattcagatgggatgtgttttccagagcacagaagtgaaacacgtgaccaaggtagaatggatattttcaggacggcgcgcaaaggaggagattgtatttcgttactaccacaaactcaggatgtctgtggagtactcccagagctggggccacttccagaatcgtgtgaacctggtgggggacattttccgcaatgacggttccatcatgcttcaaggagtgagggagtcagatggaggaaactacacctgcagtatccacctagggaacctggtgttcaagaaaaccattgtgctgcatgtcagcccggaagagcctcgaaagtgg

SEQ ID NO: 10264 - DNA, 2624 bp, Homo sapiens
  source 1..2624: mol_type = unassigned DNA
gatcctgggggccagggtgaagggtattttacgggaactctataaagcaggaagaagcaagtttattctttagaccagtagctctcaaccatgatgtggtcgtatatttatgggtcaacatgtgttgtggggatatcccaagtaacttgttattaataaaagttaagttgcaaaatttagtaaagactaacttttataaattaaaacatattccaggtcatctctctaacaaagtcatttgcacttgattcctctatgctatctgagtgggtcacagtgggtgacatcatgatggagtatggggaattacatctggtcccaggttcacctctgagagcttgccatacatttaaatgtcatccattgagtgattcacaggagaaaataggatgagaattgacattttgaggttgtgaatttgaatcacgagagacaaaatgttaggggccaggtcacttcattcatgtttgtgtctacacacccattaacttttcttaaaagctttaaaaaagcaatctacatggctttttttaatgccaatattcatttaacaagttatttttaaagaatctgctatatgaagaatacttaaagccccagtcctgatgggaaacttacaaccaagatggaggagatacatgtaaaataataaagacgtatataatacatcaggcaatagtaagagcctacggggaacaataaagcaggactttgtggtttttgttatgtgggtgcttggggagccctcactgagatgacatttgaggagagggagtgaaccctgcatatgtgtagggggaagagtgttcttgcagtcatagacagtagcaagtgcaaaggccttgcagccagtatgcaaggagcagccaagaggtccatgtggctggagcgcagtgacccaagtaggtgagggaagagcaagtagaagttgaagtcagaggtaaagggagatgggctgggtcatgcagggccttgcattttagtagaaatgggagtgggggccatgaagggttttgagcacaggagtaacatgatttaacttacatttttaaaggctcatctgctgaaaatagattgtcatagagaataagcagggagacaagtaagaaagctgttgcaggaatctaggtgagagatgagctggaccagaatggtatcagtggaggaggtgaggactggctggattggggatatattttgaaggtagaggtgataggatttgctgagggattcaatgtgatttgttccagaaagacagaaattaaggatgactccaggatttttagcctgagtatctggaggaaagcattgccatgtaccaaaatgggatggactggaaagaactggtttgggggaaagatgaagagttcagttttagacatgtttcaggttcctattggaaatccaactagaaatgtcatcaagaataaaagtatacttttgctttttttttattggaaaggtgcacaaaatgaaagtcctccttttcttatccctccattcagatggaaaaactgttcatggttttgtgatgtccttcacaagtacacacgcatgcacatgtgtgtgtacatgactttgtgttatttaatgctttctgataatacccttactgccttcacctagcagggccttggagtcctgagatcttccctcccccattttctctgctccccgctccactccagtcctcacaatatcatactttttgtctttcacttctaggaggagattgtatttcgttactaccacaaactcaggatgtctgtggagtactcccagagctggggccacttccagaatcgtgtgaacctggtgggggacattttccgcaatgacggttccatcatgcttcaaggagtgagggagtcagatggaggaaactacacctgcagtatccacctagggaacctggtgttcaagaaaaccattgtgctgcatgtcagcccggaagagcctcgaacactggtgaccccggcagccctgaggcctctggtcttgggtggtaatcagttggtgatcattgtgggaattgtctgtgccacaatcctgctgctccctgttctgatattgatcgtgaagaagacctgtggaaataagagttcagtgaattctacagtcttggtgaagaacacgaagaagactaatccagagataaaagaaaaaccctgccattttgaaagatgtgaaggggagaaacacatttactccccaataattgtacgggaggtgatcgaggaagaagaaccaagtgaaaaatcagaggccacctacatgaccatgcacccagtttggccttctctgaggtcagatcggaacaactcacttgaaaaaaagtcaggtgggggaatgccaaaaacacagcaagccttttgagaagaatggagagtcccttcatctcagcagcggtggagactctctcctgtgtgtgtcctgggccactctaccagtgatttcagactcccgctctcccagctgtcctcctgtctcattgtttggtcaatacactgaagatggagaatttggagcctggcagagagactggacagctctggaggaacaggcctgctgaggggaggggagcatggacttggcctctggagtgggacactggccctgggaac

SEQ ID NO: 10265 - DNA, 1383 bp, Homo sapiens
  source 1..1383: mol_type = unassigned DNA
gcagtctttcagttgagcttggggactgcagctgtggggagatttcagtgcattgcctcccctgggtgctcttcatcttggattattccttgggcctgaatgacttgaatgtttccccgcctgagctaacagtccatgtgggtgattcagctctgatgggatgtgttttccagagcacagaagacaaatgtatattcaagatagactggactctgtcaccaggagagcacgccaaggacgaatatgtgctatactattactccaatctcagtgtgcctattgggcgcttccagaaccgcgtacacttgatgggggacatcttatgcaatgatggctctctcctgctccaagatgtgcaagaggctgaccagggaacctatatctgtgaaatccgcctcaaaggggagagccaggtgttcaagaaggcggtggtactgcatgtgcttccagaggagcccaaagagctcatggtccatgtgggtggattgattcagatgggatgtgttttccagagcacagaagtgaaacacgtgaccaaggtagaatggatattttcaggacggcgcgcaaaggaggagattgtatttcgttactaccacaaactcaggatgtctgtggagtactcccagagctggggccacttccagaatcgtgtgaacctggtgggggacattttccgcaatgacggttccatcatgcttcaaggagtgagggagtcagatggaggaaactacacctgcagtatccacctagggaacctggtgttcaagaaaaccattgtgctgcatgtcagcccggaagagcctcgaacactggtgaccccggcagccctgaggcctctggtcttgggtggtaatcagttggtgatcattgtgggaattgtctgtgccacaatcctgctgctccctgttctgatattgatcgtgaagaagacctgtggaaataagagttcagtgaattctacagtcttggtgaagaacacgaagaagactaatccagagataaaagaaaaaccctgccattttgaaagatgtgaaggggagaaacacatttactccccaataattgtacgggaggtgatcgaggaagaagaaccaagtgaaaaatcagaggccacctacatgaccatgcacccagtttggccttctctgaggtcagatcggaacaactcacttgaaaaaaagtcaggtgggggaatgccaaaaacacagcaagccttttgagaagaatggagagtcccttcatctcagcagcggtggagactctctcctgtgtgtgtcctgggccactctaccagtgatttcagactcccgctctcccagctgtcctcctgtctcattgtttggtcaatacactgaagatggagaatttggagcctggcag

SEQ ID NO: 10266 - DNA, 1935 bp, Homo sapiens
  source 1..1935: mol_type = unassigned DNA
acttggctcttctctgatatgaactgggcagcatctaaatgtatctttcttgattttgttgtctctttgcatagagcatatcttgtgaaaacagaaatatccatgtaatggttttttcttgtagtgaccgctcgaaattgcttgagcaacatagagataatgggcaggggtccctgtgtgaagcacctagaggctggaaagctgatggcaaagctggaggggtgaggcagggagaggataaacacagtggaaatgcaggaggaaagctgtgctctgtggtggcctaattacaaggacctgccctacagccagaatcagccagcaaatgcttttgtaaaggaactaaaagaaagggaaaagaggaagtaaacaaaaggtcccttttcagagagggaaccagtgggagatttaagagcaaggaacaacccatttcgtcgttatgattattccttgggcctgaatgacttgaatgtttccccgcctgagctaacagtccatgtgggtgattcagctctgatgggatgtgttttccagagcacagaagacaaatgtatattcaagatagactggactctgtcaccaggagagcacgccaaggacgaatatgtgctatactattactccaatctcagtgtgcctattgggcgcttccagaaccgcgtacacttgatgggggacatcttatgcaatgatggctctctcctgctccaagatgtgcaagaggctgaccagggaacctatatctgtgaaatccgcctcaaaggggagagccaggtgttcaagaaggcggtggtactgcatgtgcttccagaggagcccaaagagctcatggtccatgtgggtggattgattcagatgggatgtgttttccagagcacagaagtgaaacacgtgaccaaggtagaatggatattttcaggacggcgcgcaaaggaggagattgtatttcgttactaccacaaactcaggatgtctgtggagtactcccagagctggggccacttccagaatcgtgtgaacctggtgggggacattttccgcaatgacggttccatcatgcttcaaggagtgagggagtcagatggaggaaactacacctgcagtatccacctagggaacctggtgttcaagaaaaccattgtgctgcatgtcagcccggaagagcctcgaacactggtgaccccggcagccctgaggcctctggtcttgggtggtaatcagttggtgatcattgtgggaattgtctgtgccacaatcctgctgctccctgttctgatattgatcgtgaagaagacctgtggaaataagagttcagtgaattctacagtcttggtgaagaacacgaagaagactaatccagagataaaagaaaaaccctgccattttgaaagatgtgaaggggaggtgaacacacgcttcagcctaaaacactaaaaacacatttactccccaataattgtacgggaggtgatcgaggaagaagaaccaagtgaaaaatcagaggccacctacatgaccatgcacccagtttggccttctctgaggtcagatcggaacaactcacttgaaaaaaagtcaggtgggggaatgccaaaaacacagcaagccttttgagaagaatggagagtcccttcatctcagcagcggtggagactctctcctgtgtgtgtcctgggccactctaccagtgatttcagactcccgctctcccagctgtcctcctgtctcattgtttggtcaatacactgaagatggagaatttggagcctggcagagagactggacagctctggaggaacaggcctgctgaggggaggggagcatggacttggcctctggagtgggacactggccctgggaaccaggctgagctgagtggcctcaaaccccccgttggatcagaccctcctgtgggcagggttcttagtggatgag

SEQ ID NO: 10267 - DNA, 1944 bp, Homo sapiens
  source 1..1944: mol_type = unassigned DNA
ctgtttgcatctctgcaaccacttcagaaggcacgtgtttggtttgctctgagcctaacctagagtgctcgcagcagtctttcagttgagcttggggactgcagctgtggggagatttcagtgcattgcctcccctgggtgctcttcatcttggatttgaaagttgagagcagcatgttttgcccactgaaactcatcctgctgccagtgttactggattattccttgggcctgaatgacttgaatgtttccccgcctgagctaacagtccatgtgggtgattcagctctgatgggatgtgttttccagagcacagaagacaaatgtatattcaagatagactggactctgtcaccaggagagcacgccaaggacgaatatgtgctatactattactccaatctcagtgtgcctattgggcgcttccagaaccgcgtacacttgatgggggacatcttatgcaatgatggctctctcctgctccaagatgtgcaagaggctgaccagggaacctatatctgtgaaatccgcctcaaaggggagagccaggtgttcaagaaggcggtggtactgcatgtgcttccagaggagcccaaagagctcatggtccatgtgggtggattgattcagatgggatgtgttttccagagcacagaagtgaaacacgtgaccaaggtagaatggatattttcaggacggcgcgcaaaggaggagattgtatttcgttactaccacaaactcaggatgtctgtggagtactcccagagctggggccacttccagaatcgtgtgaacctggtgggggacattttccgcaatgacggttccatcatgcttcaaggagtgagggagtcagatggaggaaactacacctgcagtatccacctagggaacctggtgttcaagaaaaccattgtgctgcatgtcagcccggaagagcctcgaacactggtgaccccggcagccctgaggcctctggtcttgggtggtaatcagttggtgatcattgtgggaattgtctgtgccacaatcctgctgctccctgttctgatattgatcgtgaagaagacctgtggaaataagagttcagtgaattctacagtcttggtgaagaacacgaagaagactaatccagagataaaagaaaaaccctgccattttgaaagatgtgaaggggagaaacacatttactccccaataattgtacgggaggtgatcgaggaagaagaaccaagtgaaaaatcagaggccacctacatgaccatgcacccagtttggccttctctgaggtcagatcggaacaactcacttgaaaaaaagtcaggtgggggaatgccaaaaacacagcaagccttttgagaagaatggagagtcccttcatctcagcagcggtggagactctctcctgtgtgtgtcctgggccactctaccagtgatttcagactcccgctctcccagctgtcctcctgtctcattgtttggtcaatacactgaagatggagaatttggagcctggcagagagactggacagctctggaggaacaggcctgctgaggggaggggagcatggacttggcctctggagtgggacactggccctgggaaccaggctgagctgagtggcctcaaaccccccgttggatcagaccctcctgtgggcagggttcttagtggatgagttactgggaagaatcagagataaaaaccaacccaaatcattcctctggcacattatttctaaataagtgttgtttgtggaaatcgtcctatttttatgcctcggttgagggggcaagtaaagtcctggtgaggaatttacagttagaaacttttggaaaaactgaagttcctggaggaaagccaaaccgtgctaacacactagaggctggttttggtcctgggaaaggtttggggtgaatgggttggaagtagggtatgaatac

SEQ ID NO: 10268 - DNA, 1959 bp, Homo sapiens
  source 1..1959: mol_type = unassigned DNA
atcacttggctcttctctgatatgaactgggcagcatctaaatgtatctttcttgattttgttgtctctttgcatagagcatatcttgtgaaaacagaaatatccatgtaatggttttttcttgtagtgaccgctcgaaattgcttgagcaacatagagataatgggcaggggtccctgtgtgaagcacctagaggctggaaagctgatggcaaagctggaggggtgaggcagggagaggataaacacagtggaaatgcaggaggaaagctgtgctctgtggtggcctaattacaaggacctgccctacagccagaatcagccagcaaatgcttttgtaaaggaactaaaagaaagggaaaagaggaagtaaacaaaaggtcccttttcagagagggaaccagtgggagatttaagagcaaggaacaacccatttcgtcgttatggtaagtggagattattccttgggcctgaatgacttgaatgtttccccgcctgagctaacagtccatgtgggtgattcagctctgatgggatgtgttttccagagcacagaagacaaatgtatattcaagatagactggactctgtcaccaggagagcacgccaaggacgaatatgtgctatactattactccaatctcagtgtgcctattgggcgcttccagaaccgcgtacacttgatgggggacatcttatgcaatgatggctctctcctgctccaagatgtgcaagaggctgaccagggaacctatatctgtgaaatccgcctcaaaggggagagccaggtgttcaagaaggcggtggtactgcatgtgcttccagaggagcccaaagagctcatggtccatgtgggtggattgattcagatgggatgtgttttccagagcacagaagtgaaacacgtgaccaaggtagaatggatattttcaggacggcgcgcaaaggaggagattgtatttcgttactaccacaaactcaggatgtctgtggagtactcccagagctggggccacttccagaatcgtgtgaacctggtgggggacattttccgcaatgacggttccatcatgcttcaaggagtgagggagtcagatggaggaaactacacctgcagtatccacctagggaacctggtgttcaagaaaaccattgtgctgcatgtcagcccggaagagcctcgaacactggtgaccccggcagccctgaggcctctggtcttgggtggtaatcagttggtgatcattgtgggaattgtctgtgccacaatcctgctgctccctgttctgatattgatcgtgaagaagacctgtggaaataagagttcagtgaattctacagtcttggtgaagaacacgaagaagactaatccagagataaaagaaaaaccctgccattttgaaagatgtgaaggggagaaacacatttactccccaataattgtacgggaggtgatcgaggaagaagaaccaagtgaaaaatcagaggccacctacatgaccatgcacccagtttggccttctctgaggtcagatcggaacaactcacttgaaaaaaagtcaggtgggggaatgccaaaaacacagcaagccttttgagaagaatggagagtcccttcatctcagcagcggtggagactctctcctgtgtgtgtcctgggccactctaccagtgatttcagactcccgctctcccagctgtcctcctgtctcattgtttggtcaatacactgaagatggagaatttggagcctggcagagagactggacagctctggaggaacaggcctgctgaggggaggggagcatggacttggcctctggagtgggacactggccctgggaaccaggctgagctgagtggcctcaaaccccccgttggatcagaccctcctgtgggcagggttcttagtggatgagttactgggaagaatcagagataaaaaccaacccaaatcatt

SEQ ID NO: 10269 - DNA, 5610 bp, Homo sapiens
  source 1..5610: mol_type = unassigned DNA
gcagctgtggggagatttcagtgcattgcctcccctgggtgctcttcatcttggatttgaaagttgagagcagcatgttttgcccactgaaactcatcctgctgccagtgttactggattattccttgggcctgaatgacttgaatgtttccccgcctgagctaacagtccatgtgggtgattcagctctgatgggatgtgttttccagagcacagaagacaaatgtatattcaagatagactggactctgtcaccaggagagcacgccaaggacgaatatgtgctatactattactccaatctcagtgtgcctattgggcgcttccagaaccgcgtacacttgatgggggacatcttatgcaatgatggctctctcctgctccaagatgtgcaagaggctgaccagggaacctatatctgtgaaatccgcctcaaaggggagagccaggtgttcaagaaggcggtggtactgcatgtgcttccagaggagcccaaagagctcatggtccatgtgggtggattgattcagatgggatgtgttttccagagcacagaagtgaaacacgtgaccaaggtagaatggatattttcaggacggcgcgcaaaggaggagattgtatttcgttactaccacaaactcaggatgtctgtggagtactcccagagctggggccacttccagaatcgtgtgaacctggtgggggacattttccgcaatgacggttccatcatgcttcaaggagtgagggagtcagatggaggaaactacacctgcagtatccacctagggaacctggtgttcaagaaaaccattgtgctgcatgtcagcccggaagagcctcgaagtatctaacatttggctggggagcattgagggacctcctggctggtgcatggcgccaggactagagtgaggccggagaggttcctaggatgcaaaattgaaggaggcatccctctcaggtgctgactctggccttgcacaaccctgagaatgatgcctccttagaggtggctcctcaggtgcctggcttgcctcaccctagttctggccctgctgctaggccaaggggaggggagctaatttagtgaataccaatcctctgccagaccccactcattgccagggtcatctactgatgtaaagatacagaagctcagggaaggatcggagttgatgtccaaagtcagcatacttggtttcaagggaggtgctgtatgtgttagagtggagcgggaaatgatcctaagctagtgagagacagccaggaacagagaggaacatgcaggcaccagaaccaaaaatggagggttttctgatcagaggttctggattctggcaaacagtgtgcatcaaggccagtgctgtgtaggagaggaaagacttgattgtgttgacagagagaggttgataagtgaggggttaaagttaaaccataacccagttagcaatcaggatgtggcctgtggactttgcctgtcgctagggccttcaggagttggctgtggttggctgggggtggggaagatggggtgaggatggaacatacctcatacctcaggccagagacctaagtctgtggaggcaccttgtctccagctggagaggggagcacggcaggtctgtgtgcttccttctcagaagtccaattcacagagaaaatcgagccattatgggggctcatgcagcttctccacccacaaacatatctatgtctcccccattcttatctctgccctgccatcctgaggcagaggaaggtcccttctgctctgggcttatctggccccctgtgcccaggtggtatccttctcaggaaccttacaacatggctctttgagctcactttctgttggtttctaccattcaatggatacgtttgctcaattctactacttaattactccagctccattctatgtctttttttcttcagctccattctgtgtctttctttttcttaagattgttttcctgagatacaattcacataccatacaatttgcccatttaaagcgttcagctcaatggttttagtacattcagagttgaacaaccaccaccacaatcacgtgtttctttctcaacatagccaaatagcttgctaaaggtctgtgtttggtatcttactgtctcatctcccattaactcctcagtgcactgcattctggcttattctacctctactccagcttagatcaccaatggcactgcaattatccatcctcagccttctctccttcagtagcatttatatgcactctatgttggacacagttccacacacacccatggatatacttagtcaactctacacaagttttccacaaatccttcatatgcaacatgtctaacctacccctgcacacccctcctcagcccatctccccaacctcagttgtctaactagatgcctgggggtgtgcttgattctttccctttcctagacccctaatctaacaggtcaggtcaacaagtccttgactcctactacagactcttgaagttgtcttccttccagtctgtcactgccgccttagttctggctgtcttcatctctgtcttgaactgtaggcctctaaccagtctctgctttctctctcagccactgctcctcattcttcacgcggctcttggtgccatctttctaaatcacattaagaactttctcttccactgctaataatctttcaatgttgttttcattgcctgcagaaaaatgccagattcttggttgagatagtcaaggtccttcctgacttggaccctgtcatctctccagcgaaattctccagcacacccacaaatgccacttttgtgccagacccgttgaactctttctagtttctaaaatcatcatcctgtcaggcctccagatctcatgcagaacatcccctctgtccttctccatattgtcttcccaacaaactggatgtttcctgtaagtcttaggttaaactttagaacttttgctggcaaattctcacttgctgcatatagaattggacacccttttttctgtgcccctctgttccccatacagacttctgttgtagcgcctacagcagcctgtggttttctgttgacgtgtttgtcttcttccttggaagcagggaccacacatcatcattcatctctgaatcccctgtacctagtgctgtctggccctgaggaggtgtttgctttatgtatttagaaagaaccatgcagatgagtagaaggttccatatgggcagaagtacctccggaggctttacttggtatcgtcactgtggggctgagtcttgcggcatgagttcttttgaagacaaccacttgccctaaggaagatcagcagcctctcaaatgcctgttatttctgggtccttgttaagccaaattttagaatagaattgttgatgtgaaaggaaactttactagaggtgaactgctagcctcttctcccacccaccttaatctacattttagggtaaacgagggggttagactttggttctcaatctcatggagacagtgtccctagtgtccagatatggggtggagtctggccttcccctccgcttcgtggcctggctggtgctacttggtatagggctgtggggctctcagctctttgctaaagtattgagaccctctccttgcttttctactttcccaagcactggtgaccccggcagccctgaggcctctggtcttgggtggtaatcagttggtgatcattgtgggaattgtctgtgccacaatcctgctgctccctgttctgatattgatcgtgaagaagacctgtggaaataagagttcagtgaattctacagtcttggtgaagaacacgaagaagactaatccagagataaaagaaaaaccctgccattttgaaagatgtgaaggggaggtgaacacacgcttcagcctaaaacactaagtagatgcaggcctgggccgttctcatacccccgggaaccatatcttacccattgtatgtcgcagcttgcaggccagtgcttggcacagagcagggactcaggaagcctttgtcactaaagtaagagcctctgcggagtacagtgcatggggtcggctgggacagccccaggcagcagatcctggtattgggctgaggaaagagcactgcgcttggagtcagtaagatctgccacctccctgagtctcatcagcaaaatgaggataaagataaagatactatagttgcccagcctgcttgacagggttgttgtaaggttcacataagatgatgatatgcaaatgctttgtaatctaggaggtgctatttgtctaaagtctaatggagaattataatacatccaggagttaaggagttctaatgcttaaaatgaaatagtctaagatcttagcaagaaaggattaagaaggacttttctctccatattgattttgtaatggagttataaataattgcttctagagactgagaaattgattggttttctttaactcctattctttcttttctttctttaattttaaaaaaactctttgaatagttacctttctctattttgggctgtttttgtcccaagagtaggattttttcccagtagagtgcagtggtccaagaatgggccactggatgatactgctttaccaacgagtgacaggaccatgaacctcacagttgtgaggttcaatgagggctggccctgccacataaatcctctgagggagatgatgacaattcactgctgattaatgccattctgcctttactgtaattagaaggaaataaccccagaatacaaggaatttagcaagataaggaacccctgctgctacctaaacatccatctaaacaaagatgtttggcttttgaagcaaagagtttggttcttaagactgtgttctttgacagttaattttcaagaagactgaagactgaattatcattgttgagaattctctaggtctcagtaaccctctgaaccagcagtttgggtggtcgatgcctagcaaataggagtgggtggccttttctctggtgtataagattcatctaatttttaggaatttttgtaccattttccccctctagaaacacatttactccccaataattgtacgggaggtgatcgaggaagaagaaccaagtgaaaaatcagaggccacctacatgaccatgcacccagtttggccttctctgaggtcagatcggaacaactcacttgaaaaaaagtcaggtgggggaatgccaaaaacacagcaagccttttgagaagaatggagagtcccttcatctcagcagcggtggagactctctcctgtgtgtgtcctgggccactctaccagtgatttcagactcccgctctcccagctgtcctcctgtctcattgtttggtcaatacactgaagatggagaatttggagcctggcagagagactggacagctctggaggaacaggcctgctgaggggaggggagcatggacttggcctctggagtgggacactggccctgggaaccaggctgagctgagtggcctcaaaccccccgttggatcagaccctcctgtgggcagggttcttagtggatgagttactgggaagaatcagagataaaaaccaacccaaatca

SEQ ID NO: 10270 - DNA, 1508 bp, Homo sapiens
  source 1..1508: mol_type = unassigned DNA
ttaagatttgaaagttgagagcagcatgttttgcccactgaaactcatcctgctgccagtgttactggattattccttgggcctgaatgacttgaatgtttccccgcctgagctaacagtccatgtgggtgattcagctctgatgggatgtgttttccagagcacagaagacaaatgtatattcaagatagactggactctgtcaccaggagagcacgccaaggacgaatatgtgctatactattactccaatctcagtgtgcctattgggcgcttccagaaccgcgtacacttgatgggggacatcttatgcaatgatggctctctcctgctccaagatgtgcaagaggctgaccagggaacctatatctgtgaaatccgcctcaaaggggagagccaggtgttcaagaaggcggtggtactgcatgtgcttccagaggagcccaaagagctcatggtccatgtgggtggattgattcagatgggatgtgttttccagagcacagaagtgaaacacgtgaccaaggaggagattgtatttcgttactaccacaaactcaggatgtctgtggagtactcccagagctggggccacttccagaatcgtgtgaacctggtgggggacattttccgcaatgacggttccatcatgcttcaaggagtgagggagtcagatggaggaaactacacctgcagtatccacctagggaacctggtgttcaagaaaaccattgtgctgcatgtcagcccggaagagcctcgaacactggtgaccccggcagccctgaggcctctggtcttgggtggtaatcagttggtgatcattgtgggaattgtctgtgccacaatcctgctgctccctgttctgatattgatcgtgaagaagacctgtggaaataagagttcagtgaattctacagtcttggtgaagaacacgaagaagactaatccagagataaaagaaaaaccctgccattttgaaagatgtgaaggggagaaacacatttactccccaataattgtacgggaggtgatcgaggaagaagaaccaagtgaaaaatcagaggccacctacatgaccatgcacccagtttggccttctctgaggtcagatcggaacaactcacttgaaaaaaagtcaggtgggggaatgccaaaaacacagcaagccttttgagaagaatggagagtcccttcatctcagcagcggtggagactctctcctgtgtgtgtcctgggccactctaccagtgatttcagactcccgctctcccagctgtcctcctgtctcattgtttggtcaatacactgaagatggagaatttggagcctggcagagagactggacagctctggaggaacaggcctgctgaggggaggggagcatggacttggcctctggagtgggacactggccctgggaaccaggctgagctgagtggcctcaaaccccccgttggatcagaccctcctgtgggcagggttcttagtggatgagttactgggaa

SEQ ID NO: 10271 - DNA, 2919 bp, Homo sapiens
  source 1..2919: mol_type = unassigned DNA
gttactttgtgttaggtagcctcatatattctgatgcaaaatctaaaaaaaatcgtaattgtgtttttattacagatacagatccacgggttttagaaaaacaagaattacagcagccaacctatgttgccctgagttacataaatagattcatgacagatgctgcccgccgagagcaggagtccctaaagaagaagattcagccgaagctctcgctgactctgtccagctcagtgtctcgagggaatgtgtccactcccccacgccacagcagtggaagccttactccccccgtgaccccacccatcaccccctcctcttcattccgcagcagcactccgacaggcagcgagtatgacgaggaggaggtggactatgaggagtcggacagcgatgagtcctggaccacagagagtgccatcagctccgaagccatcctcagctccatgtgcatgaatggaggggaagagaagccttttgcctgcccagttcctggatgtaaaaagagatacaagaatgtgaatggcataaagtatcacgctaagaatggtcacagaacacagattcgtgtccgcaaaccattcaagtgtcgctgtgggaagagttacaagacagctcagggcctgcggcaccacacaatcaatttccatcccccggtgtcggctgagattatcaggaagatgcagcaataacatgctggtcataactgtgccaagaaatcctcaccagcagttgctgattttgaaaacagccaccttttttcaggggaagcattcagcaaccctttaaagaaaaagaattaaatgcatgctttaaattttttctgtaattttggaatgatgtatctttgtagagttaatgattttgtacatttgcacatgtaatcatcatacccattttcattactttgatataaggtgctaaacaaaaaaagctctaggttcttcagcacatttcccccaaaacaaaataaaattgagggcatgttgcatattgttgaattgtattgcggtggtatcaacctggggggaggaggggctggcactgagatttttttttcaagattgtaatgtgattgaagttttcaacacatcaactcacatatgttcaaaaccaaaataataccttcattatcaaactggttaccatgccttacataatggagttagtatttgtgagtagaaagactttaggtaatggaaatataaataagaaagaatgtttaacataatatgctaaaaatattttcatatttaaataacatacgtaaaggtgtgctttctgtgttttatattatcttgcaaatccttttgccctttaaaaagctgaaaatcttgccatctgacttactagtcattttagtgttataaatggcattttgtacaaaatagtctattcagttcgttcattcatttaacacacattgattgagtgcctgctgggtacaagggattcaatttatgcctattgatatctgcggaccaagatacccatttagtgaaatacttttttccctgaaatctgttagaaaagactttgaaatacttcagtgcaaagtgtgtgtgtgtgaagtttagttatatcttcatcttcagatgaagttttaaagcactttgtagttctctattgccaacaatttaatgtttatgtgttgccaattcttgcaaccactgccctaccaaacctgtgggttgcaaatcagaactaaaattctaagcacgtttcaaagatgaacacttttgttaagacccctattgcctcttcttcatgctcattttttactttttttaaaaggtacttttctcatcacattgtagagaggtctgcattctcattggaaatgtctgtttagctttataaaacaaacactttgctgaaataggaaaatgagccttattgacaattaagtgcttcttgcagcaggtggtcaaagaaaagcatgactaatacgacctattagagtaatctacatctggaccattccttaagtttttcctcaccgacagtaccatcatgccttgagtgttcttttctcccaagtgctattccttaaacacgagagtttaccagttgcctaataatgcaataaaaaatgctttgagatagctaactgcccataaaacaaactcaaattgcttataaagtttcttcccatgttcccatttgatgaaaagtcttacatcacatataactgggaagcaggggtccctcctcaattttcagacattttgaaaggatgacagttctgtttgttagatgagtaaacctctatattcataagttctaaaatccttcattatgagggattcaaagtatttataaaaacactgccctctaaaaatttcctcagatctgaagtatggtcttggtcctgaatatacagtgttatcctatgtttaaaagggtgatccagacatgagacgcaactagttggtgcataagaaggccccacttggctatttcatatctacctacaattgaccaaaaaaaattttttaggccagcaattattatttagcttcgctctttctagtgcaagaaactgcaggctggatcagtagttcaacagctaaacagtcataaaatagtcattgtgcatgttaaatttctttcaatgctttcaaagataaattccaatttctatttacttattcattgtgacagtattactaaacaggtaaggatgggaatattttgttatactgtgtatagtgaatgtattgtactgtgtctgtgaaaactgtgctttaaattatattttcatatgttttgttggggacagagcacattaagtctgaaagcaacagaggtttgttttagaactgaaggcaatttaatcaaaattcctgtcaagaaaagctgcttataaatgtaaatgaaatcacatttaaaataaactgcctctgacccaaaaataaa

SEQ ID NO: 10272 - DNA, 3125 bp, Homo sapiens
  source 1..3125: mol_type = unassigned DNA
atctctctcgccccctctccctccgtcccgtcctcgccgctcccctcaccccgcctctctccccctcccccagcccctcctctcctcaccccacccggcctccctccctccctcgcccgcccggcgctcgcagagccgacaccaggggggctctcgatgtagcaccatgacaggcatcgccgccgcctccttcttctccaatacctgccgattcgggggctgcggactccacttccccaccctggccgacctcatcgagcacatcgaggacaaccacatcgatacagatccacgggttttagaaaaacaagaattacagcagccaacctatgttgccctgagttacataaatagattcatgacagatgctgcccgccgagagcaggagtccctaaagaagaagattcagccgaagctctcgctgactctgtccagctcagtgtctcgagggaatgtgtccactcccccacgccacagcagtggaagccttactccccccgtgaccccacccatcaccccctcctcttcattccgcagcagcactccgacaggcagcgagtatgacgaggaggaggtggactatgaggagtcggacagcgatgagtcctggaccacagagagtgccatcagctccgaagccatcctcagctccatgtgcatgaatggaggggaagagaagccttttgcctgcccagttcctggatgtaaaaagagatacaagaatgtgaatggcataaagtatcacgctaagaatggtcacagaacacagattcgtgtccgcaaaccattcaagtgtcgctgtgggaagagttacaagacagctcagggcctgcggcaccacacaatcaatttccatcccccggtgtcggctgagattatcaggaagatgcagcaataacatgctggtcataactgtgccaagaaatcctcaccagcagttgctgattttgaaaacagccaccttttttcaggggaagcattcagcaaccctttaaagaaaaagaattaaatgcatgctttaaattttttctgtaattttggaatgatgtatctttgtagagttaatgattttgtacatttgcacatgtaatcatcatacccattttcattactttgatataaggtgctaaacaaaaaaagctctaggttcttcagcacatttcccccaaaacaaaataaaattgagggcatgttgcatattgttgaattgtattgcggtggtatcaacctggggggaggaggggctggcactgagatttttttttcaagattgtaatgtgattgaagttttcaacacatcaactcacatatgttcaaaaccaaaataataccttcattatcaaactggttaccatgccttacataatggagttagtatttgtgagtagaaagactttaggtaatggaaatataaataagaaagaatgtttaacataatatgctaaaaatattttcatatttaaataacatacgtaaaggtgtgctttctgtgttttatattatcttgcaaatccttttgccctttaaaaagctgaaaatcttgccatctgacttactagtcattttagtgttataaatggcattttgtacaaaatagtctattcagttcgttcattcatttaacacacattgattgagtgcctgctgggtacaagggattcaatttatgcctattgatatctgcggaccaagatacccatttagtgaaatacttttttccctgaaatctgttagaaaagactttgaaatacttcagtgcaaagtgtgtgtgtgtgaagtttagttatatcttcatcttcagatgaagttttaaagcactttgtagttctctattgccaacaatttaatgtttatgtgttgccaattcttgcaaccactgccctaccaaacctgtgggttgcaaatcagaactaaaattctaagcacgtttcaaagatgaacacttttgttaagacccctattgcctcttcttcatgctcattttttactttttttaaaaggtacttttctcatcacattgtagagaggtctgcattctcattggaaatgtctgtttagctttataaaacaaacactttgctgaaataggaaaatgagccttattgacaattaagtgcttcttgcagcaggtggtcaaagaaaagcatgactaatacgacctattagagtaatctacatctggaccattccttaagtttttcctcaccgacagtaccatcatgccttgagtgttcttttctcccaagtgctattccttaaacacgagagtttaccagttgcctaataatgcaataaaaaatgctttgagatagctaactgcccataaaacaaactcaaattgcttataaagtttcttcccatgttcccatttgatgaaaagtcttacatcacatataactgggaagcaggggtccctcctcaattttcagacattttgaaaggatgacagttctgtttgttagatgagtaaacctctatattcataagttctaaaatccttcattatgagggattcaaagtatttataaaaacactgccctctaaaaatttcctcagatctgaagtatggtcttggtcctgaatatacagtgttatcctatgtttaaaagggtgatccagacatgagacgcaactagttggtgcataagaaggccccacttggctatttcatatctacctacaattgaccaaaaaaaattttttaggccagcaattattatttagcttcgctctttctagtgcaagaaactgcaggctggatcagtagttcaacagctaaacagtcataaaatagtcattgtgcatgttaaatttctttcaatgctttcaaagataaattccaatttctatttacttattcattgtgacagtattactaaacaggtaaggatgggaatattttgttatactgtgtatagtgaatgtattgtactgtgtctgtgaaaactgtgctttaaattatattttcatatgttttgttggggacagagcacattaagtctgaaagcaacagaggtttgttttagaactgaaggcaatttaatcaaaattcctgtcaagaaaagctgcttataaatgtaaatgaaatcacatttaaaataaactgcctctgacccaaaaataaa

SEQ ID NO: 10273 - DNA, 578 bp, Homo sapiens
  source 1..578: mol_type = unassigned DNA
agtcagggccctgcgctcctggtgagtccgggctctgttcacaaagctggcggcttggaggaggcagcccctgcattctcctgtgctcctctctggcagttgacctagcgggaagtgccactgcccacaagcattccatcaacttgtgagtttcacttctttgccaaaaactggcagagagaaatgtgacagggaattgaacttaggcgtttcatttgctggaagctgaatctcaggcagcgagtatgacgaggaggaggtggactatgaggagtcggacagcgatgagtcctggaccacagagagtgccatcagctccgaagccatcctcagctccatgtgcatgaatggaggggaagagaagccttttgcctgcccagttcctggatgtaaaaagagatacaagaatgtgaatggcataaagtatcacgctaagaatggtcacagaacacagattcgtgtccgcaaaccattcaagtgtcgctgtgggaagagttacaagacagctcagggcctgcggcaccacacaatcaatttccatcccccggtgtcggctgagattatcaggaagatgcagc

SEQ ID NO: 10274 - DNA, 571 bp, Homo sapiens
  source 1..571: mol_type = unassigned DNA
taatcagctgtaagtgccgtcactggatagaaggtccgtccttgggtctgtatgtgggtggcaaatgatacagatccacgggttttagaaaaacaagaattacagcagccaacctatgttgccctgagttacataaatagattcatgacagatgctgcccgccgagagcaggagtccctaaagaagaagattcagccgaagctctcgctgactctgtccagctcagtgtctcgagggaatgtgtccactcccccacgccacagcagtggaagccttactccccccgtgaccccacccatcaccccctcctcttcattccgcagcagcactccgacaggcagcgagtatgacgaggaggaggtggactatgaggagtcggacagcgatgagtcctggaccacagagagtgccatcagctccgaagccatcctcagctccatgtgcatgaatggaggggaagagaagccttttgcctgcccagttcctggatgtaaaaagagatacaagaatgtgaatggcataaagtatcacgctaagaatggtcacagaacacagattcgtgtccgcaaac

SEQ ID NO: 10275 - DNA, 585 bp, Homo sapiens
  source 1..585: mol_type = unassigned DNA
aatatttataagggggattgtgcaagagtttgtgtgacagatggacattttatcactgttgatgtttggaattcccttgaaaaatacagatccacgggttttagaaaaacaagaattacagcagccaacctatgttgccctgagttacataaatagattcatgacagatgctgcccgccgagagcaggagtccctaaagaagaagattcagccgaagctctcgctgactctgtccagctcagtgtctcgagggaatgtgtccactcccccacgccacagcagtggaagccttactccccccgtgaccccacccatcaccccctcctcttcattccgcagcagcactccgacaggcagcgagtatgacgaggaggaggtggactatgaggagtcggacagcgatgagtcctggaccacagagagtgccatcagctccgaagccatcctcagctccatgtgcatgaatggaggggaagagaagccttttgcctgcccagttcctggatgtaaaaagagatacaagaatgtgaatggcataaagtatcacgctaagaatggtcacagaacacagattcgtgtccgcaa

SEQ ID NO: 10276 - DNA, 564 bp, Homo sapiens
  source 1..564: mol_type = unassigned DNA
catgacaggcatcgccgccgcctccttcttctccaatacctgccgattcgggggctgcggactccacttccccaccctggccgacctcatcgagcacatcgaggacaaccacatcgatacagatccacgggttttagaaaaacaagaattacagcagccaacctatgttgccctgagttacataaatagggacattgggcatcagatggagtcaaggctgaaccgatctactgtagcatcctgagaggcccctgtgtggaaatgaaagattcatgacagatgctgcccgccgagagcaggagtccctaaagaagaagattcagccgaagctctcgctgactctgtccagctcagtgtctcgagggaatgtgtccactcccccacgccacagcagtggaagccttactccccccgtgaccccacccatcaccccctcctcttcattccgcagcagcactccgacaggcagcgagtatgacgaggaggaggtggactatgaggagtcggacagcgatgagtcctggaccacagagagtgccatcagctccgaagccatcctcagct

SEQ ID NO: 10277 - DNA, 562 bp, Homo sapiens
  source 1..562: mol_type = unassigned DNA
aaagaagccttgggtgctggagaagagatgctcagccaaggctgcagaggcttcagccactagcatggatgcagttgggagggacaaatgccagtgtcacattcatcagcagttccttcgctcacttctacctctactgagaacagggagcttggggttgagaaaacgtttgatgcttttgaaatgctgagaaatgaagacatggttgttgtacgaatatgcatgtccatgcctgccgtaggacaacatacagatccacgggttttagaaaaacaagaattacagcagccaacctatgttgccctgagttacataaatagattcatgacagatgctgcccgccgagagcaggagtccctaaagaagaagattcagccgaagctctcgctgactctgtccagctcagtgtctcgagggaatgtgtccactcccccacgccacagcagtggaagccttactccccccgtgaccccacccatcaccccctcctcttcattccgcagcagcactccgacagaaaatgagatcatcaccccaggaagatgtctgcactctcatgttc

SEQ ID NO: 10278 - DNA, 503 bp, Homo sapiens
  source 1..503: mol_type = unassigned DNA
ctcgcccgcccggcgctcgcagagccgacaccaggggggctctcgatgtagcaccatgacaggcatcgccgccgcctccttcttctccaatacctgccgattcgggggctgcggactccacttccccaccctggccgacctcatcgagcacatcgaggacaaccacatcgatacagatccacgggttttagaaaaacaagaattacagcagccaacctatgttgccctgagttacataaatagacagcggagatgagacagacctagagaagacctcccttctcgctgtcctacttgtccaaaagattcatgacagatgctgcccgccgagagcaggagtccctaaagaagaagattcagccgaagctctcgctgactctgtccagctcagtgtctcgagggaatgtgtccactcccccacgccacagcagtggaagccttactccccccgtgaccccacccatcaccccctcctcttcattccgcagcagcactccgacagg

SEQ ID NO: 10279 - DNA, 972 bp, Homo sapiens
  source 1..972: mol_type = unassigned DNA
cctgctttctcgagcgctcctgcaccgtggggtggcggagccgggggactgcatggaacccgggacgcccccgcggggagaggagcgcgagcggccgcgggaggagggcgcccaaggcggcgggggaggttaaggctggcctgccactcctcctgctatgatgcctgggcagatcccggacccttcggtgaccacaggctccctgccagggcttggccccctgaccgggctccccagctcggccctgactgtggaggagctgaaatacgctgacatccgcaacctcggggccatgattgcacccttgcacttcctggaggtgaaactgggcaagaggccccagcccgtgaaaagtgagctagatgaggaagaggagcgaaggaaaaggcgccgggagaagaacaaagtcgcagcagcccgatgccggaacaagaagaaggagcgcacggagtttctgcagcgggaatccgagcggctggaactcatgaacgcagagctgaagacccagattgaggagctgaagcaggagcggcagcagctcatcctgatgctgaaccgacaccgccccacctgcatcgtccggaccgacagtgtcaagacccccgagtcagaaggcaacccactgctcgagcagctcgagaagaagtgaccatgggctgggaggaggtggaggaggaggaagaggagaaggaaaagtgacgaagagagaggaggaggggggccccagatggcccttcctttggtgcatgaaaaactgtacaatgaggttcagcacagccagcatcagccgagcttttttgtgaaactcagatcagccacccaggaggaagagcgggctgaggaaacccagagggaccaagcgctgagaccaaagttgaccctcgggtagggttgtcctgcctggggccccacttgaaggaggcaggacagaggcaccgaggccagggagacgcccaacgaggcagccctggg

SEQ ID NO: 10280 - DNA, 558 bp, Homo sapiens
  source 1..558: mol_type = unassigned DNA
gcggccgcgggaggagggcgcccaaggcggcgggggaggttaaggctggcctgccactcctcctgctatgatgcctgggcagatcccggacccttcggtgaccacaggctccctgccagggcttggccccctgaccgggctccccagctcggccctgactgtggaggagctgaaatacgctgacatccgcaacctcggggccatgattgcacccttgcacttcctggaggtgaaactgggcaagaggccccagcccgtgaaaagtgaggtccaccggcaacatggactcagagttgggaaactgagtcctctcctgggtgaggctcatctggctgaacaactatgaagccatttaagtctgttttccttctactgtgcccaaaaggcacaaggcaacctggcctgaggttggagcatggagatctagaggaactcatggatggattcaggcgggatgtgaaagtgctgggagtgagggcctgggcctcctctgggtttagccacccttccaggttgtgtacaacctgccatatgctggggctcattgactgtgctctg

SEQ ID NO: 10281 - DNA, 631 bp, Homo sapiens
  source 1..631: mol_type = unassigned DNA
ggacgctcggcggccgcgacggggggcgctggcggcggcggacgctgcagcggcggcggggctggcgccgcggcggctcccgggccgggacaggcctgggcaccgggcggagctccgcggccgggcggcagcggcgcggagcgggcacggcgcctgcagccgggccccggccccgggggcgccgcctccccccgcaccttctgcacggctggcctgccactcctcctgctatgatgcctgggcagatcccggacccttcggtgaccacaggctccctgccagggcttggccccctgaccgggctccccagctcggccctgactgtggaggagctgaaatacgctgacatccgcaacctcggggccatgattgcacccttgcacttcctggaggtgaaactgggcaagaggccccagcccgtgaaaagtgagctagatgaggaagaggagcgaaggaaaaggcgccgggagaagaacaaagtcgcagcagcccgatgccggaacaagaagaaggagcgcacggagtttctgcagcgggaatccgagcggctggaactcatgaacgcagagctgaagacccagattgaggagctgaagcaggagcggcagcagctcatcctgatgctgaaccg

SEQ ID NO: 10282 - DNA, 454 bp, Homo sapiens
  source 1..454: mol_type = unassigned DNA
cggcggcggggctggcgccgcggcggctcccgggccgggacaggcctgggcaccgggcggagctccgcggccgggcggcagcggcgcggagcgggcacggcgcctgcagccgggccccggccccgggggcgccgcctccccccgcaccttctgcacggctggcctgccactcctcctgctatgatgcctgggcagatcccggacccttcggtgaccacaggctccctgccagggcttggccccctgaccgggctccccagctcggccctgactgtggaggagctgaaatacgctgacatccgcaacctcggggccatgattgcacccttgcacttcctggaggtgaaactgggcaagaggccccagcccgtgaaaagtgaggtccaccggcaacatggactcagagttgggaaactgagtcctctcctgggtgaggctcatctggctgaacaac

SEQ ID NO: 10283 - DNA, 5401 bp, Homo sapiens
  source 1..5401: mol_type = unassigned DNA
gccccagcccagccccgcggggaggctcccgcagcccagggacctcgagctttccccgcgccgggcgctgcagccgggcccctcccgcgaggcgcccggcagcctgaggcttccttttggttcccgccccgggacgggaggctccgtccgctccctggacagccggggtgctccctccttctccctcccgcgctctcctcccccgtccgtttgcagggaggtgctctcctcgggcggcggggaaggcggggctggcctgccactcctcctgctatgatgcctgggcagatcccggacccttcggtgaccacaggctccctgccagggcttggccccctgaccgggctccccagctcggccctgactgtggaggagctgaaatacgctgacatccgcaacctcggggccatgattgcacccttgcacttcctggaggtgaaactgggcaagaggccccagcccgtgaaaagtgagctagatgaggaagaggagcgaaggaaaaggcgccgggagaagaacaaagtcgcagcagcccgatgccggaacaagaagaaggagcgcacggagtttctgcagcgggaatccgagcggctggaactcatgaacgcagagctgaagacccagattgaggagctgaagcaggagcggcagcagctcatcctgatgctgaaccgacaccgccccacctgcatcgtccggaccgacagtgtcaagacccccgagtcagaaggcaacccactgctcgagcagctcgagaagaagtgaccatgggctgggaggaggtggaggaggaggaagaggagaaggaaaagtgacgaagagagaggaggaggggggccccagatggcccttcctttggtgcatgaaaaactgtacaatgaggttcagcacagccagcatcagccgagcttttttgtgaaactcagatcagccacccaggaggaagagcgggctgaggaaacccagagggaccaagcgctgagaccaaagttgaccctcgggtagggttgtcctgcctggggccccacttgaaggaggcaggacagaggcaccgaggccagggagacgcccaacgaggcagccctgggctcttctctggcctcttcaccagggcacccatccaaggaacctccgaacagccaggaaaagccatgagttgcaaccaaaacgcggctgaggatggaactcagaatgaaactgcaacccacctgcccccagccctgcccctcgccctgatgcgaagctggagaggggcgtgctgcggggccctgatgcccccacccacctcggtccagcgcggccctgcccaggaggcggcagccgggcgcaccctcgccagccctgctggagtttgctgtgggcactgaggcgcgggcgcccttccaaagcacatactcaccgaatgtttacagactggctgtcctggcagggctttcaactgcacatgttttttatactttcctttttttttttttttttaatattttttacaaaaaaaaagattttatacaagcaatatatatatggatttctataatcactcgatgtgatacagtataaatatgctatggtttgtttgttatgaacagatagccaccagttacggccgttgtgtgtaactcctaagtactgtagtctctgggtgtcgggggtggccagggcgggggcggggtgcatttccatccttgtaaacccttcatagtactcagtcctgtatcgctcagtaaacattgctcttacttacatagccgccttgcgtggtgtctgcctggggaatgggtgcaaggccctctcagggtcggagactgtttggagcctctgctataggcctgttcattttcacaacagctctcctatttcacagatgaggaagctaaggctcagagacattaagccacctgcagttactattttgagagcagtcagagtgttcgctcactctgcagatgttttctgagggcctgttgtgtgtgccaggccctgagaattcactggaggatgaaacagacctaagtcttgcccttgtggggcctccagtaaggagtgaatcctgtgcttgctccataagttgtctcatttcgtcttcatggcagccttgccagggaacagcacttgtccccaattcacagatggcgaattagaggtccagggaattaaactcgcagacaccatttgttgaagacttattttgtgacaagcagacatagtctcttcccttctcacaagagcacaaactaggcacgattcttctcattttacagatggtttaactgaggctcagagaaggtaagcgacttatccaaggtaacccagctagcaagggatagagctggtgtttgaactctccctccagaggcctgtgactctcctcctgtcaccaacccactatgattgtcctcatggttgaataggaagcttatgaggccacagttatagatttagtttctgggaaggctggatagagttccaggttgtcccatgatcacagagtgaaccaactaccctggtcaatgtgtgtctgacccagggaagggtgtggatggcttctctgccccctcacctcgacagctgaatccctgccacccagggccggagcagctcagtggcattcactcagtgcctgctgtgtacctggcactcggcagttctcaaggcatgtcacgcatgaggaaggcgggagaggtgtttttagcttccttgtatactgaagcttgcaaaggctacagtttacccaactaaacttgactcctgcattctaatcatgtgttctttctcctccatccctggacttaggataactagttgctggtgatgacttcgtgtcaagaacagcagtgaacctgggttgcttcccaaattgtggacgaggccttctgggatgggcagaagtggagaatggtgattaacacacctgtgatccctccctcgctcactcctctcagtttccctccacccaacacacttggtgtggactcccctgcaccccgccctagaaacaggacctggtcctctcactgtcagctgtggcagaaggttgtggcagcgggttgccttctgtctcgggggtcttgaggctgtcggtccggacgatgcaggtgaggcagtgtcagttctgcatcaggaacccctcgcgctgtaatcctttgatatttttcaagccatgagaaaaatgaagtggacttaccagggtccctccagtgacctagtggatgttcttacaggactgccgtgtgccactggctgtggcttccctggtcctgtgcttggccaccgggagctggcatctccaaaatagagcctccttagcctgtgcaggtgggctgtcttccaaagtcaccacaccagtgacttgtgctgtgcggagccttcctcaccaggaccactggctgctcctgtggctagaagtcacaattataggcttcattgcaagagccagcatttgagtttcttctgggcacctgccactgtgcatgtgtgacctcaactgctttgtgcaccctgactggggggtaggtgctagcgttccaacattacagatgagaaaaccgaggcacacagaagaggtaacctgcccaaggtcacaggtgttaggtggcagagccaagatgttattgtcagtctgacttcaggtgcataaaacctgaggctgagcctccccatgagaggaaaaatgtgtttgtggtgtgacctcagttgccagggaacttgtgcaggaagccgggagagatggcacagacccacctgtgctcacagtacatgttaagaattcccaagtctcaggcaaaccatctccaagggtgttcacagaagacacaccttaaaggcaaacgggttcatgatgtaatcttctattgactagctgtgaacctcatttttcttatctgtgaagtgggaacagtaataatccaagtctttttatggagttatcaagatcaaaaaaggaatggatatacaaagtgttttgtgaaataaaagctccctaaaatggtaattattttgtcctctgttagtgtcggtagttattgatatctacatagtacaggttatttaaatatgttttattctgtaaagatgggctgccaagtttgtgttctgaccctgtacgtggtccctatggtgtgatgaatgcctgggatcgcagactcctggatctgttcagctcctgactggtcacaaccagccatgctggatgcatcattccctccctgggcctcagtgtgccctcctgccaggtggtcacacataagacctgtgccacctctgcccagggttcctatgagaatcaatcgagttgatgaatgcaaccatggcctgagaaagacaagacgctttagctatcagatgggcagaaacaagtatgtgttggtaagaatatggattaaaggttgggaggccaagatgggtggatcatgaggtcagaagattgagaccaccctggataacacggtgaaaccctgtctctactaataatacaaaaaattagccgggcatggtggcacgtgcctgtagtcccagctactcgggaggctgaggcaggagaatcacttggacctgggaggtggaggttgcagtgagccaagattgcgccactgcactccagcctgggtgacagagcgagactccatctcaaaaaaaacaaaacaaaaaaaatgtggattaaaggaaacttagatatgctgccagtgagaaactgtgcaaagcaatttggaaataaccagtaaaactaaagctaaacgcatcctttgacctagcagttttcctcctagtcttgggaggaactctagcacaggggcaaaaggaaatgtacaagaatgttcactgatggctttgtttgtatttttaaaaagttgaaaacaacctaaatgatgatcagcataagaacaaataaattgtggtattttcctaaaattgaatattactcaacaggtaaaaaagaatgaaccagagctatatgtatcaatatggataaatctcagaaacctactgttgagatggagggtaggggagtgaactgcggaaggataccacttatgtcatatttctaactaaatgtatacgttgatactttattgtttatggctacacacacatctgggtaatagaggtataaaagcctgcacaagaatgctgtcaatatcacaatcagtcatagggagtgctcctgggagggccgcggagaggagggaactagggatgccactgcaagggtaagtaggacgctggacttcaacttcaactatacacataacatttcatttatttttttaaaatccccatcaaatgtagaatgacaggatttttcagaggtgggtgatgtgtgcacagatgtgggctatcttctccacactcctctgtatatttgatattctttgcaataaaagagaacaagccacaatacaaa

SEQ ID NO: 10284 - DNA, 1700 bp, Homo sapiens
  source 1..1700: mol_type = unassigned DNA
ctgaagagggccttttgctgctcgccttcactctcagtcttggggccttccccatcatcttgcttctcgccttctggatctcctcgacttttggaagccgcgtgacctacgtcattcagattccaagagagaggtcatcctgggtgattccttagctccaagaagaggcttggtggttgattctccaagattcatggtagcaggctggcctgccactcctcctgctatgatgcctgggcagatcccggacccttcggtgaccacaggctccctgccagggcttggccccctgaccgggctccccagctcggccctgactgtggaggagctgaaatacgctgacatccgcaacctcggggccatgattgcacccttgcacttcctggaggtgaaactgggcaagaggccccagcccgtgaaaagtgagctagatgaggaagaggagcgaaggaaaaggcgccgggagaagaacaaagtcgcagcagcccgatgccggaacaagaagaaggagcgcacggagtttctgcagcgggaatccgagcggctggaactcatgaacgcagagctgaagacccagattgaggagctgaagcaggagcggcagcagctcatcctgatgctgaaccgacaccgccccacctgcatcgtccggaccgacagtgtcaagacccccgagtcagaaggcaacccactgctcgagcagctcgagaagaagtgaccatgggctgggaggaggtggaggaggaggaagaggagaaggaaaagtgacgaagagagaggaggaggggggccccagatggcccttcctttggtgcatgaaaaactgtacaatgaggttcagcacagccagcatcagccgagcttttttgtgaaactcagatcagccacccaggaggaagagcgggctgaggaaacccagagggaccaagcgctgagaccaaagttgaccctcgggtagggttgtcctgcctggggccccacttgaaggaggcaggacagaggcaccgaggccagggagacgcccaacgaggcagccctgggctcttctctggcctcttcaccagggcacccatccaaggaacctccgaacagccaggaaaagccatgagttgcaaccaaaacgcggctgaggatggaactcagaatgaaactgcaacccacctgcccccagccctgcccctcgccctgatgcgaagctggagaggggcgtgctgcggggccctgatgcccccacccacctcggtccagcgcggccctgcccaggaggcggcagccgggcgcaccctcgccagccctgctggagtttgctgtgggcactgaggcgcgggcgcccttccaaagcacatactcaccgaatgtttacagactggctgtcctggcagggctttcaactgcacatgttttttatactttcctttttttttttttttttaatattttttacaaaaaaaaagattttatacaagcaatatatatatggatttctataatcactcgatgtgatacagtataaatatgctatggtttgtttgttatgaacagatagccaccagttacggccgttgtgtgtaactcctaagtactgtagtctctgggtgtcgggggtggccagggcgggggcggggtgcatttccatccttgtaaacccttcatagtactcagtcctgtatcgctcagtaaacattgctcttacttacata

SEQ ID NO: 10285 - DNA, 3775 bp, Homo sapiens
  source 1..3775: mol_type = unassigned DNA
cccgggggcgccgcctccccccgcaccttctgcacggctggcctgccactcctcctgctatgatgcctgggcagatcccggacccttcggtgaccacaggctccctgccagggcttggccccctgaccgggctccccagctcggccctgactgtggaggagctgaaatacgctgacatccgcaacctcggggccatgattgcacccttgcacttcctggaggtgaaactgggcaagaggccccagcccgtgaaaagtgagctagatgaggaagaggagcgaaggaaaaggcgccgggagaagaacaaagtcgcagcagcccgatgccggaacaagaagaaggagcgcacggagtttctgcagcgggaatccgagcggctggaactcatgaacgcagagctgaagacccagattgaggagctgaagcaggagcggcagcagctcatcctgatgctgaaccgacaccgccccacctgcatcgtccggaccgacagtgtcaagacccccgagtcagaaggcaacccactgctcgagcagctcgagaagaagtgaccatgggctgggaggaggtggaggaggaggaagaggagaaggaaaagtgacgaagagagaggaggaggggggccccagatggcccttcctttggtgcatgaaaaactgtacaatgaggttcagcacagccagcatcagccgagcttttttgtgaaactcagatcagccacccaggaggaagagcgggctgaggaaacccagagggaccaagcgctgagaccaaagttgaccctcgggtagggttgtcctgcctggggccccacttgaaggaggcaggacagaggcaccgaggccagggagacgcccaacgaggcagccctgggctcttctctggcctcttcaccagggcacccatccaaggaacctccgaacagccaggaaaagccatgagttgcaaccaaaacgcggctgaggatggaactcagaatgaaactgcaacccacctgcccccagccctgcccctcgccctgatgcgaagctggagaggggcgtgctgcggggccctgatgcccccacccacctcggtccagcgcggccctgcccaggaggcggcagccgggcgcaccctcgccagccctgctggagtttgctgtgggcactgaggcgcgggcgcccttccaaagcacatactcaccgaatgtttacagactggctgtcctggcagggctttcaactgcacatgttttttatactttcctttttttttttttttttaatattttttacaaaaaaaaagattttatacaagcaatatatatatggatttctataatcactcgatgtgatacagtataaatatgctatggtttgtttgttatgaacagatagccaccagttacggccgttgtgtgtaactcctaagtactgtagtctctgggtgtcgggggtggccagggcgggggcggggtgcatttccatccttgtaaacccttcatagtactcagtcctgtatcgctcagtaaacattgctcttacttacatagccgccttgcgtggtgtctgcctggggaatgggtgcaaggccctctcagggtcggagactgtttggagcctctgctataggcctgttcattttcacaacagctctcctatttcacagatgaggaagctaaggctcagagacattaagccacctgcagttactattttgagagcagtcagagtgttcgctcactctgcagatgttttctgagggcctgttgtgtgtgccaggccctgagaattcactggaggatgaaacagacctaagtcttgcccttgtggggcctccagtaaggagtgaatcctgtgcttgctccataagttgtctcatttcgtcttcatggcagccttgccagggaacagcacttgtccccaattcacagatggcgaattagaggtccagggaattaaactcgcagacaccatttgttgaagacttattttgtgacaagcagacatagtctcttcccttctcacaagagcacaaactaggcacgattcttctcattttacagatggtttaactgaggctcagagaaggtaagcgacttatccaaggtaacccagctagcaagggatagagctggtgtttgaactctccctccagaggcctgtgactctcctcctgtcaccaacccactatgattgtcctcatggttgaataggaagcttatgaggccacagttatagatttagtttctgggaaggctggatagagttccaggttgtcccatgatcacagagtgaaccaactaccctggtcaatgtgtgtctgacccagggaagggtgtggatggcttctctgccccctcacctcgacagctgaatccctgccacccagggccggagcagctcagtggcattcactcagtgcctgctgtgtacctggcactcggcagttctcaaggcatgtcacgcatgaggaaggcgggagaggtgtttttagcttccttgtatactgaagcttgcaaaggctacagtttacccaactaaacttgactcctgcattctaatcatgtgttctttctcctccatccctggacttaggataactagttgctggtgatgacttcgtgtcaagaacagcagtgaacctgggttgcttcccaaattgtggacgaggccttctgggatgggcagaagtggagaatggtgattaacacacctgtgatccctccctcgctcactcctctcagtttccctccacccaacacacttggtgtggactcccctgcaccccgccctagaaacaggacctggtcctctcactgtcagctgtggcagaaggttgtggcagcgggttgccttctgtctcgggggtcttgaggctgtcggtccggacgatgcaggtgaggcagtgtcagttctgcatcaggaacccctcgcgctgtaatcctttgatatttttcaagccatgagaaaaatgaagtggacttaccagggtccctccagtgacctagtggatgttcttacaggactgccgtgtgccactggctgtggcttccctggtcctgtgcttggccaccgggagctggcatctccaaaatagagcctccttagcctgtgcaggtgggctgtcttccaaagtcaccacaccagtgacttgtgctgtgcggagccttcctcaccaggaccactggctgctcctgtggctagaagtcacaattataggcttcattgcaagagccagcatttgagtttcttctgggcacctgccactgtgcatgtgtgacctcaactgctttgtgcaccctgactggggggtaggtgctagcgttccaacattacagatgagaaaaccgaggcacacagaagaggtaacctgcccaaggtcacaggtgttaggtggcagagccaagatgttattgtcagtctgacttcaggtgcataaaacctgaggctgagcctccccatgagaggaaaaatgtgtttgtggtgtgacctcagttgccagggaacttgtgcaggaagccgggagagatggcacagacccacctgtgctcacagtacatgttaagaattcccaagtctcaggcaaaccatctccaagggtgttcacagaagacacaccttaaaggcaaacgggttcatgatgtaatcttctattgactagctgtgaacctcatttttcttatctgtgaagtgggaacagtaataatccaagtctttttatggagttatcaagatcaaaaaaggaatggatatacaaagtgttttgtgaaataaaagctccctaaaatggt

SEQ ID NO: 10286 - DNA, 1726 bp, Homo sapiens
  source 1..1726: mol_type = unassigned DNA
ctaaacccggaagcgagggaggaacttcggagctgtcgcccgggttaccgggaggcggagccgccgagctcgctgtggcccggatgttcggtgcagctgccagatccgctgatctagtgcttctcgaaaaaaaccttcaggcggcccatggctgtcgatattcaaccagcatgccttggactttattgtgggaagaccctattatttaaaaatggctcaactgaaatatatggagaatgtggggtatgcccaagaggacagagaacgaatgcacagaaatattgtcagccttgcacagaatctcctgaactttatgattggctctatcttggatttatggcaatgcttcctctggttttacattggttcttcattgaatggtactcggggaaaaagagttccagcgcacttttccaacacatcactgcattatttgaatgcagcatggcagctattatcaccttacttgtgagtgatccagttggtgttctttatattcgttcatgtcgagtattgatgctttctgactggtacacgatgctttacaacccaagtccagattacgttaccacagtacactgtactcatgaagccgtctacccactatataccattgtatttatctattacgcattctgcttggtattaatgatgctgctccgacctcttctggtgaagaagattgcatgtgggttagggaaatctgatcgatttaaaagtatttatgctgcactttacttcttcccaattttaaccgtgcttcaggcagttggtggaggccttttatattacgccttcccatacattatattagtgttatctttggttactctggctgtgtacatgtctgcttctgaaatagagaactgctatgatcttctggtcagaaagaaaagacttattgttctcttcagccactggttacttcatgcctatggaataatctccatttccagagtggataaacttgagcaagatttgccccttttggctttggtacctacaccagcccttttttacttgttcactgcaaaatttaccgaaccttcaaggatactctcagaaggagccaatggacactgagtgtagacatgtgaaatgccaaaaacctgagaagtgctcctaataaaaaagtaaatcaatcttaacagtgtatgagaactattctatcatatatgggaacaagattgtcagtatatcttaatgtttgggtttgtctttgttttgtttatggttagacttacagacttggaaaatgcaaaactctgtaatactctgttacacagggtaatattatctgctacactggaaggccgctaggaagcccttgcttctctcaacagttcagctgttctttagggcaaaatcatgtttctgtgtacctagcaatgtgttcccattttattaagaaaagctttaacacgtgtaatctgcagtccttaacagtggcgtaattgtacttacctgttgtgtttcagtttgtttttcacctataatgaattgtaaaaacaaacatacttgtggggtctgatagcaaacatagaaatgatgtatattgttttttgttatctatttattttcatcaatacagtattttgatgtattgcaaaaatagataataatttatataacaggttttctgtttatagattggttcaagatttgtttggattattgttcctgtaaagaaaacaataataaaaagcttacctacataaaatttcaa

SEQ ID NO: 10287 - DNA, 562 bp, Homo sapiens
  source 1..562: mol_type = unassigned DNA
aaacccggaagcgagggaggaacttcggagctgtcgcccgggttaccgggaggcggagccgccgagctcgctgtggcccggatgttcggtgcagctgccagatccgctgatctagtgcttctcgaaaaaaaccttcaggcggcccatgggtatgcccaagaggacagagaacgaatgcacagaaatattgtcagccttgcacagaatctcctgaactttatgattggctctatcttggatttatggcaatgcttcctctggttttacattggttcttcattgaatggtactcggggaaaaagagttccagcgcacttttccaacacatcactgcattatttgaatgcagcatggcagctattatcaccttacttgtgagtgatccagttggtgttctttatattcgttcatgtcgagtattgatgctttctgactggtacacgatgctttacaacccaagtccagattacgttaccacagtacactgtactcatgaagccgtctacccactatataccattgtatttatctattacgcattctgcttggtattaatgatgct

SEQ ID NO: 10288 - DNA, 611 bp, Homo sapiens
  source 1..611: mol_type = unassigned DNA
gggaggcggagccgccgagctcgctgtggcccggatgttcggtgcagctgccagatccgctgatctagtgcttctcgaaaaaaaccttcaggcggcccatggatttatagcgcccgtcacaaagggcaggaccgctgcaaaaaaatggaatcttaaaactttagccatcgttcgctaaaggaaatgaaaggagaaattcaacagtcgcttggagcctgggttttgcttactgtcgatattcaaccagcatgccttggactttattgtgggaagaccctattatttaaaaatggctcaactgaaatatatggagaatgtggggtatgcccaagaggacagagaacgaatgcacagaaatattgtcagccttgcacagaatctcctgaactttatgattggctctatcttggatttatggcaatgcttcctctggttttacattggttcttcattgaatggtactcggggaaaaagagttccagcgcacttttccaacacatcactgcattatttgaatgcagcatggcagctattatcaccttacttgtgagtgatccagttggtgttctttatattcgttcatgtcgagtattgatgctttctgactggta

SEQ ID NO: 10289 - DNA, 1636 bp, Homo sapiens
  source 1..1636: mol_type = unassigned DNA
ccgccgagctcgctgtggcccggatgttcggtgcagctgccagatccgctgatctagtgcttctcgaaaaaaaccttcaggcggcccatggcatgccttggactttattgtgggaagaccctattatttaaaaatggctcaactgaaatatatggagaatgtggggtatgcccaagaggacagagaacgaatgcacagaaatattgtcagccttgcacagaatctcctgaactttatgattggctctatcttggatttatggcaatgcttcctctggttttacattggttcttcattgaatggtactcggggaaaaagagttccagcgcacttttccaacacatcactgcattatttgaatgcagcatggcagctattatcaccttacttgtgagtgatccagttggtgttctttatattcgttcatgtcgagtattgatgctttctgactggtacacgatgctttacaacccaagtccagattacgttaccacagtacactgtactcatgaagccgtctacccactatataccattgtatttatctattacgcattctgcttggtattaatgatgctgctccgacctcttctggtgaagaagattgcatgtgggttagggaaatctgatcgatttaaaagtatttatgctgcactttacttcttcccaattttaaccgtgcttcaggcagttggtggaggccttttatattacgccttcccatacattatattagtgttatctttggttactctggctgtgtacatgtctgcttctgaaatagagaactgctatgatcttctggtcagaaagaaaagacttattgttctcttcagccactggttacttcatgcctatggaataatctccatttccagagtggataaacttgagcaagatttgccccttttggctttggtacctacaccagcccttttttacttgttcactgcaaaatttaccgaaccttcaaggatactctcagaaggagccaatggacactgagtgtagacatgtgaaatgccaaaaacctgagaagtgctcctaataaaaaagtaaatcaatcttaacagtgtatgagaactattctatcatatatgggaacaagattgtcagtatatcttaatgtttgggtttgtctttgttttgtttatggttagacttacagacttggaaaatgcaaaactctgtaatactctgttacacagggtaatattatctgctacactggaaggccgctaggaagcccttgcttctctcaacagttcagctgttctttagggcaaaatcatgtttctgtgtacctagcaatgtgttcccattttattaagaaaagctttaacacgtgtaatctgcagtccttaacagtggcgtaattgtacttacctgttgtgtttcagtttgtttttcacctataatgaattgtaaaaacaaacatacttgtggggtctgatagcaaacatagaaatgatgtatattgttttttgttatctatttattttcatcaatacagtattttgatgtattgcaaaaatagataataatttatataacaggttttctgtttatagattggttcaagatttgtttggattattgttcctgtaaagaaaacaataataaaaagcttacctac

SEQ ID NO: 10290 - DNA, 570 bp, Homo sapiens
  source 1..570: mol_type = unassigned DNA
gttcggtgcagctgccagatccgctgatctagtgcttctcgaaaaaaaccttcaggcggcccatggcataaggagaaggaagtaaaaagtctgcttgaatgtgaaaggagagaaggcactgtagaccaggcagtctagattgtgaattcgtgaataatttgggaaatgattgttcaagaatagtcaaaagatgcataatttttcaaattaattcacatgtagaccgcagtttgttttgagacggagtctccttctgtagcccaggctggagtgcagtggcgcgatctcggctcactgcaacctctgcctcctgggttcaagcgattctcctgcctcagcctccccagtagctgggactacaggcgcgcgccaccacgtcaggctaatttttgtatttttagtagagacggggtttcaccattttggccaggctggtctggaactcctgacctcatgatctgcccacctcgacctcccaaagtgctgggattacaggcgtgagccacctcaccgagcctgtttgtttgttttaatcaatgaatgaatgaagggaatcagatgtcactgatg

SEQ ID NO: 10291 - DNA, 619 bp, Homo sapiens
  source 1..619: mol_type = unassigned DNA
cggtgcagctgccagatccgctgatctagtgcttctcgaaaaaaaccttcaggcggcccatggctgtcgatattcaaccagcatgccttggactttattgtgggaagaccctattatttaaaaatggctcaactgaaatatatggagaatgtggggtatgcccaagaggacagagaacgaatgcacagaaatattgtcagccttgcacagaatctcctgaactttatgattggctctatcttggatttatggcaatgcttcctctggttttacattggttcttcattgaatggtactcggggaaaaagagttccagcgcacttttccaacacatcactgcattatttgaatgcagcatggcagctattatcaccttacttatataccattgtatttatctattacgcattctgcttggtattaatgatgctgctccgacctcttctggtgaagaagattgcatgtgggttagggaaatctgatcgatttaaaagtatttatgctgcactttacttcttcccaattttaaccgtgcttcaggcagttggtggaggccttttatattacgccttcccatacattatattagtgttatctttggttactctggctgtgtaca

SEQ ID NO: 10292 - DNA, 592 bp, Homo sapiens
  source 1..592: mol_type = unassigned DNA
agctgccagatccgctgatctagtgcttctcgaaaaaaaccttcaggcggcccatggctgtcgatattcaaccagcatgccttggactttattgtgggaagaccctattatttaaaaatggctcaactgaaatatatggagaatgtggggtatgcccaagaggacagagaacgaatgcacagaaatattgtcagccttgcacagaatctcctgaactttatgattggctctatcttggatttatggcaatgcttcctctggttttacattggttcttcattgaatggtactcggggaaaaagagttccagcgcacttttccaacacatcactgcattatttgaatgcagcatggcagctattatcaccttacttgtgagtgatccagttggtgttctttatattcgttcatgtcgagtattgatgctttctgactggtacacgatgctttacaacccaagtccagattacgttaccacagtacactgtactcatgaagccgtctacccactgtaagtgtttatttcgacttaagatcattgtttttttttaaatctctgaggattattatagattttatggcgtttggagac

SEQ ID NO: 10293 - DNA, 2137 bp, Homo sapiens
  source 1..2137: mol_type = unassigned DNA
gatccgctgatctagtgcttctcgaaaaaaaccttcaggcggcccatgggtgagtggtcgccaagatcccgggaagcgtttctggtagtcccgactactttcctacacggctggcctcgggctcggctctttgtaggcggccttcggttggcggcgcaggctcgccccttgaccccgcccgccctcgggccgggctccgcactcctgcggggttggggtggtctgtccgcaacgggctactaggggaggcgcgctgtctgcggcgaaatgccaggtctttgttgtttggtccgaaatgtctcttcagtcccttagtttaatgtcgagggaacacttgcttgagggttgacttcggaattgaaaacgcgggtgatagtgcagaaaaaacagtaaagcagaagcaagttgctgcataatttgtctactgcttcaacctcaaacgtagatttatagcgcccgtcacaaagggcaggaccgctgcaaaaaaatggaatcttaaaactttagccatcgttcgctaaaggaaatgaaaggagaaattcaacagtcgcttggagcctgggttttgcttactgtcgatattcaaccagcatgccttggactttattgtgggaagaccctattatttaaaaatggctcaactgaaatatatggagaatgtggggtatgcccaagaggacagagaacgaatgcacagaaatattgtcagccttgcacagaatctcctgaactttatgattggctctatcttggatttatggcaatgcttcctctggttttacattggttcttcattgaatggtactcggggaaaaagagttccagcgcacttttccaacacatcactgcattatttgaatgcagcatggcagctattatcaccttacttgtgagtgatccagttggtgttctttatattcgttcatgtcgagtattgatgctttctgactggtacacgatgctttacaacccaagtccagattacgttaccacagtacactgtactcatgaagccgtctacccactatataccattgtatttatctattacgcattctgcttggtattaatgatgctgctccgacctcttctggtgaagaagattgcatgtgggttagggaaatctgatcgatttaaaagtatttatgctgcactttacttcttcccaattttaaccgtgcttcaggcagttggtggaggccttttatattacgccttcccatacattatattagtgttatctttggttactctggctgtgtacatgtctgcttctgaaatagagaactgctatgatcttctggtcagaaagaaaagacttattgttctcttcagccactggttacttcatgcctatggaataatctccatttccagagtggataaacttgagcaagatttgccccttttggctttggtacctacaccagcccttttttacttgttcactgcaaaatttaccgaaccttcaaggatactctcagaaggagccaatggacactgagtgtagacatgtgaaatgccaaaaacctgagaagtgctcctaataaaaaagtaaatcaatcttaacagtgtatgagaactattctatcatatatgggaacaagattgtcagtatatcttaatgtttgggtttgtctttgttttgtttatggttagacttacagacttggaaaatgcaaaactctgtaatactctgttacacagggtaatattatctgctacactggaaggccgctaggaagcccttgcttctctcaacagttcagctgttctttagggcaaaatcatgtttctgtgtacctagcaatgtgttcccattttattaagaaaagctttaacacgtgtaatctgcagtccttaacagtggcgtaattgtacttacctgttgtgtttcagtttgtttttcacctataatgaattgtaaaaacaaacatacttgtggggtctgatagcaaacatagaaatgatgtatattgttttttgttatctatttattttcatcaatacagtattttgatgtattgcaaaaatagataataatttatataacaggttttctgtttatagattggttcaagatttgtttggattattgttcctgtaaagaaaacaataataaaaagcttacctacat

SEQ ID NO: 10294 - DNA, 856 bp, Homo sapiens
  source 1..856: mol_type = unassigned DNA
tgcttctcgaaaaaaaccttcaggcggcccatggatttatagcgcccgtcacaaagggcaggaccgctgcaaaaaaatggaatcttaaaactttagccatcgttcgctaaaggaaatgaaaggagaaattcaacagtcgcttggagcctgggttttgcttacatgccttggactttattgtgggaagaccctattatttaaaaatggctcaactgaaatatatggagaatgtggggtatgcccaagaggacagagaacgaatgcacagaaatattgtcagccttgcacagaatctcctgaactttatgattggctctatcttggatttatggcaatgcttcctctggttttacattggttcttcattgaatggtactcggggaaaaagagttccagcgcacttttccaacacatcactgcattatttgaatgcagcatggcagctattatcaccttacttgtgagtgatccagttggtgttctttatattcgttcatgtcgagtattgatgctttctgactggtacacgatgctttacaacccaagtccagattacgttaccacagtacactgtactcatgaagccgtctacccactatataccattgtatttatctattacgcattctgcttggtattaatgatgctgctccgacctcttctggtgaagaagattgcatgtgggttagggaaatctgatcgatttaaaagtatttatgctgcactttacttcttcccaattttaaccgtgcttcaggcagttggtggaggccttttatattacgccttcccatacattatattagtgttatctttggttactctggctgtgtacatgtctgcttctgaaatagag

SEQ ID NO: 10295 - DNA, 1191 bp, Homo sapiens
  source 1..1191: mol_type = unassigned DNA
aaaaaaaccttcaggcggcccatggatgttactatactggcatttgtttttaaaaagctgtcgatattcaaccagcatgccttggactttattgtgggaagaccctattatttaaaaatggctcaactgaaatatatggagaatgtggggtatgcccaagaggacagagaacgaatgcacagaaatattgtcagccttgcacagaatctcctgaactttatgattggctctatcttggatttatggcaatgcttcctctggttttacattggttcttcattgaatggtactcggggaaaaagagttccagcgcacttttccaacacatcactgcattatttgaatgcagcatggcagctattatcaccttacttgtgagtgatccagttggtgttctttatattcgttcatgtcgagtattgatgctttctgactggtacacgatgctttacaacccaagtccagattacgttaccacagtacactgtactcatgaagccgtctacccactatataccattgtatttatctattacgcattctgcttggtattaatgatgctgctccgacctcttctggtgaagaagattgcatgtgggttagggaaatctgatcgatttaaaagtatttatgctgcactttacttcttcccaattttaaccgtgcttcaggcagttggtggaggccttttatattacgccttcccatacattatattagtgttatctttggttactctggctgtgtacatgtctgcttctgaaatagagaactgctatgatcttctggtcagaaagaaaagacttattgttctcttcagccactggttacttcatgcctatggaataatctccatttccagagtggataaacttgagcaagatttgccccttttggctttggtacctacaccagcccttttttacttgttcactgcaaaatttaccgaaccttcaaggatactctcagaaggagccaatggacactgagtgtagacatgtgaaatgccaaaaacctgagaagtgctcctaataaaaaagtaaatcaatcttaacagtgtatgagaactattctatcatatatgggaacaagattgtcagtatatcttaatgtttgggtttgtctttgttttgtttatggttagacttacagacttggaaaatgcaaaactctgtaatactctgttacaca

SEQ ID NO: 10296 - DNA, 2302 bp, Homo sapiens
  source 1..2302: mol_type = unassigned DNA
atgttactatactggcatttgtttttaaaaagctgtcgatattcaaccagcatgccttggactttattgtgggaagaccctattatttaaaaatggctcaactgaaatatatggagaatgtggggtatgcccaagaggacagagaacgaatgcacagaaatattgtcagccttgcacagaatctcctgaactttatgattggctctatcttggatttatggcaatgcttcctctggttttacattggttcttcattgaatggtactcggggaaaaagagttccagcgcacttttccaacacatcactgcattatttgaatgcagcatggcagctattatcaccttacttgtgagtgatccagttggtgttctttatattcgttcatgtcgagtattgatgctttctgactggtacacgatgctttacaacccaagtccagattacgttaccacagtacactgtactcatgaagccgtctacccactatataccattgtatttatctattacgcattctgcttggtattaatgatgctgctccgacctcttctggtgaagaagattgcatgtgggttagggaaatctgatcgatttaaaagtatttatgctgcactttacttcttcccaattttaaccgtgcttcaggcagttggtggaggccttttatattacgccttcccatacattatattagtgttatctttggttactctggctgtgtacatgtctgcttctgaaatagagaactgctatgatcttctggtcagaaagaaaagacttattgttctcttcagccactggttacttcatgcctatggaataatctccatttccagagtggataaacttgagcaagatttgccccttttggctttggtacctacaccagcccttttttacttgttcactgcaaaatttaccgaaccttcaaggatactctcagaaggagccaatggacactgagtgtagacatgtgaaatgccaaaaacctgagaagtgctcctaataaaaaagtaaatcaatcttaacagtgtatgagaactattctatcatatatgggaacaagattgtcagtatatcttaatgtttgggtttgtctttgttttgtttatggttagacttacagacttggaaaatgcaaaactctgtaatactctgttacacagggtaatattatctgctacactggaaggccgctaggaagcccttgcttctctcaacagttcagctgttctttagggcaaaatcatgtttctgtgtacctagcaatgtgttcccattttattaagaaaagctttaacacgtgtaatctgcagtccttaacagtggcgtaattgtacttacctgttgtgtttcagtttgtttttcacctataatgaattgtaaaaacaaacatacttgtggggtctgatagcaaacatagaaatgatgtatattgttttttgttatctatttattttcatcaatacagtattttgatgtattgcaaaaatagataataatttatataacaggttttctgtttatagattggttcaagatttgtttggattattgttcctgtaaagaaaacaataataaaaagcttacctacataaaatttcaatgttttgacacttaattgttgtttggcacaatagtatggaagtaattcaaactggtaaatagtttcctctcatatctcgggtatatatacataccatattttattgatccagagatacttatttcactttgtgacatctctgaattaggatgcatcttacaactgatggcttattagatttaatgaaatacagaagatacacagaataaaaagggttttcctgtggttggtttgtggtttgtgataggtgttctgtgatgtttatgctttgaaggccttaagactcatggttgcaaccatggaagcaaaatgaaatttttagctcttaacctaacaacctgaccatgtttatccatttttattgtttagaagtttatttactgatacttggtggaggttgtgtgaattagttaaattttaaatgtttaagacttctattaacagctgcaaaatatgaaagtaagtgcactcacttttcctgtagtagtctgtcttttgaattcacagcagttgtatccttgagttactttgttaatgtatttttctcagtacatttaaccactgggaaatgaacccttgtacgaatgtgtttcttcttctctgtaggaataaaaaataaatataaaaattttatttgtattgcacacatttggggggttattagtgttcattaaaattctgagttgcccaaagaa

SEQ ID NO: 10297 - DNA, 1951 bp, Homo sapiens
  source 1..1951: mol_type = unassigned DNA
ctctgtctcaaaaaaaaaataaaataaggaaatataaaagaatatggaggcattaatatagtcattgttcatgttggcattttgatgtctatattattttttaaaacatttaataattttataataatttctaatttatgatttggtaccgtgtcttgtacagtaagttgaacatcatgaatccagaacatttatctgcagttattcttatataatgttaataactaggtttttcattgaatgttagtcaactattttagtaacttagtaaaaggaatcttctaagagcattgtacaaatatagcacatacaatatagatttctttttattttacttatgccctcttttttatttctaaaagctgcacatgtaaacttaaatatttaaactgaaatgggatgtcttatagaatgatttgggggggtgttaatgttgtaaaataatatctgtacacaaaatattggttttatatattataggtatgcccaagaggacagagaacgaatgcacagaaatattgtcagccttgcacagaatctcctgaactttatgattggctctatcttggatttatggcaatgcttcctctggttttacattggttcttcattgaatggtactcggggaaaaagagttccagcgcacttttccaacacatcactgcattatttgaatgcagcatggcagctattatcaccttacttgtgagtgatccagttggtgttctttatattcgttcatgtcgagtattgatgctttctgactggtacacgatgctttacaacccaagtccagattacgttaccacagtacactgtactcatgaagccgtctacccactatataccattgtatttatctattacgcattctgcttggtattaatgatgctgctccgacctcttctggtgaagaagattgcatgtgggttagggaaatctgatcgatttaaaagtatttatgctgcactttacttcttcccaattttaaccgtgcttcaggcagttggtggaggccttttatattacgccttcccatacattatattagtgttatctttggttactctggctgtgtacatgtctgcttctgaaatagagaactgctatgatcttctggtcagaaagaaaagacttattgttctcttcagccactggttacttcatgcctatggaataatctccatttccagagtggataaacttgagcaagatttgccccttttggctttggtacctacaccagcccttttttacttgttcactgcaaaatttaccgaaccttcaaggatactctcagaaggagccaatggacactgagtgtagacatgtgaaatgccaaaaacctgagaagtgctcctaataaaaaagtaaatcaatcttaacagtgtatgagaactattctatcatatatgggaacaagattgtcagtatatcttaatgtttgggtttgtctttgttttgtttatggttagacttacagacttggaaaatgcaaaactctgtaatactctgttacacagggtaatattatctgctacactggaaggccgctaggaagcccttgcttctctcaacagttcagctgttctttagggcaaaatcatgtttctgtgtacctagcaatgtgttcccattttattaagaaaagctttaacacgtgtaatctgcagtccttaacagtggcgtaattgtacttacctgttgtgtttcagtttgtttttcacctataatgaattgtaaaaacaaacatacttgtggggtctgatagcaaacatagaaatgatgtatattgttttttgttatctatttattttcatcaatacagtattttgatgtattgcaaaaatagataataatttatataacaggttttctgtttatagattggttcaagatttgtttggattattgttcctgtaaagaaaacaataataaaaagcttacctac

SEQ ID NO: 10298 - DNA, 569 bp, Homo sapiens
  source 1..569: mol_type = unassigned DNA
tattgtccataaagtttttattggaacacagccgtgcccattcatgtatgtattctctatggctgctttcccactacaactgcagagctgggtaatcgagacagagaaatgcagggctgaaactatttactatcttgccctttccagaaaaagcttgctggccactgcctcagaaccttaggttgtaagtctcacagaactggttgagaaaggatttgactctaaggaaaattactatttgaatttatttgatggtttattgagaaaatttgtttcatttccaacataataccaatgcttatctttcagattacgccttcccatacattatattagtgttatctttggttactctggctgtgtacatgtctgcttctgaaatagagaactgctatgatcttctggtcagaaagaaaagacttattgttctcttcagccactggttacttcatgcctatggaataatctccatttccagagtggataaacttgagcaagatttgccccttttggctttggtacctacaccagcccttttttacttgttcactgcaaaatttaccgaacct

SEQ ID NO: 10299 - DNA, 2524 bp, Homo sapiens
  source 1..2524: mol_type = unassigned DNA
ctaaacccggaagcgagggaggaacttcggagctgtcgcccgggttaccgggaggcggagccgccgagctcgctgtggcccggatgttcggtgcagctgccagatccgctgatctagtgcttctcgaaaaaaaccttcaggcggcccatggatttatagcgcccgtcacaaagggcaggaccgctgcaaaaaaatggaatcttaaaactttagccatcgttcgctaaaggaaatgaaaggagaaattcaacagtcgcttggagcctgggttttgcttacatgccttggactttattgtgggaagaccctattatttaaaaatggctcaactgaaatatatggagaatgtggggtatgcccaagaggacagagaacgaatgcacagaaatattgtcagccttgcacagaatctcctgaactttatgattggctctatcttggatttatggcaatgcttcctctggttttacattggttcttcattgaatggtactcggggaaaaagagttccagcgcacttttccaacacatcactgcattatttgaatgcagcatggcagctattatcaccttacttgtgagtgatccagttggtgttctttatattcgttcatgtcgagtattgatgctttctgactggtacacgatgctttacaacccaagtccagattacgttaccacagtacactgtactcatgaagccgtctacccactatataccattgtatttatctattacgcattctgcttggtattaatgatgctgctccgacctcttctggtgaagaagattgcatgtgggttagggaaatctgatcgatttaaaagtatttatgctgcactttacttcttcccaattttaaccgtgcttcaggcagttggtggaggccttttatattacgccttcccatacattatattagtgttatctttggttactctggctgtgtacatgtctgcttctgaaatagagaactgctatgatcttctggtcagaaagaaaagacttattgttctcttcagccactggttacttcatgcctatggaataatctccatttccagagtggataaacttgagcaagatttgccccttttggctttggtacctacaccagcccttttttacttgttcactgcaaaatttaccgaaccttcaaggatactctcagaaggagccaatggacactgagtgtagacatgtgaaatgccaaaaacctgagaagtgctcctaataaaaaagtaaatcaatcttaacagtgtatgagaactattctatcatatatgggaacaagattgtcagtatatcttaatgtttgggtttgtctttgttttgtttatggttagacttacagacttggaaaatgcaaaactctgtaatactctgttacacagggtaatattatctgctacactggaaggccgctaggaagcccttgcttctctcaacagttcagctgttctttagggcaaaatcatgtttctgtgtacctagcaatgtgttcccattttattaagaaaagctttaacacgtgtaatctgcagtccttaacagtggcgtaattgtacttacctgttgtgtttcagtttgtttttcacctataatgaattgtaaaaacaaacatacttgtggggtctgatagcaaacatagaaatgatgtatattgttttttgttatctatttattttcatcaatacagtattttgatgtattgcaaaaatagataataatttatataacaggttttctgtttatagattggttcaagatttgtttggattattgttcctgtaaagaaaacaataataaaaagcttacctacataaaatttcaatgttttgacacttaattgttgtttggcacaatagtatggaagtaattcaaactggtaaatagtttcctctcatatctcgggtatatatacataccatattttattgatccagagatacttatttcactttgtgacatctctgaattaggatgcatcttacaactgatggcttattagatttaatgaaatacagaagatacacagaataaaaagggttttcctgtggttggtttgtggtttgtgataggtgttctgtgatgtttatgctttgaaggccttaagactcatggttgcaaccatggaagcaaaatgaaatttttagctcttaacctaacaacctgaccatgtttatccatttttattgtttagaagtttatttactgatacttggtggaggttgtgtgaattagttaaattttaaatgtttaagacttctattaacagctgcaaaatatgaaagtaagtgcactcacttttcctgtagtagtctgtcttttgaattcacagcagttgtatccttgagttactttgttaatgtatttttctcagtacatttaaccactgggaaatgaacccttgtacgaatgtgtttcttcttctctgtaggaataaaaaataaatataaaaattttatttgtattgcacacatttggggggttattagtgttcattaaaattctgagttgccc

SEQ ID NO: 10300 - DNA, 2338 bp, Homo sapiens
  source 1..2338: mol_type = unassigned DNA
ctaaacccggaagcgagggaggaacttcggagctgtcgcccgggttaccgggaggcggagccgccgagctcgctgtggcccggatgttcggtgcagctgccagatccgctgatctagtgcttctcgaaaaaaaccttcaggcggcccatggctgtcgatattcaaccagcatgccttggactttattgtgggaagaccctattatttaaaaatggctcaactgaaatatatggagaatgtggggtatgcccaagaggacagagaacgaatgcacagaaatattgtcagccttgcacagaatctcctgaactttatgattggctctatcttggatttatggcaatgcttcctctggttttacattggttcttcattgaatggtactcggggaaaaagagttccagcgcacttttccaacacatcactgcattatttgaatgcagcatggcagctattatcaccttacttgtgagtgatccagttggtgttctttatattcgttcatgtcgagtattgatgctttctgactggtacacgatgctttacaacccaagtccagattacgttaccacagtacactgtactcatgaagccgtctacccactatataccattgtatttatctattacgcattctgcttggtattaatgatgctgctccgacctcttctggtgaagaagattgcatgtgggttagggaaatctgatcgatttaaaagtatttatgctgcactttacttcttcccaattttaaccgtgcttcaggcagttggtggaggccttttataactgctatgatcttctggtcagaaagaaaagacttattgttctcttcagccactggttacttcatgcctatggaataatctccatttccagagtggataaacttgagcaagatttgccccttttggctttggtacctacaccagcccttttttacttgttcactgcaaaatttaccgaaccttcaaggatactctcagaaggagccaatggacactgagtgtagacatgtgaaatgccaaaaacctgagaagtgctcctaataaaaaagtaaatcaatcttaacagtgtatgagaactattctatcatatatgggaacaagattgtcagtatatcttaatgtttgggtttgtctttgttttgtttatggttagacttacagacttggaaaatgcaaaactctgtaatactctgttacacagggtaatattatctgctacactggaaggccgctaggaagcccttgcttctctcaacagttcagctgttctttagggcaaaatcatgtttctgtgtacctagcaatgtgttcccattttattaagaaaagctttaacacgtgtaatctgcagtccttaacagtggcgtaattgtacttacctgttgtgtttcagtttgtttttcacctataatgaattgtaaaaacaaacatacttgtggggtctgatagcaaacatagaaatgatgtatattgttttttgttatctatttattttcatcaatacagtattttgatgtattgcaaaaatagataataatttatataacaggttttctgtttatagattggttcaagatttgtttggattattgttcctgtaaagaaaacaataataaaaagcttacctacataaaatttcaatgttttgacacttaattgttgtttggcacaatagtatggaagtaattcaaactggtaaatagtttcctctcatatctcgggtatatatacataccatattttattgatccagagatacttatttcactttgtgacatctctgaattaggatgcatcttacaactgatggcttattagatttaatgaaatacagaagatacacagaataaaaagggttttcctgtggttggtttgtggtttgtgataggtgttctgtgatgtttatgctttgaaggccttaagactcatggttgcaaccatggaagcaaaatgaaatttttagctcttaacctaacaacctgaccatgtttatccatttttattgtttagaagtttatttactgatacttggtggaggttgtgtgaattagttaaattttaaatgtttaagacttctattaacagctgcaaaatatgaaagtaagtgcactcacttttcctgtagtagtctgtcttttgaattcacagcagttgtatccttgagttactttgttaatgtatttttctcagtacatttaaccactgggaaatgaacccttgtacgaatgtgtttcttcttctctgtaggaataaaaaataaatataaaaattttatttgtattgcacacatttggggggttattagtgttcattaaaattctgagttgccc

SEQ ID NO: 10301 - DNA, 9042 bp, Homo sapiens
  source 1..9042: mol_type = unassigned DNA
agtcaggccggctccgggctttctgcagcagcaccaggggcgggggcggggatcttgacctgggcgagcgaccgggacgcatacagcgccggcctgaccccgcgggacccgcgcctcaccaccggagcgccgcagacgcagctccacggcctcgcgcggggggcggcgggcggccgcgaggcgctgcggcagcgcggagcttgtaaacagatccggccgcaggtgaccatgtgaactacctgctcccgggacgcttattgtccttctctcgatccgcgccacaaaggagctcggcggtcggggcgcggagggacaggcgaacgagccgggagagccggccggcgcactaagatggctgaaggcgcccggcgagggtgagcggggggcgcggcgcagccagcggggagtcctcgggcgggccgggccggcggcccttccccgcggcgagaagccggagccaccatgtcgttcgcgctggaggagacgctcgagtcggactgggtggctgtgcggccccatgtgttcgacgagcgcgagaaacacaaattcgtctttattgtggcctggaacgagattgagggcaagtttgccataacctgccacaaccggacggcccagaggcagaggagcggctcccgggagcaagcgggggcgcgagggggcgccgaggccggcggagctgcgtccgacgggagccgcgggcccggcagcccggcgggcaggggtcggcccgaggccactgcctctgcaactctggttaggagccccgggccccggcggagctcggcctgggcggagggcggctctcctcggagcactcgcagccttctgggggacccgcggctgcggagtcctggcagcaaaggggcggagagtcgtcttaggagcccagtgcgggccaaacccatcccgggtcagaaaacatctgaagccgacgatgcggcgggggcagccgctgcagcagcccggccggcgcccagagaggcccaggtgtcctctgtacggatagtgagcgcctctgggacggtctccgaggagatagaggtgctggaaatggtgaaggaggacgaggcacctctggcgctctcggacgcggagcagccgccgcccgccaccgagctggagtctccggccgaagagtgcagctgggccggactgttttctttccaggacctgcgcgccgtgcaccagcagctgtgctcggtgaactcgcagttggagccgtgcctgccggtgttccccgaggaaccttcgggcatgtggactgtgctgtttgggggcgcccccgagatgaccgagcaggaaatcgacactctgtgttaccagctccaggtctacctgggccacggcctggacacctgcggctggaagatcctctcccaggtgctcttcaccgagaccgatgatcccgaggagtattacgaaagcctcagcgagctgcggcagaagggctacgaagaagtgcttcagcgggccaggaagcgcatccaggagctcttggataagcacaagaatacagagagcatggtggagcttctggacttgtatcagatggaggatgaagcctacagcagccttgcagaagctacaaccgaactctatcagtatttactacagccattccgagacatgagagaacttgccatgctacgaagacagcagatcaagatttccatggagaatgattatctgggacctcgaagaattgagagtctacaaaaagaagatgctgattggcagcggaaagctcacatggctgtactgtctattcaagatcttactgtcaagtactttgaaataacagctaaagctcaaaaagctgtgtatgatcgaatgcgagctgatcagaagaaatttggtaaagcatcatgggcagcggctgctgaacggatggaaaaactccagtatgcagtttctaaggaaactttgcagatgatgagagctaaagagatatgcttggaacagcggaaacatgcactaaaggaagagatgcagagtttgcggggtggtacagaagcgatagcacgattggatcagttagaagctgattattatgatctgcaacttcagttgtatgaagtacagtttgaaatcttgaagtgtgaagagttactattgacagcgcaactagaaagcatcaaaagacttatatcagaaaaaagagatgaagtggtatactatgacacttacgaaagcatggaggccatgctggagaaggaagagatggcagcatctgcgtacttacagagagaagagctgcagaaacttcagcagaaagcacgccagctggaagcaagacgtggacgggtttctgccaagaaatcctacctcagaaataaaaaggaaatatgtattgcaaaacacaatgaaaaaatccaacagcgcactcggattgaagatgaatatagaacccatcacacagtacaactaaagagagaaaaattacatgatgaagaagaaagaaaaagtgcctgggttagccaagagagacagagaacactggatagacttcgaacatttaaacagaggtatcctgggcaagtcatacttaaatcaaccagattacgactagctcatgcaagaagaaaaggtgcagcaagtcctgttctccaagaggatcattgtgactctttaccaagtgtgttacaggtagaagagaaaactgaagaggtgggagaaggaagagtcaagcgtgggccatcacagacaacagaaccccagagccttgtgcaacttgaagatacttcattaacacaacttgaagccacctcattacctctcagtggtgttacctctgaactgcctcccactatatctcttccacttttgaataacaacctcgaaccatgttctgttaccataaatccactcccatcccctcttcctccaacaccaccacctcccccacctcctccccctcccccaccaccaccacctctgcctgttgctaaggacagtggcccagagacactggagaaagatctgcctagaaaggaggggaatgagaagaggatcccaaagtcagccagtgccccctcagcacacctctttgacagcagccagctggtcagtgcacggaagaagctcagaaagactgctgaaggtttgcagaggaggagagtgagctcacccatggatgaggtgctagcctccttgaagcgtggtagttttcatctgaaaaaggttgaacagcgaactctgcctccttttcctgatgaagatgatagtaataatatcttggcacaaataaggaaaggggtaaaattgaagaaggtacagaaggatgttttgagagaatccttcacacttctacccgatacagaccctctaacacggagcatccatgaagctcttagaagaattaaagaagcatccccagagtcagaggacgaagaggaggctttaccttgcacagactgggagaactaacaagtgacataacagaagaaaaatatcattcaagattggttctgattcttttggaaaatgacagtttaagcacttggttcctcagttggataacattagatccaaagttcattggttcagtggtgtgaagaaaggaagcacaattggcaggttatcactttccagtcgttccaatagatgatggttaacatgaattttacatgtgcaatgttcctgactgcaatgaagaaaaggccttctggagatttctgttttttaagcacattctccttccatccacatatttacatccttgtaatggccagttaagctagggcttgctgtaagttggaagaacactgggttgacagagatctactgtgagctgtattgggactgctttgagaaccatctttcaatgcactgaaaagtcatctgaaaaaatagcttcttccatatcagcttatattaaatactgtgacactctgagaaagtttatcatcatgatagctgtaagtcaggcattaaaatcaaatggaaatacacctaaaatgtccgcattactcatttccaaaggatttttcataaagatgttcagcaacatctgaaaagctgcatttatggagatacatctattaatatgttcacaacatgatacatttaacatggcatatttttaggagtcttatactttgtaaggttttgaagtttccgtgcttttaaatcactcttcatatttcttgaatttataatagtttgaattttatgtgcatccttgtttatggaaggcagtactttgataatatttcaaattatttttattttgtttgaattattgcttgattgctatgactgacatgactttcctattgagaatcaaaaatcaagattcaatcatagggatgcagatcttaactcttttcacaaattaccattttaagtttttatttttatgctccacagtgaaaagcatgtgctctacaaagatagaaagtagagacaagtctccgtggctggcatttcaccatcttcacatgcactgaatggaattttgggagaatgcctttgttatagtcactaaaattttaaacttatacacagctttaggtgctgattttggctgtgatggagtcctgaaggacacatttatatgttccagattttcagcaggattgttgtgggcttgaatacatgtagatcattggactcagtgtgcagtaccctgtacatataattctgcataagacagatcttggcctttctgtggagggagttaagaactaaaataccaaaaatcactttatttcttttaagacaattatctggcctaaacccagaaagcagtactggagcaaaagcccagtgtatatgaattggtattcctagagaaaaaaagaaatgctcacacctttgttattttaaagtgttttcttgaaaataattagggagaaaattttctggcaacaggttatgtaagacaacaactttttttattatttcaaaacaaaacaggcacatgccaccatgccccagctaatttttatattttttatagagacagggttttgccatgttgcccacgctggtcttgaactcctggactcaagcaatctgccagcctcggcctgctaaagtgctaggattataggcgtgagcctctgtgcccagcctgacaaaatcttttatttatttaaatgttagtaatacgtttattgatgagactaggagcttctctgcagcatcttcataatacattggttttagttcccacactattcccacatcttatctgggaagattagaaatacagatgtaatatggaagcttcaacagcatgggggtggtgatagtgtcctatttgcccttggtaaaatattaaagcgtatttcttaacccaaagagtgattggttatatgaatatatttgaaaaagttaaagcaaatttgcaaacctttacaaaatcatgtatcaattttatgctatccagtttttacgtacccatgtgtcaacatttcatatatccagttctttgggtgctggttcactttttttcatttattcaaattcagaaaaatacggacggatctaatgttaaattaaccagaaaccctggaacattcatatcttgagagggaatttgctactcttttacttttgggatttcattataaaataggctcattttatacatatgtcctgtggtctgtcttccagagtgtgctgtaatcataagtctctagcaaagagtggagggtggagggtgtgtagaactccactcagcctcatggatacatctacaagtctctcaacccatcctgttacagttctccatgagagtcacctcacacttggaaaagaaggaggttaaagcagagtattgttggcagccagctatgcccatcctcttgtaaataactttccaacacacccatttccttgccttaaggtgcaggttcctacttctacaaaatttcaaatgattgcaggtcaaaaacctttggagttactcacaaataataataaaatttcaaataactagggtctacttgtccatcaagatgacattaccagtggaacccacctgttaattttaaagtagcttcagaacccaacaaaaattatgtaagcctggttaaatgtccttttttcttcttgcctctaataaaatcaggatcttcggccttgatactaaatatgtgtatatttagttatgatggtacttgtagatgctcacatttccagttccaaactcgcccgtactttttatgtgcttcaaaatattggacacatttctgttaatatatgatttctgtatccacaaaccgctgtttgcttatgctgagtcaatttagaagttaatttccaatctagtctcaactgcaatgcatttaaaataggtaaaacaagtaaatgagtttgggacattttgagattaatgttactgcccacttgactgtcaatttcaaatggctcctaatgcaaccaaaattataaccaatgtagcatgtgtaggaaaggtatttttaattatttaaaatcattgtgtatattacagcagtatgaggaatgcctggctaaagaggattttttaaaagatgaagaatggttttgcttgtattatataggcttactgagtttgtgagcagcataaaaacaatcattccttaattcttcattgtggaactgaaatatttctgtaatgcattttttaaaaggagactcctagacacagctgtaatagtgggaatagaaatgtagagcttttctcataacacaaaaccagaaaataattttcagcactttgacttactctatgtaataaggaaaaaaattgtttccacaaagttgaactatgtagtaatatttggtaacatatggcatggccactttatatcacagaatgtgtgtcaagttgcaaagcatacttgggccatagtagacactaagaattaaaactcttaaatcagtgaaacaaaaactaatgggcagcattctctctgtttggaatgggatcagtatacaattaatacaatttaattttacacattccctaagacaccatttttaagttacagtcacatgagtgtttgtataaatttaagtcaatgcttttagcctaggcaaagctaaatacaaggtttttggggttttcttttttcagctttattattgaagtattacaaacttaacatcagataccaatgtgtaaaaagtactattgggtccttaagggctctatcagggagttgaaatttcatacgctttaccaggttacttgtaaaaaatgaacagctgtaagacatttcaaaaccattgcagacacattgttaaaatgcagccatttgataatgaaagcagaaaccttaagttttacctaattattgcactaaatgtaaatgataacataaaattaagtgtgcattttaaacagattctatttcccacttactgcttagcatagaaaaagagctatggttagaggagtgaccagcaagatttatttcagatggaaaaggggtgagaaagtggaagcaccttactgttagagcatgttgcatctatttagtgctactgaacaattcagtagttatttctgaactttgctgcaaagtgctctttagttaaagcacattaagaagggtcactgcttaattgctttgtaaaatgaagcaatggtattttttatccgatatagtgtaatttaaaagttttcctacaaagtgagtttatattgttgcctaaactatgttatgtaagcaaagggtttggaaaggcgggagggagtctagattcggcgagagtgtgcgtttgtgtgtgtgaatgtatgaaaagtttccccattgggttattcttaagatgtgtttattgtaaagttttctacgttttgcccacagtaaatgtacaacttcgcaattgtaggatttaattgattgaattccaaatttatactgtctcttcccttctgcagagacattatgccactgtaaggtgcatgtacagaaaatacctctgaggttgacttgttaaataactgatgaatgttatttcacactgaatctcaaagcagtcatttgttttgcgggttaggggaaagttttgttttttgctggtgttttttgttgtttttaattaggcacactaagagtggctaaatttgggggaattggtggataggaaagaccttgaaaagtgatgtgtagatgaaaacacaaggtatggatgttggttacagagttcagttttaacaagggaaatttggggattttttttttttttacttgcatgttctatgggtagctatcaaagggtgtaacaaattattccagcttttcccaatactaattatattggttttaaaaagtctgcataatcactaggtggcattttcccttcatttgtgaaccaagaggggtaaatgatgctacccatacagtgacttctgagttctttaactttgacagaatctccattgtttcattgaatttctcattgtattatatgtctttccaagtgtgcaaactataatatgtagttaatgaaaaatggaaggctgcagattattttgcatgaataattaattgcccattagggctaaggagactgacatgatttttatcggttctgggtaaatgaaaattttaatggaaaactcattcaccatttactagctttgtgcaatattataaaaggtagaagcaaaacactagcacattgtgctttgcttggcttgtaaggatggctttagtaccattacattaaatggacagtgtgcacagtgtattgtaaatgccaactcttgcaaatttacaatacttaaatatgttcaattaacatcctaaagtattaaaagtacagaggaaaaactaagcaagcatttatagcaataccatgaaatctccagtaatcgttttgactgttgccttttgctctttagtgcagcttttctgcattgtaattgtattgctttgtatttcatgttttttacactcatgacttcagagttaagtacttgtacaccaagtattgcaatcacctttctcttgttgtacatgcaatgtaacaacctacagttttggtgcttttaacaatattcctctttttctttaataaaggatatttatttgaattaattaa

SEQ ID NO: 10302 - DNA, 409 bp, Homo sapiens
  source 1..409: mol_type = unassigned DNA
gtacagtttgaaatcttgaagtgtgaagagttactattgacagcgcaactagaaagcatcaaaagacttatatcagaaaataattttcagcactttgacttactctatgtaataaggaaaaaaattgtttccacaaagttgaactatgtagtaatatttggtaacatatggcatggccactttatatcacagaatgtgtgtcaagttgcaaagcatacttgggccatagtagacactaagaattaaaactcttaaatcagtgaaacaaaaactaatgggcagcattctctctgtttggaatgggatcagtatacaattaatacaatttaattttacacattccctaagacaccatttttaagttacagtcacatgagtgtttgtataaatttaagtcaatgcttttagc

SEQ ID NO: 10303 - DNA, 3648 bp, Homo sapiens
  source 1..3648: mol_type = unassigned DNA
acttcccgcgcccgctcgccgctgaccggagttgtctcctcctccgcagggccgcggccagagggctagaatccgcgccttccgagggagccgcgccctgcgggccccaccgtacccgaggggatggagggctgcccccgaggcccccgcgcggctcgcggtcccacgcctgccggcccgcgctagctactcgactcgtgcgctaaatttatccgtcacccaggccttgtctcccgagtcattggcgtcgtggttcaaaagaaatggaagaaaaggagcgatgtgaccgattgtgttcggtcctcctgctttgaggcctggcatttgcagagggaaacagcaagaaaatcgtggggattttggaggggggtgggagggaagggtggggaaacggaaacaaggtcttacattttatgtgtttttttaaattctgcactttgacagtggtagcaaaataaaagtaatccaaaagttatttttctattgagaagagagaagaggtgggttttatttttttccttttgattccaatcttttctcccagtgacaaagcataaatcatggacaccagagaataaggtggacctcaggaatccggaaaagactgagaagcttacattcttcctctagagggaagagtggggtgtttatagccatctctggaacctaaaacaaaaaacatgagttgtgtgccatggaaaggagacaaggccaaatctgaatcattggagctgccccaggcagcacccccacaaatctaccatgagaaacagcgcagggagctttgtgccctccacgccctcaataacgtcttccaggacagcaatgccttcacccgggatacgctgcaagagattttccagaggttgtctccaaacaccatggtgacacctcacaagaagagcatgctgggaaatggcaactacgatgtgaatgtcattatggcagcacttcagaccaaaggctatgaagctgtttggtgggacaagcgcagggatgtcggtgtcattgccctcactaacgtcatgggcttcatcatgaatctgccctccagcctatgctggggtccactgaaactgcccctcaaaaggcagcactggatctgtgttcgagaggtgggaggggcctactacaacctcgactccaaactcaagatgcccgagtggattggaggcgagagcgagctcaggaagtttctaaaacatcatttgcgaggaaagaactgtgaactcctgctggtggtaccagaagaggtagaggctcatcagagttggaggaccgatgtgtaacagttctgcccaacctccctctcgcctcagccccttcagtcctctgtgacgtgctgtggcctctacagtgggtctgcccttgccacttccccaaacatctcatcaagtttttccccttcagatctgacagtgcaataggacagacgtgtggactgttataagaactactcagtgttttgttcctgggcaaggaaggtaggagttctgtgcacttaaggccagtggtcacaaacccttgttttatttaagagacagaggagaaagtggagcggggagggaatcctagcttattttcccttttctatgaggacttgacacaggttctgctgagttgtcactgctgctccagactcacctagagatgctgcctccactttccatcctgtctgggtctgaaaacagtgggtctgcagatagtgcccacaaaccccatgtgactggtttgaaggacccagagcataaaggtctctcaggaaaccatgtccaaaaccctagcagcggtacagcatgctgtctccaacccttatccccaggtttaagggtggtttatggccatacgtggaggttttttgttgttgtttttgagactgagtttcactcttgttgcccaggctggagtgcaatggcaccatctcggctcactgcaacctccacctcctggttcaagcgattctcaggcctcagcttcccaagtagttgggattacaggcgcctgccaccacacctggctaattttgtatttttagtagagatggggtttctccatgttggtcaggctggtctcaaactcccgacctcaagtgatctgcccgccttggcctcccaaagtgctgggattacaggcgtgagccaccgcacccggcagagttttataatgaaaaattaactaatattctagtatgaagtgaggaggatactgaacaggatgtggctaaagccaacctgggacagccatggggtggcttggtttcttcactccagtgttgtccctaccatttcgcagcattgatttaggaggctctgggacaaaagagaagccaaagagcagttttcccagttcactcactctggcaaaatcaggaaaaaaaagtctgcttttgacatcaaattccactaatttggggcagcgttgggtgaggaaagtattgtgaagacaggcttcttggagtaggggcagccacaattcagtagacactctaggctcggaggctgccactgtagttgccaagctcaggttgggtggttctgtgctgtatggatggaataggacctgggctggtcatcttcatgtcgtttcctctctgtatcaatggaagttcaacccgcccctacctcttcagatagttgtaggccacttttctcttgtaactttggaaaacaaaagaggagaaataagtatcataccatatgcgtgtctccaaagtggatgtggttgcctcaaggcaggtggcaggcaggggtgacctgctggccctcagatcaatggtcgtggcaggtctgagagctgtcccactggccagacttctctccagcagcaaagccagcctggggcttgcatgttgatcctgagcaagcttaacggggtgaagctgggctttctcccccctgtgactggagtgcatgttgacaccagcactttttctgcacatgtatcttcaatccaacaaggccgtttttttaatgctgagtaacaggccaccaagcggctactgcgttatatcttctcagcaactggccgcagtctcttctgcaccattttctacaccagacctgcttggcaccacagggagctcttttcctgccctgcacaatgacattccaaccaccaccagccagacattacagccaaccttgctgattgtcacaagcaggaccttggggccactggcactgtcagatagtaagccatttcttgggtagaggaggaaactcctctccacaaatccacttgggcctgtgcaaatggcacttgaaagagtccccatgcacttggagtccatgagccaatgggatatgcaaagacgcttaaacatttcagggctggtttctctgttcatatccaattctggtgcttaggaacagggacccatgctgatgcccaagggcaaaaagccccacttcctttaaggaagtgaacaggcctgaccctgatgcccaataacgggcaaccctaggctttttgtttttcttgcttttattcctttttgttgttggccttgtgctgcgtttgtttacaaaagatgtattttgtttaaccaaatattaaaaatggaaaactccatatatgtctccttgtctgcctgaattctataattgtgtaaagaaaaataaactttagtatgacgctgttttaaaagga

SEQ ID NO: 10304 - DNA, 647 bp, Homo sapiens
  source 1..647: mol_type = unassigned DNA
gaaaggagacaaggccaaatctgaatcattggagctgccccaggcagcacccccacaaatctaccatgagaaacagcgcagggagctttgtgccctccacgccctcaataacgtcttccaggacagcaatgccttcacccgggatacgctgcaagagattttccagagggatgtcggtgtcattgccctcactaacgtcatgggcttcatcatgaatctgccctccagcctatgctggggtccactgaaactgcccctcaaaaggcagcactggatctgtgttcgagaggtgggaggggcctactacaacctcgactccaaactcaagatgcccgagtggattggaggcgagagcgagctcaggaagtttctaaaacatcatttgcgaggaaagaactgtgaactcctgctggtggtaccagaagaggtagaggctcatcagagttggaggaccgatgtgtaacagttctgcccaacctccctctcgcctcagccccttcagtcctctgtgacgtgctgtggcctctacagtgggtctgcccttgccacttccccaaacatctcatcaagtttttccccttcagatctgacagtgcaataggacagacgtgtggactgttataagaactactcagtgttttgttcct

SEQ ID NO: 10305 - DNA, 467 bp, Homo sapiens
  source 1..467: mol_type = unassigned DNA
atgaagctgtttggtgggacaagcgcaggtaatctgaatcaggcttgacttgatggagaacagcacggttgtggtataagcttttagtacttgggctcatggcatgagtggggaggtagccagttgtggtattacagccagggaaccttggaaaatgggctgcatcagagcctgccaccatttctcccctgcagggatgtcggtgtcattgccctcactaacgtcatgggcttcatcatgaatctgccctccagcctatgctggggtccactgaaactgcccctcaaaaggcagcactggatctgtgttcgagaggtgggaggggcctactacaacctcgactccaaactcaagatgcccgagtggattggaggcgagagcgagctcaggaagtttctaaaacatcatttgcgaggaaagaactgtgaactcctgctggtggtaccagaagaggtagaggctcatca

SEQ ID NO: 10306 - DNA, 571 bp, Homo sapiens
  source 1..571: mol_type = unassigned DNA
gaggacggcgcgggagggcgtttccggagcacgcgccgggcgggggccgctgacgtcgggctcagtgacaaagcataaatcatggacaccagagaataaggtggacctcaggaatccggaaaagactgagaagcttacattcttcctctagagggaagagtggggtgtttatagccatctctggaacctaaaacaaaaaacatgagttgtgtgccatggaaaggagacaaggccaaatctgaatcattggagctgccccaggcagcacccccacaaatctaccatgagaaacagcgcagggagctttgtgccctccacgccctcaataacgtcttccaggacagcaatgccttcacccgggatacgctgcaagagattttccagaggttgtctccaaacaccatggtgacacctcacaagaagagcatgctgggaaatggcaactacgatgtgaatgtcattatggcagcacttcagaccaaaggctatgaagctgtttggtgggacaagcgcagggatgtcggtgtcattgccctcactaacgtcatgggcttcatcatgaatctgccct

SEQ ID NO: 10307 - DNA, 529 bp, Homo sapiens
  source 1..529: mol_type = unassigned DNA
agttggcggcgcgcactccaggtggcggccggctgcggtgaggggaccgccagcggcgagcagtcccggcggccctgggtgacaaagcataaatcatggacaccagagaataaggtggacctcaggaatccggaaaagactgagaagcttacattcttcctctagagggaagagtggggtgtttatagccatctctggaacctaaaacaaaaaacatgagttgtgtgccatggaaaggagacaaggccaaatctgaatcattggagctgccccaggcagcacccccacaaatctaccatgagaaacagcgcagggagctttgtgccctccacgccctcaataacgtcttccaggacagcaatgccttcacccgggatacgctgcaagagattttccagaggttgtctccaaacaccatggtgacacctcacaagaagagcatgctgggaaatggcaactacgatgtgaatgtcattatggcagcacttcagaccaaaggctatgaagctgtttggtgggacaagcgcag

SEQ ID NO: 10308 - DNA, 623 bp, Homo sapiens
  source 1..623: mol_type = unassigned DNA
acttgaaatgtgactcccagcgagacacctacccttgacgctccctggacagtgcggcacggtcgggcccactaaccaaggcaatttgcgcccgaccgaatcaggtgcttcaaaatcccccctggtgagccgcgcgttaaccacacataaaacagtcaacgcagaaggagcgagaacgttcggccgaaaagcccggcacagagaagggaggggtgctgaaagccgcggactgcagccgctggcctggctgccgccccgaaacaacgcccacgcccgggagaagggcaggctggcgtccagtgacaaagcataaatcatggacaccagagaataaggtggacctcaggaatccggaaaagactgagaagcttacattcttcctctagagggaagagtggggtgtttatagccatctctggaacctaaaacaaaaaacatgagttgtgtgccatggaaaggagacaaggccaaatctgaatcattggagctgccccaggcagcacccccacaaatctaccatgagaaacagcgcagggagctttgtgccctccacgccctcaataacgtcttccaggacagcaatgccttcacccgggatacgctgcaagagattttccagaggt

SEQ ID NO: 10309 - DNA, 843 bp, Homo sapiens
  source 1..843: mol_type = unassigned DNA
gcgcactccaggtggcggccggctgcgggccgcggccagagggctagaatccgcgccttccgagggagccgcgccctgcgggccccaccgtacccgaggggatggagggctgcccccgaggcccccgcgcggctcgcggtcccacgcctgccggcccgcgctagctactcgactcgtgcgctaaatttatccgtcacccaggccttgtctcccgagtcattggcgtcgtggttcaaaagaaatggaagaaaaggagcgatgtgaccgattgtgttcggtcctcctgctttgaggcctggcatttgcagagggaaacagcaagaaaatcgtggggattttggaggggggtgggagggaagggtggggaaacggaaacaaggtcttacattttatgtgtttttttaaattctgcactttgacagtggtagcaaaataaaagtaatccaaaagttatttttctattgagaagagagaagaggtgggttttatttttttccttttgattccaatcttttctcccagtgacaaagcataaatcatggacaccagagaataaggtggacctcaggaatccggaaaagactgagaagcttacattcttcctctagagggaagagtggggtgtttatagccatctctggaacctaaaacaaaaaacatgagttgtgtgccatggaaaggagacaaggccaaatctgaatcattggagctgccccaggcagcacccccacaaatctaccatgagaaacagcgcagggagctttgtgccctccacgccctcaataacgtcttccaggacagcaatgccttcacccgggatacgctgcaagagattttccagag

SEQ ID NO: 10310 - DNA, 525 bp, Homo sapiens
  source 1..525: mol_type = unassigned DNA
gtgaggacggcgcgggagggcgtttccggagcacgcgccgggcgggggccgctgacgtcgggctcagggccgcggccagagggctagaatccgcgccttccgagggagccgcgccctgcgggccccaccgtacccgaggggatggagggctgcccccgaggcccccgcgcggctcgcggtcccacgcctgccggcccgcgctagctactcgactcgtgcgctaaatttatccgtcacccaggccttgtctcccgagtcattggcgtcgtggttcaaaagaaatggaagaaaaggagcgatgtgaccgattgtgttcggtcctcctgctttgaggcctggcatttgcagagggaaacagcaagaaaatcgtggggattttggaggggggtgggagggaagggtggggaaacggaaacaaggtcttacattttatgtgtttttttaaattctgcactttgacagtggtagcaaaataaaagtaatccaaaagttatttttctattgagaagagagaagaggtgggtt

SEQ ID NO: 10311 - DNA, 505 bp, Homo sapiens
  source 1..505: mol_type = unassigned DNA
aaccacacataaaacagtcaacgcagaaggagcgagaacgttcggccgaaaagcccggcacagagaagggaggggtgctgaaagccgcggactgcagccgctggcctggctgccgccccgaaacaacgcccacgcccgggagaagggcaggctggcgtccagggccgcggccagagggctagaatccgcgccttccgagggagccgcgccctgcgggccccaccgtacccgaggggatggagggctgcccccgaggcccccgcgcggctcgcggtcccacgcctgccggcccgcgctagctactcgactcgtgcgctaaatttatccgtcacccaggccttgtctcccgagtcattggcgtcgtggttcaaaagaaatggaagaaaaggagcgatgtgaccgattgtgttcggtcctcctgctttgaggcctggcatttgcagagggaaacagcaagaaaatcgtggggattttggaggggggtgggagggaagggtggggaaac

SEQ ID NO: 10312 - DNA, 480 bp, Homo sapiens
  source 1..480: mol_type = unassigned DNA
ccagttggcggcgcgcactccaggtggcggccggctgcggtgaggggaccgccagcggcgagcagtcccggcggccctggggtctgcggccgggggcgcggcgggagggcgtctgggcctgcgctcacgtgacgggcggggagggccgcggccagagggctagaatccgcgccttccgagggagccgcgccctgcgggccccaccgtacccgaggggatggagggctgcccccgaggcccccgcgcggctcgcggtcccacgcctgccggcccgcgctagctactcgactcgtgcgctaaatttatccgtcacccaggccttgtctcccgagtcattggcgtcgtggttcaaaagaaatggaagaaaaggagcgatgtgaccgattgtgttcggtcctcctgctttgaggcctggcatttgcagagggaaacagcaagaaaatcgtggggattttggaggggggtgggagggaagggtgg

SEQ ID NO: 10313 - DNA, 4378 bp, Homo sapiens
  source 1..4378: mol_type = unassigned DNA
gtccgtgcccctgcggggagcgcgccggggctgccccccgaatgacgggcggaaggttcgacttcgacgatggcggcacctactgcggcggctgggaggagggcaaggcgcacgggcatggcatctgcacggggcccaagggccagggcgagtactcgggctcctggtcgcacggcttcgaggtggtcggaggctacacctggcccagcggcaacacctaccagggctactgggcgcagggcaagcggcacgggctgggggtggagacgaagggcaagtggatgtaccggggggagtggtcacatggtttcaaggggcgctacggggtccggcagagcctgtgcacccccgctcgctacgagggtacctggagtaacgggctgcaagacgggtacggcgtggagacctacggggacggaggtacctaccagggccagtgggccggaggcatgcggcatggctacggcgtgcgccagagcgtgccctacggcatggccacggtgatccgctcaccgctgcgtacctcgctggcctcgctgcgcagcgagcagagcaatggcagcgtgctccacgacgccgcagccgccgccgacagcccggccggcacccgcggcggtttcgtgctcaacttccacgcagacgctgagctagcgggcaagaagaagggcggcctcttccggaggggctcccttcttggaagcatgaaacttcgcaagtccgaatccaagtcttccatctcgagcaagcgcagctctgtccgcagcgacgcggccatgagcagaattagttccagcgatgccaactccacgatcagctttggcgatgtagattgtgatttttgcccggtggaagaccacgtggacgccaccaccacggaaacctacatgggcgagtggaagaacgacaagcgcaacggcttcggcgttagcgagcgctccaatggcatgaagtatgaaggggagtgggcaaataacaagaggcatggatatggctgtaccgtgtttcctgacggctccaaagaagagggaaaatacaaaaataatattctggtccgtgggataaggaagcagcttataccaataagacatacaaaaactagggagaaggtggacagagcaattgaaggcgcccaaagggcagctgccatggccagaaccaaagtggaaatagcaaattcaaggactgcacatgccagagcgaaggccgatgccgccgaccaggccgcgctggccgctcgccaggagtgcgacatcgcgagagctgtggccagggagctgtcacctgatttctaccaaccaggccctgattacgtcaaacagagatttcaggaaggtgtagatgctaaagaaaatccagaagaaaaggtaccagaaaagccacctacaccaaaggagtctcctcatttttatcgcaaaggcacgacacccccaagatctcctgaggcaagtcccaaacacagccactctcctgcttcctccccaaagcccctgaagaagcaaaaccccagctcaggggcgagactcaaccaagacaaaaggagtgtggctgatgagcaggtgacggccattgtcaataagcccttgatgtcaaaggctcccacgaaggaggcaggagcggttgtgccccagtccaagtactctggccgccaccacatccccaaccccagtaacggggagctgcattctcagtatcacggctactacgtgaagctgaacgccccccagcaccctccagtagacgtggaggacggcgatggatccagccagtcttcctcagcactggtgcacaagccatccgctaacaagtggagtccctccaaatctgtgacaaaaccagttgccaaagaaagcaaagctgagccaaaagctaagaagtctgaacttgctataccaaagaatccagcaagcaacgattcatgccctgctttggaaaaagaagccaattcaggccctaattcaatcatgattgtccttgtcatgctgttgaatatcgggttggccattctttttgttcactttctaacttgattggaattaggaaagtgaagtcctgacaactagtggtgtgttagcccacagttctctgcagtggtgccgtcagccctttaaatggcccaccccaggcagactcagacacagggaaggaggcttggaattaggatgggatcgcgagagagatgaaacttggaaaattcagccagaggacctgttcggttcccctgggagtgctttgtggctttggggtcctctgggagctgaagcacacggccatgttggagagcaaaacttaataataattcttttttaaaatctgctgaagcagccccatccggcgaagttcttggcattggctactccatctgtcctagcagagtgtgactaaactggaaatgtatggagctgcattttttttttttttttgatggaagtcaacagctgccttactattttaccatctgacgtttttagtagggagctggggaaacgactgcccgaggaatgcggtcggaggattgtgttgctgtggacgtggttccaacattcactcctatctcattagaagaaataggtagcagcatcactcaccagtcttatgccatgacctgctgctttaacatctcctggaatgttctgggagagaacgtttcgtttgcttgtgcacgactctgttcatttttgctgtttatttaaatctgacgtatagtcatctaccacctgcggtcctggccggacgaaacacacgtgttgcatctcaaggaaaagaaacaacaaaatgctagtgaaaatgtgcttattttgatagcaatataccatcttttatgtcatttattcttcctatacttgtaaaaggttatttatctttaaaatttagcaatttgaagacactatgccttcctaagaactaatttaattctaaatatttttaacattactgaggtgaattatttatgcacttaggaagtgctaaattttaaaagctgaaacacaacagaattctaagaaatatagtccaaacgttgcatggattgcagtaatcagtgtttaaaggattcagtttctttgctgacgtactttacaaccaaataaaatcttgtcggtggctgtgttaattcccatgaaagttaagcaagatgctattaataaactgctctgctctttcttgttttctttttccaacttaaatttctgttgaatacattcaggtagaacataaagccttgttcaatcactgcctctcagttttctgcctttcctgtttttcaaagtccttttgtaatttcatttcacattttaaaggcttagacatttttattttaaatatgtgtcttttacagtcttttgtcattctgacatttctggatttttgctgttttataatttaccctttgttattcagaagcatgcttacttatagaaactaaatggtctttataaaagtaattacttaaaaagaaatcaggggaagaaagatatctatctaatctattaaatctttataaaacattacattgcagagggggagctactcctaaatattttcatgatttgcatggtttaatcagatttttttttttttttacaccatattagctaccttttcaatggagaagagacagttcacacaattccctggttagcacagatgtggactgagtgctttgtcacctgcagggtagtaacccagtgatgtttcttacagaagcacaatatgttgaaaatcctgggtgtgaccaatatggaataaagaagaaggcagaaagagagcaaatgaaaaatttcaacttgtatattcattttttacattttgctttgacttttaaatttaggaagtccgtttttacctgagaacaaatgtttaaagttcctgcgtcactctcagtactctcactgcccctcccaaaccctatagctccttacgctgggaaagctggttttttaaaaaaataataataaaatatttaatcttattaagtgttcatttaaaatgcgtaatgctttggaaataatgggtaacagatagcgagaggatatgtttataaagtgagcatgttggtcccatttataaatatatgtatgatttataagcttttttaaaacaaagctcaaattgttggtatttttctaaaatgtgcacagctgtattttacatgaaggctctttctaatgggttgttatactgtactcaacattttggacagcacatgaagtctgccaatgtacttaataaaacatgactttgtttatttaaagtttcttgctgtgaaaaagaactccctacctgtgagttcctttatttataattcttgaaaccaaaatgtataatgtacagttttcacaactgtatctgctctaataaaaaaaagttggttattaatgaa

SEQ ID NO: 10314 - DNA, 560 bp, Homo sapiens
  source 1..560: mol_type = unassigned DNA
agtatcacggctactacgtgaagctgaacgccccccagcaccctccagtagacgtggaggacggcgatggatccagccagtcttcctcagcactggtgcacaagccatccgctaacaagtggagtccctccaaatctgtgacaaaaccagttgccaaagaaagcaaagctgagccaaaagctaagaagtctgaacttgctataccaaagaatccagcaagcaacgattcatgccctgctttggaaaaagaagccaattcaggccctaattcaatcatgattgtccttgtcatgctgttgaatatcgggttggccattctttttgttcactttctaacttgattggaattaggaaagcccacagttctctgcagtggtgccgtcagccctttaaatggcccaccccaggcagactcagacacagggaaggaggcttggaattaggatgggatcgcgagagagatgaaacttggaaaattcagccagaggacctgttcggttcccctgggagtgctttgtggctttggggtcctctgggagctgaagcacacggccatgttg

SEQ ID NO: 10315 - DNA, 1651 bp, Homo sapiens
  source 1..1651: mol_type = unassigned DNA
tccgtgcccctgcggggagcgcgccggggctgccccccgaatgacgggcggaaggtacctaccagggccagtgggccggaggcatgcggcatggctacggcgtgcgccagagcgtgccctacggcatggccacggtgatccgctcaccgctgcgtacctcgctggcctcgctgcgcagcgagcagagcaatggcagcgtgctccacgacgccgcagccgccgccgacagcccggccggcacccgcggcggtttcgtgctcaacttccacgcagacgctgagctagcgggcaagaagaagggcggcctcttccggaggggctcccttcttggaagcatgaaacttcgcaagtccgaatccaagtcttccatctcgagcaagcgcagctctgtccgcagcgacgcggccatgagcagaattagttccagcgatgccaactccacgatcagctttggcgatgtagattgtgatttttgcccggtggaagaccacgtggacgccaccaccacggaaacctacatgggcgagtggaagaacgacaagcgcaacggcttcggcgttagcgagcgctccaatggcatgaagtatgaaggggagtgggcaaataacaagaggcatggatatggctgtaccgtgtttcctgacggctccaaagaagagggaaaatacaaaaataatattctggtccgtgggataaggaagcagcttataccaataagacatacaaaaactagggagaaggtggacagagcaattgaaggcgcccaaagggcagctgccatggccagaaccaaagtggaaatagcaaattcaaggactgcacatgccagagcgaaggccgatgccgccgaccaggccgcgctggccgctcgccaggagtgcgacatcgcgagagctgtggccagggagctgtcacctgatttctaccaaccaggccctgattacgtcaaacagagatttcaggaaggtgtagatgctaaagaaaatccagaagaaaaggtaccagaaaagccacctacaccaaaggagtctcctcatttttatcgcaaaggcacgacacccccaagatctcctgaggcaagtcccaaacacagccactctcctgcttcctccccaaagcccctgaagaagcaaaaccccagctcaggggcgagactcaaccaagacaaaaggagtgtggctgatgagcaggtgacggccattgtcaataagcccttgatgtcaaaggctcccacgaaggaggcaggagcggttgtgccccagtccaagtactctggccgccaccacatccccaaccccagtaacggggagctgcattctcagtatcacggctactacgtgaagctgaacgccccccagcaccctccagtagacgtggaggacggcgatggatccagccagtcttcctcagcactggtgcacaagccatccgctaacaagtggagtccctccaaatctgtgacaaaaccagttgccaaagaaagcaaagctgagccaaaagctaagaagtctgaacttgctataccaaagaatccagcaagcaacgattcatgccctgctttggaaaaagaagccaattcaggccctaattcaatcatgattgtccttgtcatgctgttgaatatcgggttggccattctttttgttcactt

SEQ ID NO: 10316 - DNA, 2191 bp, Homo sapiens
  source 1..2191: mol_type = unassigned DNA
ggaattcgggtgactttgctccaagatacacgcgtgtgtcccgactctcactcaatttataggggagagggactcgccaaatccctgttttctgggggacctaccagggccagtgggtcggtggcatgcgccagggctacggcgtccggcagagcgtcccgtatggcatggccgcggtcatccgctcacccctgaggacgtccatcaactccctgcgcagcgagcacaccaacggcacggcgctgcatcccgacgcctctccggcggtggccggcagcccggccgtgtcccgcgggggcttcgtgctcgtggcccacagtgactccgagatcctcaagagcaagaagaaggggctgtttcggcgctcgctgctgagtgggctgaagctgcgcaagtcggagtccaagagcagcctggccagccaacgcagcaagcagagctcctttcgcagcgaggcgggcatgagcaccgtcagctccacggccagcgacatccactccaccatcagcctgggcgaggctgaggccgagctggcggtcatcgaggacgacatcgacgccaccaccaccgagacctacgtgggcgagtggaagaacgacaaacgctccggcttcggcgtgagccagcgctcggacgggctcaagtacgagggcgagtgggccagcaaccggcgccatggctacggctgcatgaccttcccggacggcaccaaggaggagggcaagtacaagcagaacatcctcgtcggcggcaagcgcaagaacctcatccccctgcgggccagcaagatccgcgagaaggtggaccgcgccgttgaggccgctgagcgggccgccaccatcgccaagcagaaggctgagatcgcggcttccaggacctcccactctcgggcaaaggccgaggcagccctcacagcagctcagaaagcccaggaggaggcgcggatcgccaggatcactgccaaagagttctccccttccttccagcaccgggaaaacgggctggagtaccagaggccgaagcgtcagacctcctgtgacgacatcgaggtgctgtccaccgggacacccctgcagcaggagagccccgagctgtaccgcaagggcaccactccctccgacctgacccccgacgacagccccctgcagagcttccccaccagccccgcggccaccccgccgcccgcgcccgccgccaggaacaaggtcgcccacttctcgaggcaggtgtcggtggacgaggagcggggcggggacatccagatgctcctggagggccgggccggggactgcgcccgcagcagctggggcgaggagcaggccgggggctccaggggtgtccgcagcggtgccctgcgcggcggcctgctcgtggatgacttccgcacccgaggttcgggccgcaagcagcccgggaaccccaagccgcgggagcggcggacggagtcaccccccgtgttcacgtggacttcccaccaccgggccagcaaccacagccccggaggctccaggctgctggagctgcaggaggagaagctgagcaactaccggatggagatgaaacccttgctgaggatggagacgcatccccagaaaagacgctacagcaagggcggcgcctgccggggcttgggggacgaccaccgccccgaggaccggggcttcggggtgcagagactgcggtccaaggcccagaacaaggagaacttcaggccggcctcctccgcggagcccgccgtgcagaaactggcgagcctgcggctgggcggggccgagccccggttgctgcgttgggacttgaccttctccccgccccagaaatccttgcctgtcgctctagagtccgacgaggagaatggggatgagctcaagtccagtacgggctcagcgcctatcctggtggtcatggtgatcttgctcaacatcggagtcgccattctgtttattaactttttcatctgatgagatgtcgcggtagcaaaaatagagaaagggtagaaaaaagggacattaaaattaaaagcaaaaccacaagaagggaaagaccgcaactcggacagcccagcgacttccaagtcctctcacagaagaaccacacgattggggtcgctccatcacccaaacaaaagaacaaggtttgccaggatgtccgagtgccccctggccctggctctcgtgtgcatggacgtgcc

SEQ ID NO: 10317 - DNA, 1030 bp, Homo sapiens
  source 1..1030: mol_type = unassigned DNA
ggtcctgtctccagcgggagcgcgagacgctggtcaggctccgcggcgcagctcgaaaaggaataatcgcccccgattgactgaaattcctccggagccggcgccgcggccgcccgcgcccgagaccgcgctccggggccgcgtcctcctctcctccggaaaacgctcgcgacccagggccgccggcggccgcgactctgctgtgtcgatcgcctgagtccgttttcaccgtttgcgggatctggaaccgagttacatgcatgtccagtgggggcaggtttaattttgacgacggagggtcctactgtggaggctgggaggacggcaaggcgcacggccatggcgtctgcaccggccccaagggccaaggcgaatacaccggctcgtggagccacggcttcgaggtgctgggcgtctacacctggcccagcggcaacacgtaccagggcacctgggcgcagggcaagcgccacggcatcggcctggagagcaaggggaagtgggtgtacaagggcgagtggacgcacggattcaaggggcgctacggggtgcgggagtgcgcgggcaacggggccaaatacgaagggacctggagcaacgggctgcaggacggctacgggaccgagacctactcggacggagatgccaccgcattcggggcagagccggggccggaagccagggagctgcctgctgctgctgctgctgctgctgctgctgctgctgctgctgtaagatggtttctgtgcagggaaccttggccggctctgcagctgcccgcctgcctggactctccgatatccactcctcagtgcacctgacacgcatggagccggtcctttcctggaagccagaccccaaacaaactggcttccccgaccagtccactcccatgtgggagcttatcctcagaggcactgggtcctctgcctccctcgggcggctcgcctgtttcaggcatggatgcctgggaagggagtgagacgcagcaatgacttgtgcttctgccgagaataaaaatcctgagcgt

SEQ ID NO: 10318 - DNA, 3985 bp, Homo sapiens
  source 1..3985: mol_type = unassigned DNA
agcgcgagacgctggtcaggctccgcggcgcagctcgaaaaggaataatcgcccccgattgactgaaattcctccggagccggcgccgcggccgcccgcgcccgagaccgcgctccggggccgcgtcctcctctcctccggaaaacgctcgcgacccagggccgccggcggccgcgactctgctgtgtcgatcgcctgagtccgttttcaccgtttgcgggatctggaaccgagttacatgcatgtccagtgggggcaggtttaattttgacgacggagggtcctactgtggaggctgggaggacggcaaggcgcacggccatggcgtctgcaccggccccaagggccaaggcgaatacaccggctcgtggagccacggcttcgaggtgctgggcgtctacacctggcccagcggcaacacgtaccagggcacctgggcgcagggcaagcgccacggcatcggcctggagagcaaggggaagtgggtgtacaagggcgagtggacgcacggattcaaggggcgctacggggtgcgggagtgcgcgggcaacggggccaaatacgaagggacctggagcaacgggctgcaggacggctacgggaccgagacctactcggacggagggacctaccagggccagtgggtcggtggcatgcgccagggctacggcgtccggcagagcgtcccgtatggcatggccgcggtcatccgctcacccctgaggacgtccatcaactccctgcgcagcgagcacaccaacggcacggcgctgcatcccgacgcctctccggcggtggccggcagcccggccgtgtcccgcgggggcttcgtgctcgtggcccacagtgactccgagatcctcaagagcaagaagaaggggctgtttcggcgctcgctgctgagtgggctgaagctgcgcaagtcggagtccaagagcagcctggccagccaacgcagcaagcagagctcctttcgcagcgaggcgggcatgagcaccgtcagctccacggccagcgacatccactccaccatcagcctgggcgaggctgaggccgagctggcggtcatcgaggacgacatcgacgccaccaccaccgagacctacgtgggcgagtggaagaacgacaaacgctccggcttcggcgtgagccagcgctcggacgggctcaagtacgagggcgagtgggccagcaaccggcgccatggctacggctgcatgaccttcccggacggcaccaaggaggagggcaagtacaagcagaacatcctcgtcggcggcaagcgcaagaacctcatccccctgcgggccagcaagatccgcgagaaggtggaccgcgccgttgaggccgctgagcgggccgccaccatcgccaagcagaaggctgagatcgcggcttccaggacctcccactctcgggcaaaggccgaggcagccctcacagcagctcagaaagcccaggaggaggcgcggatcgccaggatcactgccaaagagttctccccttccttccagcaccgggaaaacgggctggagtaccagaggccgaagcgtcagacctcctgtgacgacatcgaggtgctgtccaccgggacacccctgcagcaggagagccccgagctgtaccgcaagggcaccactccctccgacctgacccccgacgacagccccctgcagagcttccccaccagccccgcggccaccccgccgcccgcgcccgccgccaggaacaaggtcgcccacttctcgaggcaggtgtcggtggacgaggagcggggcggggacatccagatgctcctggagggccgggccggggactgcgcccgcagcagctggggcgaggagcaggccgggggctccaggggtgtccgcagcggtgccctgcgcggcggcctgctcgtggatgacttccgcacccgaggttcgggccgcaagcagcccgggaaccccaagccgcgggagcggcggacggagtcaccccccgtgttcacgtggacttcccaccaccgggccagcaaccacagccccggaggctccaggctgctggagctgcaggaggagaagctgagcaactaccggatggagatgaaacccttgctgaggatggagacgcatccccagaaaagacgctacagcaagggcggcgcctgccggggcttgggggacgaccaccgccccgaggaccggggcttcggggtgcagagactgcggtccaaggcccagaacaaggagaacttcaggccggcctcctccgcggagcccgccgtgcagaaactggcgagcctgcggctgggcggggccgagccccggttgctgcgttgggacttgaccttctccccgccccagaaatccttgcctgtcgctctagagtccgacgaggagaatggggatgagctcaagtccagtacgggctcagcgcctatcctggtggtcatggtgatcttgctcaacatcggagtcgccattctgtttattaactttttcatctgatgagatgtcgcggtagcaaaaatagagaaagggtagaaaaaagggacattaaaattaaaagcaaaaccacaagaagggaaagaccgcaactcggacagcccagcgacttccaagtcctctcacagaagaaccacacgattgggtatcactcacagtttgcctttttttctgggtaatgttttttggattttagccaaaattctttgcttgtataacactctgctgtgtggcatggcagaaggaggccagcacgcagcccctccagctccacgtggagacagaagggatcccggcacatcagtggtaacagcggacgttgtcctcgtggtcacacgtcccgtcttgggtgtggatggagggcagcccggggcagagcctcagccccgcggcccctgagtggcagggctgactcccgtcgacacgagcttagaaagtggattcactgctttctctgtctagaacagacgggtgacaagtatgggcaggaggcatggggcagggtggcccaccccagtgggcagtagcctggcctttttctgtgtgagatctgtgctgcacacctgagggagggggagggatcggccacctcctccctgtgagacggatgcaggtccttccctcttctcggcactgcccccggccttccatgagaagccgactccccacaccgagttttaaagcaaagcccttttcttctgctgcccactcactgtgggtcccattcggctgtttcccccaccagaccccagggaagccggggcccactccgatccgcctgggctcagctaagcacggaagccaagggggctgtgccgtggagctgggctcgcgccggggctctgggtgtgtgcgcttggcgtgcagggtggacgcgtggggttccgtgtccccagcagtgagggccctagaggacgccttctcccatggttactgatctccacgggttttcacatctctgtactgtgcctgcctcaacttcccctaacagatatgcatattccttccagatgcctcagtgctacaccacagtgggcctggtcccaggacaggaatgcggttcaaacccagtggcttgaaacttcctgagaaactgtagcatatccagccccctaaaatgtacaatgtaacttgttcagtccaacaaaaacaggttccttatgtttctgccttctccaccagggtcgctccatcacccaaacaaaagaacaaggtttgccaggatgtccgagtgccccctggccctggctctcgtgtgcatggacgtgcctgaggggtccgggcacggccatacgcaggacccctgtgcccggggaggcgctgcagggattccccatccggtcgtcttggggccagcccgtcttatggactctgccttgctttgcttatgtttagctgtttctctgctacctttcgagcagacttctttactacactgcactggattgctatatttttaaccagaaataaactaaagattagagcatgttccagttaaa

SEQ ID NO: 10319 - DNA, 4023 bp, Homo sapiens
  source 1..4023: mol_type = unassigned DNA
tttaaaatttatttctcattaaaattataacacagcctcgtaaaaatattaaaacagcgagacagatgtgtcaggggttatgtatatgaaggaggtagcacagttctcatcacgggtgtgcttagtgtccccctaaagttcatgccagttaatgtgatcgtgactgtaattggaaatagggtcgttgcagatataattaagatgaggtccttctggagtcgagtgggactggtgtccttagaggagaagagacacggacacacagaatgccacgtgggacagaggcctgctgtctacacctgtgcagaggagacaacaaggagagtggggcatgacccctgcccacgacactcgcctccaggaaggcagccagctgcccatctttggtgcggtcatctctgcaggcaacagaatggcagagtggcagtctgatcactctactccattgtgtgagagtctccaggatgaagaccaggctccccagcaggacgtgcggccctcatggagttctggccttgttttcggctgttgcctggctgatattctgcacatctgcccaccgtcctctgggcggtccacgaatacattgtgccttcctctttgcatatgctggtccctctgctggcaatgcccttccttcttggtgagctccaatgcatccctcaagactcagttcagatgcgcctctctggactcatccccaactcccagacggggttggctgctcccttttttcagatcctgaaacacttacttgtccccctttatgtgggcatttatctgatagtagagtttttctgtactgttggaatggtgagttccctgaagctaggtcagcttccttctcagcattcagcaggcggtgggggaggagggaaggagaggaacttcctaataaagatgaacacctctttgtggttaggtcagaccagcctgtgcctgtgcgacctggtgcagaccttcacctctcagagcctcggtttcctcatctgagcctcaggcacgacaatctgctagactctgcttcccggtggcagctggggaatgggatgggaaggagccctgggatgctcaggtcatccctgccaccagaatgtccccagagtcatgaccatcagcacctcagcctcgctgctttttccttggggtctgcaggggcaggacgcaaaccccacacgctcgctgcgcagtaagctgcaggggcttctccagcagcacctctgaggcctgcctaccacgtggagatgctgctcccgtgggctctgaccaccgctctgccctcttctcacaggaaccagcgaccactcggcccggcgtaaccacgcatgtccactggtcacctggtggccttcgacaagaacgtgtgataaatccctgccggagtgcggctccgggaaaacgctgtcaccgcaaaccagctcctctttgttgcagtcccccgggggcatggcccggacctcccactctcgggcaaaggccgaggcagccctcacagcagctcagaaagcccaggaggaggcgcggatcgccaggatcactgccaaagagttctccccttccttccagcaccgggaaaacgggctggagtaccagaggccgaagcgtcagacctcctgtgacgacatcgaggtgctgtccaccgggacacccctgcagcaggagagccccgagctgtaccgcaagggcaccactccctccgacctgacccccgacgacagccccctgcagagcttccccaccagccccgcggccaccccgccgcccgcgcccgccgccaggaacaaggtcgcccacttctcgaggcaggtgtcggtggacgaggagcggggcggggacatccagatgctcctggagggccgggccggggactgcgcccgcagcagctggggcgaggagcaggccgggggctccaggggtgtccgcagcggtgccctgcgcggcggcctgctcgtggatgacttccgcacccgaggttcgggccgcaagcagcccgggaaccccaagccgcgggagcggcggacggagtcaccccccgtgttcacgtggacttcccaccaccgggccagcaaccacagccccggaggctccaggctgctggagctgcaggaggagaagctgagcaactaccggatggagatgaaacccttgctgaggatggagacgcatccccagaaaagacgctacagcaagggcggcgcctgccggggcttgggggacgaccaccgccccgaggaccggggcttcggggtgcagagactgcggtccaaggcccagaacaaggagaacttcaggccggcctcctccgcggagcccgccgtgcagaaactggcgagcctgcggctgggcggggccgagccccggttgctgcgttgggacttgaccttctccccgccccagaaatccttgcctgtcgctctagagtccgacgaggagaatggggatgagctcaagtccagtacgggctcagcgcctatcctggtggtcatggtgatcttgctcaacatcggagtcgccattctgtttattaactttttcatctgatgagatgtcgcggtagcaaaaatagagaaagggtagaaaaaagggacattaaaattaaaagcaaaaccacaagaagggaaagaccgcaactcggacagcccagcgacttccaagtcctctcacagaagaaccacacgattgggtatcactcacagtttgcctttttttctgggtaatgttttttggattttagccaaaattctttgcttgtataacactctgctgtgtggcatggcagaaggaggccagcacgcagcccctccagctccacgtggagacagaagggatcccggcacatcagtggtaacagcggacgttgtcctcgtggtcacacgtcccgtcttgggtgtggatggagggcagcccggggcagagcctcagccccgcggcccctgagtggcagggctgactcccgtcgacacgagcttagaaagtggattcactgctttctctgtctagaacagacgggtgacaagtatgggcaggaggcatggggcagggtggcccaccccagtgggcagtagcctggcctttttctgtgtgagatctgtgctgcacacctgagggagggggagggatcggccacctcctccctgtgagacggatgcaggtccttccctcttctcggcactgcccccggccttccatgagaagccgactccccacaccgagttttaaagcaaagcccttttcttctgctgcccactcactgtgggtcccattcggctgtttcccccaccagaccccagggaagccggggcccactccgatccgcctgggctcagctaagcacggaagccaagggggctgtgccgtggagctgggctcgcgccggggctctgggtgtgtgcgcttggcgtgcagggtggacgcgtggggttccgtgtccccagcagtgagggccctagaggacgccttctcccatggttactgatctccacgggttttcacatctctgtactgtgcctgcctcaacttcccctaacagatatgcatattccttccagatgcctcagtgctacaccacagtgggcctggtcccaggacaggaatgcggttcaaacccagtggcttgaaacttcctgagaaactgtagcatatccagccccctaaaatgtacaatgtaacttgttcagtccaacaaaaacaggttccttatgtttctgccttctccaccagggtcgctccatcacccaaacaaaagaacaaggtttgccaggatgtccgagtgccccctggccctggctctcgtgtgcatggacgtgcctgaggggtccgggcacggccatacgcaggacccctgtgcccggggaggcgctgcagggattccccatccggtcgtcttggggccagcccgtcttatggactctgccttgctttgcttatgtttagctgtttctctgctacctttcgagcagacttctttactacactgcactggattgctatatttttaaccagaaataaactaaagattagagc

SEQ ID NO: 10320 - DNA, 3540 bp, Homo sapiens
  source 1..3540: mol_type = unassigned DNA
cggggaggggaccggggaagagagggccgagaggcgtgcggcaggggggagggtaggagaaagaagggcccgactgtaggagggcagcggagcattacctcatcccgtgagcctccgcgggcccagagaagaatcttctagggtggagtctccatggtgacgggcgggcccgcccccctgagagcgacgcgagccaatgggaaggccttggggtgacatcatgggctatttttaggggttgactggtagcagataagtgttgagctcgggctggataagggctcagagttgcactgagtgtggctgaagcagcgaggcgggagtggaggtgcgcggagtcaggcagacagacagacacagccagccagccaggtcggcagtatagtccgaactgcaaatcttattttcttttcaccttctctctaactgcccagagctagcgcctgtggctcccgggctggtgtttcgggagtgtccagagagcctggtctccagccgcccccgggaggagagccctgctgcccaggcgctgttgacagcggcggaaagcagcggtacccacgcgcccgccgggggaagtcggcgagcggctgcagcagcaaagaactttcccggctgggaggaccggagacaagtggcagagtcccggagccaacttttgcaagcctttcctgcgtcttaggcttctccacggcggtaaagaccagaaggcggcggagagccacgcaagagaagaaggacgtgcgctcagcttcgctcgcaccggttgttgaacttgggcgagcgcgagccgcggctgccgggcgccccctccccctagcagcggaggaggggacaagtcgtcggagtccgggcggccaagacccgccgccggccggccactgcagggtccgcactgatccgctccgcggggagagccgctgctctgggaagtgagttcgcctgcggactccgaggaaccgctgcgcacgaagagcgctcagtgagtgaccgcgacttttcaaagccgggtagcgcgcgcgagtcgacaagtaagagtgcgggaggcatcttaattaaccctgcgctccctggagcgagctggtgaggagggcgcagcggggacgacagccagcgggtgcgtgcgctcttagagaaactttccctgtcaaaggctccggggggcgcgggtgtcccccgcttgccacagccctgttgcggccccgaaacttgtgcgcgcagcccaaactaacctcacgtgaagtgacggactgttctatgactgcaaagatggaaacgaccttctatgacgatgccctcaacgcctcgttcctcccgtccgagagcggaccttatggctacagtaaccccaagatcctgaaacagagcatgaccctgaacctggccgacccagtggggagcctgaagccgcacctccgcgccaagaactcggacctcctcacctcgcccgacgtggggctgctcaagctggcgtcgcccgagctggagcgcctgataatccagtccagcaacgggcacatcaccaccacgccgacccccacccagttcctgtgccccaagaacgtgacagatgagcaggagggcttcgccgagggcttcgtgcgcgccctggccgaactgcacagccagaacacgctgcccagcgtcacgtcggcggcgcagccggtcaacggggcaggcatggtggctcccgcggtagcctcggtggcagggggcagcggcagcggcggcttcagcgccagcctgcacagcgagccgccggtctacgcaaacctcagcaacttcaacccaggcgcgctgagcagcggcggcggggcgccctcctacggcgcggccggcctggcctttcccgcgcaaccccagcagcagcagcagccgccgcaccacctgccccagcagatgcccgtgcagcacccgcggctgcaggccctgaaggaggagcctcagacagtgcccgagatgcccggcgagacaccgcccctgtcccccatcgacatggagtcccaggagcggatcaaggcggagaggaagcgcatgaggaaccgcatcgctgcctccaagtgccgaaaaaggaagctggagagaatcgcccggctggaggaaaaagtgaaaaccttgaaagctcagaactcggagctggcgtccacggccaacatgctcagggaacaggtggcacagcttaaacagaaagtcatgaaccacgttaacagtgggtgccaactcatgctaacgcagcagttgcaaacattttgaagagagaccgtcgggggctgaggggcaacgaagaaaaaaaataacacagagagacagacttgagaacttgacaagttgcgacggagagaaaaaagaagtgtccgagaactaaagccaagggtatccaagttggactgggttgcgtcctgacggcgcccccagtgtgcacgagtgggaaggacttggcgcgccctcccttggcgtggagccagggagcggccgcctgcgggctgccccgctttgcggacgggctgtccccgcgcgaacggaacgttggacttttcgttaacattgaccaagaactgcatggacctaacattcgatctcattcagtattaaaggggggagggggagggggttacaaactgcaatagagactgtagattgcttctgtagtactccttaagaacacaaagcggggggagggttggggaggggcggcaggagggaggtttgtgagagcgaggctgagcctacagatgaactctttctggcctgccttcgttaactgtgtatgtacatatatatattttttaatttgatgaaagctgattactgtcaataaacagcttcatgcctttgtaagttatttcttgtttgtttgtttgggtatcctgcccagtgttgtttgtaaataagagatttggagcactctgagtttaccatttgtaataaagtatataatttttttatgttttgtttctgaaaattccagaaaggatatttaagaaaatacaataaactattggaaagtactcccctaacctcttttctgcatcatctgtagatactagctatctaggtggagttgaaagagttaagaatgtcgattaaaatcactctcagtgcttcttactattaagcagtaaaaactgttctctattagactttagaaataaatgtacctgatgtacctgatgctatggtcaggttatactcctcctcccccagctatctatatggaattgcttaccaaaggatagtgcgatgtttcaggaggctggaggaaggggggttgcagtggagagggacagcccactgagaagtcaaacatttcaaagtttggattgtatcaagtggcatgtgctgtgaccatttataatgttagtagaaattttacaataggtgcttattctcaaagcaggaattggtggcagattttacaaaagatgtatccttccaatttggaatcttctctttgacaattcctagataaaaagatggcctttgcttatgaatatttataacagcattcttgtcacaataaatgtattcaaataccaataa

SEQ ID NO: 10321 - DNA, 1820 bp, Homo sapiens
  source 1..1820: mol_type = unassigned DNA
gagcggccaggccagcctcggagccagcagggagctgggagctgggggaaacgacgccaggaaagctatcgcgccagagagggcgacgggggctcgggaagcctgacagggcttttgcgcacagctgccggctggctgctacccgcccgcgccagcccccgagaacgcgcgaccaggcacccagtccggtcaccgcagcggagagctcgccgctcgctgcagcgaggcccggagcggccccgcagggaccctccccagaccgcctgggccgcccggatgtgcactaaaatggaacagcccttctaccacgacgactcatacacagctacgggatacggccgggcccctggtggcctctctctacacgactacaaactcctgaaaccgagcctggcggtcaacctggccgacccctaccggagtctcaaagcgcctggggctcgcggacccggcccagagggcggcggtggcggcagctacttttctggtcagggctcggacaccggcgcgtctctcaagctcgcctcttcggagctggaacgcctgattgtccccaacagcaacggcgtgatcacgacgacgcctacacccccgggacagtacttttacccccgcgggggtggcagcggtggaggtgcagggggcgcagggggcggcgtcaccgaggagcaggagggcttcgccgacggctttgtcaaagccctggacgatctgcacaagatgaaccacgtgacaccccccaacgtgtccctgggcgctaccggggggcccccggctgggcccgggggcgtctacgccggcccggagccacctcccgtttacaccaacctcagcagctactccccagcctctgcgtcctcgggaggcgccggggctgccgtcgggaccgggagctcgtacccgacgaccaccatcagctacctcccacacgcgccgcccttcgccggtggccacccggcgcagctgggcttgggccgcggcgcctccaccttcaaggaggaaccgcagaccgtgccggaggcgcgcagccgggacgccacgccgccggtgtcccccatcaacatggaagaccaagagcgcatcaaagtggagcgcaagcggctgcggaaccggctggcggccaccaagtgccggaagcggaagctggagcgcatcgcgcgcctggaggacaaggtgaagacgctcaaggccgagaacgcggggctgtcgagtaccgccggcctcctccgggagcaggtggcccagctcaaacagaaggtcatgacccacgtcagcaacggctgtcagctgctgcttggggtcaagggacacgccttctgaacgtcccctgcccctttacggacaccccctcgcttggacggctgggcacacgcctcccactggggtccagggagcaggcggtgggcacccaccctgggacctaggggcgccgcaaaccacactggactccggccctcctaccctgcgcccagtccttccacctcgacgtttacaagcccccccttccacttttttttgtatgttttttttctgctggaaacagactcgattcatattgaatataatatatttgtgtatttaacagggaggggaagagggggcgatcgcggcggagctggccccgccgcctggtactcaagcccgcggggacattgggaaggggacccccgccccctgccctcccctctctgcaccgtactgtggaaaagaaacacgcacttagtctctaaagagtttattttaagacgtgtttgtgtttgtgtgtgtttgttctttttattgaatctatttaagtaaaaaaaaaattggttctttattaa

SEQ ID NO: 10322 - DNA, 1863 bp, Homo sapiens
  source 1..1863: mol_type = unassigned DNA
aggagccgccgccagtggagggccgggcgctgcggccgcggccggggcgggcgcagggccgagcggacgggggggcgcgggccccccgggaggccgcggccactcccccccgggccggcgcggcgggggaggcggaggatggaaacacccttctacggcgatgaggcgctgagcggcctgggcggcggcgccagtggcagcggcggcagcttcgcgtccccgggccgcttgttccccggggcgcccccgacggccgcggccggcagcatgatgaagaaggacgcgctgacgctgagcctgagtgagcaggtggcggcagcgctcaagcctgcggccgcgccgcctcctacccccctgcgcgccgacggcgcccccagcgcggcaccccccgacggcctgctcgcctctcccgacctggggctgctgaagctggcctcccccgagctcgagcgcctcatcatccagtccaacgggctggtcaccaccacgccgacgagctcacagttcctctaccccaaggtggcggccagcgaggagcaggagttcgccgagggcttcgtcaaggccctggaggatttacacaagcagaaccagctcggcgcgggcgcggccgctgccgccgccgccgccgccgccggggggccctcgggcacggccacgggctccgcgccccccggcgagctggccccggcggcggccgcgcccgaagcgcctgtctacgcgaacctgagcagctacgcgggcggcgccgggggcgcggggggcgccgcgacggtcgccttcgctgccgaacctgtgcccttcccgccgccgccacccccaggcgcgttggggccgccgcgcctggctgcgctcaaggacgagccacagacggtgcccgacgtgccgagcttcggcgagagcccgccgttgtcgcccatcgacatggacacgcaggagcgcatcaaggcggagcgcaagcggctgcgcaaccgcatcgccgcctccaagtgccgcaagcgcaagctggagcgcatctcgcgcctggaagagaaagtgaagaccctcaagagtcagaacacggagctggcgtccacggcgagcctgctgcgcgagcaggtggcgcagctcaagcagaaagtcctcagccacgtcaacagcggctgccagctgctgccccagcaccaggtgcccgcgtactgagtccgcgcgcggggcgcatgcgcggccaccctccccaaggggcgggctcgcgggggggtgtcgtgggcgccccggacttggagagggtgcggccctggggaccccccctccccgagtgtgcccaggaactcagagagggcgcggcccccggggattccccccccccgagggtgcccaggactcgacaagctggaccccctgctcccgggggggcgagcgcatgacccccccgccctcgcgctgcctctttcccccgcgcggccgccccgtgttgcacaaacccgcgcgtctcggctgcccctttgtacaccgcgccgcggaagggggctccgagggggcgcagcctcaaaccctgcctttcctttacttttacttttttttttttttctttggaagagagaagaacagagtgttcgattctgccctatttatgtttctactcgggaacaaacgttggttgtgtgtgtgtgtgttttcttgtgttggttttttaaagaaatgggaagaagaaaaaaaaattctccgcccctttcctcgatctcgctccccccttcggttctttcgaccggtcccccctcccttttttgttctgttttgttttgttttgctacgagtccacattcctgtttgtaatccttggttcgcccggttttctgttttcagtaaagtctcgttacgcca

SEQ ID NO: 10323 - DNA, 500 bp, Homo sapiens
  source 1..500: mol_type = unassigned DNA
gcggccgcgcccgaagcgcctgtctacgcgaacctgagcagctacgcgggcggcgccgggggcgcggggggcgccgcgacggtcgccttcgctgccgaacctgtgcccttcccgccgccgccacccccaggcgcgttggggccgccgcgcctggctgcgctcaaggacgagccacagacggtgcccgacgtgccgagcttcggcgagagcccgccgttgtcgcccatcgacatggacacgcaggagcgcatcaaggcggagcgcaagcggctgcgcaaccgcatcgccgcctccaagtgccgcaagcgcaagctggagcgcatctcgcgcctggaagagaaagtgaagaccctcaagagtcagaacacggagctggcgtccacggcgagcctgctgcgcgagcaggtggcgcagctcaagcagaaagtcctcagccacgtcaacagcggctgccagctgctgccccagcaccagagagaagaacagagtgttcgattctg

SEQ ID NO: 10324 - DNA, 5581 bp, Homo sapiens
  source 1..5581: mol_type = unassigned DNA
gcccgagggtgtttcggggcgtccgaagcgggcgtgctccagcctgctcagcagcgagtggttggaaattagcaaagtgagagggtgaaaggaagcaggaggaggagggagttctagcgaagacttcggagggaagcaacccatcccctgccacaagaaagcaccgccactccagtgggaacggacacgcgtgcacacagccacgagtgaggagagaatacagcagttccaaggacaagggattcgtaccactgctcctcactcagtaaatagcagagacagaatttgaacggtctcactctgtcacctgagctagagtgcagtggtgcgatcacagcttactgcagcattgaactcctgggctcaagtgatcctcttgcctcagcctcccaagtaactgtgactgcagtgtccttgctggccttgcaaaatgagtttggaagggttgattccatcctcttcagttgttggaaagagtttaagaagggttggtgttaattcttctctttaaatatttgatgaaattcaccagtgaagccgtgacatcctgggatattctttgttgagaggttgaatgcctttgagaacttgatgcataaaatttgcatgactcctcactcctttctggatctctcattggactcaagccagcatggctcacaccacaaaggttaacggcagtgcctcaggaaaagcaggtgatattctcagtggagaccaggacaaggaacagaaagacccttactttgtggagaccccctatggttatcaactagacttagatttcctcaaatatgtggatgacatacagaagggaaataccatcaaaagactgaacatccagaagaggcggaagccgtccgtgccatgcccagaacccaggaccacatctggtcagcaaggtatatggacttccactgaatccctctcatcctccaacagtgatgacaacaagcagtgccccaacttcctcatagccagaagtcaagttacatcaactccaatctcaaagccacctccccctctggagacctcactcccttttcttaccatcccagaaaatcgacagctgccacctccctcaccacaactcccaaagcataaccttcatgtcaccaagacactgatggagacccggagaagactggaacaggagagagccaccatgcagatgacaccgggtgagttcagaaggcccaggctggccagttttggaggcatgggcaccacaagctccctcccttcttttgtgggttctggaaaccacaatcctgccaagcaccagcttcagaatggataccaaggtaatggggattatggtagctatgccccagctgctcccaccacttcctccatggggagctccatccgccacagccccctgagctcagggatctccaccccagtgaccaacgtgagccccatgcacctgcagcacatccgcgagcagatggccattgctctgaaacgcctgaaggagctggaggagcaggtgcgaaccatccctgtgctccaggtaaagatctctgtcttgcaagaagagaaaaggcagttggtctcacagctgaaaaaccaaagggctgcatcccagatcaatgtctgtggtgtgaggaagcggtcctatagtgcggggaacgcctcccagctggaacagctctcccgggcccgaagaagtggcggggaattatacattgactatgaggaggaagaaatggagaccgtagaacagagcacgcagaggataaaggagttccggcaacttacagcagacatgcaagccctggagcagaagatccaggacagcagctgtgaggcctcctcagagctcagggagaatggagagtgccggtctgtggctgtgggtgccgaggagaacatgaacgacatcgtcgtgtaccacagaggctccaggtcctgtaaggatgcagctgtagggacacttgttgagatgagaaattgtggggtcagcgtgacagaggccatgcttggagtgatgactgaagctgacaaagaaattgagctgcaacagcagaccatagaatccttgaaggaaaagatctatcgcctagaagtacagcttagagaaaccacccatgaccgggagatgactaaactgaaacaagagctgcaggctgctggatcgaggaaaaaggttgacaaagccacgatggcccagccgcttgttttcagtaaggtggtggaggcagtggtgcagaccagagaccaaatggtcggcagtcacatggacctggtggacacgtgtgttgggacctccgtggaaacaaacagtgtaggcatctcctgccagcctgaatgtaagaataaagtcgtagggcctgagctgcctatgaattggtggattgttaaggagagggtggaaatgcatgaccgatgtgctgggaggtctgtggaaatgtgtgacaagagtgtgagtgtggaagtcagcgtctgcgaaacaggcagcaacacagaggagtctgtgaacgacctcacactcctcaagacaaacttgaatctcaaagaagtgcggtctatcggttgtggagattgttctgttgacgtgaccgtctgctctccaaaggagtgcgcctcccggggcgtgaacactgaggctgttagccaggtggaagctgccgtcatggcagtgcctcgtactgcagaccaggacactagcacagatttggaacaggtgcaccagttcaccaacaccgagacggccaccctcatagagtcctgcaccaacacttgtctaagcactttggacaagcagaccagcacccagactgtggagacgcggacagtagctgtaggagaaggccgtgtcaaggacatcaactcctccaccaagacgcggtccattggtgttggaacgttgctttctggccattctgggtttgacaggccatcagctgtgaagaccaaagagtcaggtgtggggcagataaatattaacgacaactatctggttggtctcaaaatgaggactatagcttgtgggccaccacagttgactgtggggctgacagccagcagaaggagcgtgggggttggggatgaccctgtaggggaatctctggagaacccccagcctcaagctccacttggaatgatgactggcctggatcactacattgagcgtatccagaagctgctggcagaacagcagacactgctggctgagaactacagtgaactggcagaagctttcggggaacctcactcacagatgggctccctcaactctcagctcatcagcaccctgtcgtctatcaactctgtcatgaaatctgcaagcactgaagagctgaggaaccctgacttccagaaaaccagtctgggtaaaatcacaggcaattatttgggatatacctgtaagtgtgggggccttcagtcaggaagtcccttaagctcccagacatcccagcctgagcaagaagtggggacctcagaaggaaagccaatcagcagcctggatgccttccccactcaggaaggtacgctgtctccagtgaacctgacagacgaccagatcgccgctggcctctatgcatgtacaaacaatgaaagtacactgaagtccatcatgaagaagaaagatggtaacaaagattcaaatggcgcaaaaaagaatcttcagtttgttggcattaatggagggtatgaaacaacttcaagtgatgattccagctcagatgaaagctcttcttccgagtcagatgacgagtgtgatgtcattgagtatcctcttgaagaagaggaggaggaggaggatgaagacactcggggaatggcagaagggcaccatgcagttaatattgaaggtttgaagtctgccagggtggaagatgaaatgcaggttcaagaatgtgaacctgagaaggtggaaatcagagagaggtatgaattaagtgaaaagatgttgtctgcatgcaacttactgaaaaatactataaatgaccccaaagctttgaccagcaaagatatgaggttctgtctgaacaccctccagcacgagtggttccgcgtgtccagtcagaagtcagccattccagccatggtgggggactacatagctgcttttgaggccatttccccagatgtcctccgctatgtcatcaacttggcagacggcaacggcaacacagccctccattacagcgtgtcccactccaacttcgagattgtgaagctgctgttagatgccgatgtgtgtaatgtggatcaccagaacaaggcaggctacacccccatcatgttggcggccctcgccgctgtggaagcagagaaggacatgcggattgtggaagaactcttcggctgtggggatgtgaatgccaaagctagtcaggcgggacagacggccctcatgctggcggtcagtcacggacggatagacatggtgaagggccttctggcctgtggggctgatgtcaacatccaggatgacgagggctccacggccctcatgtgtgccagcgagcacggacacgtggagattgtcaagctgctgctggcccagcccggctgcaacggtcacctagaggacaacgatggcagcactgcgctctcaatcgccctggaagcaggacacaaggacatcgctgttcttctgtatgcccatgtcaactttgcaaaagcccagtctccgggcacccctaggcttggaaggaagacgtctcctggccccacccaccgaggttcatttgattgattgtatgcaaatagccctttatttacatgccactattaagctgctaattgttcctgttggggtgacagatactgaatgtatacgtattgtgcctgagctcaccagcaaacagaagcatcaagcccaggggtaaaggctgaagctttcacagtgcagagactgctagcctgggcacacacacctcctttctggccgtcttctgtgtagggcacactttaacccagtctctgttgctgttgagtctctgctccgttttgtacagtcacagggaattctgatctgaaggggcaccttctgttcactcccacaaagtggtgtctggttctcactgagacgttttaagatttttccacaaatatttatatgtactaaatgtggaaccattagaaagttcttccaaaatctcattccagcatagttttggatttttcttttgtcttattttaaaataaggaagtcgagatgactttgatcattggtaacttgggcctgggccagacaaagtataaaacttacaaaagaatattctcatttggtcttaactaggtagatgtaatatatgactttttataaaaagggtatctatatgaacttgacacagtattttcagcttttgtattccatactaaagccatgaagaactacacgtaacatcatcatttgtattaattgcacaactccaatgctaaaggttggattgtgttagaggaatcggctctgtatttgcctctagagaaacacagtgttctctttgtatttatggattcctttttaccgtgtcacatttactttggtcctctatgtatttaaatgtttgaagtgccttagactcttgccatattttcaaaataaaattccattaagctcttt

SEQ ID NO: 10325 - DNA, 514 bp, Homo sapiens
  source 1..514: mol_type = unassigned DNA
agacttcggagggaagcaacccatcccctgccacaagaaagcaccgccactccagtgggaacggacacgcgtgcacacagccacgaatggtgatgacactcccaagtccatgtgggactccctccttatgcgggcctcagtctgtcatcttccttggagcaggaccaaagtaaataagataaagtcacaatttctcatccttcttcactcaacttttctttgaggagagaatacagcagttccaaggacaagggattcgtaccactgctcctcactcagtaaatagcagagacagaatttgaacgctagctgtgtggcctcacctaacttctctgaaccattgctcacatgtaaaacacggaaaaaattatccacttctcagggatgttgtgaagattaaaagaacaagagatgtagagtgctcagcacagtgcctctgctctgggaagcactccagatgtgtctgcttttgttgtgattttgccattcttcaacaaagttaaaagagcctcaa

SEQ ID NO: 10326 - DNA, 342 bp, Homo sapiens
  source 1..342: mol_type = unassigned DNA
agtccatgtgggactccctccttatgcgggcctcagtctgtcatcttccttggagcaggaccaaagtaaataagataaagtcacaatttctcatccttcttcactcaacttttctttgaggagagaatacagcagttccaaggacaagggattcgtaccactgctcctcactcagtaaatagcagagacagaatttgaaccactttaccgtctttcctgcccagctgttgaaatatcaaactgtaccaagattttggccatgatggactctgttctctgcacactaagagatttatcttcctgatcatcagtagaaatattaataaataatattggttgcca

SEQ ID NO: 10327 - DNA, 7193 bp, Homo sapiens
  source 1..7193: mol_type = unassigned DNA
gggtccgcggcggagcgagcgagcggccggcaggttgggaggagcggccgaaggttgaatgcctttgagaacttgatgcataaaatttgcatgactcctcactcctttctggatctctcattggactcaagccagcatggctcacaccacaaaggttaacggcagtgcctcaggaaaagcaggtgatattctcagtggagaccaggacaaggaacagaaagacccttactttgtggagaccccctatggttatcaactagacttagatttcctcaaatatgtggatgacatacagaagggaaataccatcaaaagactgaacatccagaagaggcggaagccgtccgtgccatgcccagaacccaggaccacatctggtcagcaaggtatatggacttccactgaatccctctcatcctccaacagtgatgacaacaagcagtgccccaacttcctcatagccagaagtcaagttacatcaactccaatctcaaagccacctccccctctggagacctcactcccttttcttaccatcccagaaaatcgacagctgccacctccctcaccacaactcccaaagcataaccttcatgtcaccaagacactgatggagacccggagaagactggaacaggagagagccaccatgcagatgacaccgggtgagttcagaaggcccaggctggccagttttggaggcatgggcaccacaagctccctcccttcttttgtgggttctggaaaccacaatcctgccaagcaccagcttcagaatggataccaaggtaatggggattatggtagctatgccccagctgctcccaccacttcctccatggggagctccatccgccacagccccctgagctcagggatctccaccccagtgaccaacgtgagccccatgcacctgcagcacatccgcgagcagatggccattgctctgaaacgcctgaaggagctggaggagcaggtgcgaaccatccctgtgctccaggtaaagatctctgtcttgcaagaagagaaaaggcagttggtctcacagctgaaaaaccaaagggctgcatcccagatcaatgtctgtggtgtgaggaagcggtcctatagtgcggggaacgcctcccagctggaacagctctcccgggcccgaagaagtggcggggaattatacattgactatgaggaggaagaaatggagaccgtagaacagagcacgcagaggataaaggagttccggcaacttacagcagacatgcaagccctggagcagaagatccaggacagcagctgtgaggcctcctcagagctcagggagaatggagagtgccggtctgtggctgtgggtgccgaggagaacatgaacgacatcgtcgtgtaccacagaggctccaggtcctgtaaggatgcagctgtagggacacttgttgagatgagaaattgtggggtcagcgtgacagaggccatgcttggagtgatgactgaagctgacaaagaaattgagctgcaacagcagaccatagaatccttgaaggaaaagatctatcgcctagaagtacagcttagagaaaccacccatgaccgggagatgactaaactgaaacaagagctgcaggctgctggatcgaggaaaaaggttgacaaagccacgatggcccagccgcttgttttcagtaaggtggtggaggcagtggtgcagaccagagaccaaatggtcggcagtcacatggacctggtggacacgtgtgttgggacctccgtggaaacaaacagtgtaggcatctcctgccagcctgaatgtaagaataaagtcgtagggcctgagctgcctatgaattggtggattgttaaggagagggtggaaatgcatgaccgatgtgctgggaggtctgtggaaatgtgtgacaagagtgtgagtgtggaagtcagcgtctgcgaaacaggcagcaacacagaggagtctgtgaacgacctcacactcctcaagacaaacttgaatctcaaagaagtgcggtctatcggttgtggagattgttctgttgacgtgaccgtctgctctccaaaggagtgcgcctcccggggcgtgaacactgaggctgttagccaggtggaagctgccgtcatggcagtgcctcgtactgcagaccaggacactagcacagatttggaacaggtgcaccagttcaccaacaccgagacggccaccctcatagagtcctgcaccaacacttgtctaagcactttggacaagcagaccagcacccagactgtggagacgcggacagtagctgtaggagaaggccgtgtcaaggacatcaactcctccaccaagacgcggtccattggtgttggaacgttgctttctggccattctgggtttgacaggccatcagctgtgaagaccaaagagtcaggtgtggggcagataaatattaacgacaactatctggttggtctcaaaatgaggactatagcttgtgggccaccacagttgactgtggggctgacagccagcagaaggagcgtgggggttggggatgaccctgtaggggaatctctggagaacccccagcctcaagctccacttggaatgatgactggcctggatcactacattgagcgtatccagaagctgctggcagaacagcagacactgctggctgagaactacagtgaactggcagaagctttcggggaacctcactcacagatgggctccctcaactctcagctcatcagcaccctgtcgtctatcaactctgtcatgaaatctgcaagcactgaagagctgaggaaccctgacttccagaaaaccagtctgggtaaaatcacaggcaattatttgggatatacctgtaagtgtgggggccttcagtcaggaagtcccttaagctcccagacatcccagcctgagcaagaagtggggacctcagaaggaaagccaatcagcagcctggatgccttccccactcaggaaggtacgctgtctccagtgaacctgacagacgaccagatcgccgctggcctctatgcatgtacaaacaatgaaagtacactgaagtccatcatgaagaagaaagatggtaacaaagattcaaatggcgcaaaaaagaatcttcagtttgttggcattaatggagggtatgaaacaacttcaagtgatgattccagctcagatgaaagctcttcttccgagtcagatgacgagtgtgatgtcattgagtatcctcttgaagaagaggaggaggaggaggatgaagacactcggggaatggcagaagggcaccatgcagttaatattgaaggtttgaagtctgccagggtggaagatgaaatgcaggttcaagaatgtgaacctgagaaggtggaaatcagagagaggtgtggtacattccccttccctcccttgcccctcccacatttaatgtactttggcaatagagttggccagttcagagcttttgtaattaaatgtttgcttttatctgttcctcagaggtatacacatcttgagatactaatatatacaagtgcagagtattacaactcttagatctcttatggtagaatggcctggtacctaatcacccttgttttctgaaaccttaactctgctatataatttaacatatggaaccacaatccactaaaacttgcattgtttgaacaccttaccttatatttaaagacattttaattttttggtggccagcctactttaagatttcagattttatgtttagccatttatcttgatacaggtgtatcattattacaggatcattgtgtggatgaggcctcagccaaagatcacatatactgtaaagatgatgcatatcacttacatgtttgtattttgttacacattgaatgatcaggaataccacaagaatggatttgggtatatcataaatagtagctgaaaaacactctggttggctgaaatatgtgcctcagaatgtaagttttcaagaccattagataaggatttgatgctcataaaatagagagtagaaaaggtggaaacttcagtatggtttttcagtatgtgaaatataaatagaacatttcagaaaacttacctctatttaatttggcaaatgaaagtttaactgcattaaaacaaggtaagtgtttttagtttatatttccaagtgtttcacatggctttttaacagctttgagatgtaatttatataccatatgtcatttttttacttttcatatgggttaaacacttgagtcaccaaatgtgggttcagatgtgtggtttactggtcagcacgatggatatatggtaatttgtggaaagtcaaggcaagaggatcgcttgagcacaggagtttgagactagcctggacaatatagtaagacctcatccctacaaaaatatcaattacctgggcatggtgtcacatgccagctgctctggaggataaggtgggaggatcacttgaaccctggaggttgaggctgcagtgagccagtgcactccagtctgggtgacagagcaagaccctgtctcagaaaaaaagtaatttgggtctccttcaacccccttaaaattaaaaatattttttaaaaacttagaacaggttgggcacagtggctcacacccataatgccaatactttgggaggctgaggcaggcaggcagatagcttgagcccaagagttcgagaccagcctgggcaacatggtgaaaccctgtctctacaaatacaaagccgggtgtggtggcacacacgtgtaatcccagttacttgggaagctgaggtaggaagattgcttgagcctgggacagcaaaactacagtgagccgtgattgcaccactgcactccagcctgggcaacagagtgagaccttgtctcaaaaaaaaaaaaaaaaaaaaaaaaacttaaaaatggcaaaaaaaaatctctaaatgttattccagaatgtcataaaggccaattggtgaagccgaatgtcaccctcccaaacaaggcctcaatctctggctggaggtgttggctctgcacagtggacgtaacccttagacccctaaggatttctgtgctgcctctgcccaagcaccttgtgccataatgacctgcctgggctggcttggggccacttgccttttaaaaatatatttttaaaagttgaagctgcgcagtgtcccacccctgtaatcccagcactgtgggaggccgaggcaggtggatcacctgaggtcaggagttcaaaaccagcctggccaacatagtgaaaccccgtctccactaaaaatacaaaaattagctgggcctggtggtgcacacctgtagtcccagctactagggaggctgaggcaggaggattgcttgaatccaggaggcggaggttgcagtgagccaagatcatgccactgcactccagcctgggcgacagagcatgaccctgtctcaaaaaaaaaattagatatttgggttgaaataaaaatgattttcttcttgtgaccaatcgtaacttgttttttctcctttcaggtatgaattaagtgaaaagatgttgtctgcatgcaacttactgaaaaatactataaatgaccccaaagctttgaccagcaaagatatgaggttctgtctgaacaccctccagcacgagtggttccgcgtgtccagtcagaagtcagccattccagccatggtgggggactacatagctgcttttgaggccatttccccagatgtcctccgctatgtcatcaacttggcagacggcaacggcaacacagccctccattacagcgtgtcccactccaacttcgagattgtgaagctgctgttagatgccgatgtgtgtaatgtggatcaccagaacaaggcaggctacacccccatcatgttggcggccctcgccgctgtggaagcagagaaggacatgcggattgtggaagaactcttcggctgtggggatgtgaatgccaaagctagtcaggcgggacagacggccctcatgctggcggtcagtcacggacggatagacatggtgaagggccttctggcctgtggggctgatgtcaacatccaggatgacgagggctccacggccctcatgtgtgccagcgagcacggacacgtggagattgtcaagctgctgctggcccagcccggctgcaacggtcacctagaggacaacgatggcagcactgcgctctcaatcgccctggaagcaggacacaaggacatcgctgttcttctgtatgcccatgtcaactttgcaaaagcccagtctccgggcacccctaggcttggaaggaagacgtctcctggccccacccaccgaggttcatttgattgattgtatgcaaatagccctttatttacatgccactattaagctgctaattgttcctgttggggtgacagatactgaatgtatacgtattgtgcctgagctcaccagcaaacagaagcatcaagcccaggggtaaaggctgaagctttcacagtgcagagactgctagcctgggcacacacacctcctttctggccgtcttctgtgtagggcacactttaacccagtctctgttgctgttgagtctctgctccgttttgtacagtcacagggaattctgatctgaaggggcaccttctgttcactcccacaaagtggtgtctggttctcactgagacgttttaagatttttccacaaatatttatatgtactaaatgtggaaccattagaaagttcttccaaaatctcattccagcatagttttggatttttcttttgtcttattttaaaataaggaagtcgagatgactttgatcattggtaacttgggcctgggccagacaaagtataaaacttacaaaagaatattctcatttggtcttaactaggtagatgtaatatatgactttttataaaaagggtatctatatgaacttgacacagtattttcagcttttgtattccatactaaagccatgaagaactacacgtaacatcatcatttgtattaattgcacaactccaatgctaaaggttggattgtgttagaggaatcggctctgtatttgcctctagagaaacacagtgttctctttgtatttatggattcctttttaccgtgtcacatttactttggtcctctatgtatttaaatgtttgaagtgccttagactcttgccatattttcaaaataaaattccattaagctct

SEQ ID NO: 10328 - DNA, 6912 bp, Homo sapiens
  source 1..6912: mol_type = unassigned DNA
ggtccgcggcggagcgagcgagcggccggcaggttgggaggagcggccgaaggttgaatgcctttgagaacttgatgcataaaatttgcatgactcctcactcctttctggatctctcattggactcaagccagcatggctcacaccacaaaggttaacggcagtgcctcaggaaaagcaggtgatattctcagtggagaccaggacaaggaacagaaagacccttactttgtggagaccccctatggttatcaactagacttagatttcctcaaatatgtggatgacatacagaagggaaataccatcaaaagactgaacatccagaagaggcggaagccgtccgtgccatgcccagaacccaggaccacatctggtcagcaaggtatatggacttccactgaatccctctcatcctccaacagtgatgacaacaagcagtgccccaacttcctcatagccagaagtcaagttacatcaactccaatctcaaagccacctccccctctggagacctcactcccttttcttaccatcccagaaaatcgacagctgccacctccctcaccacaactcccaaagcataaccttcatgtcaccaagacactgatggagacccggagaagactggaacaggagagagccaccatgcagatgacaccgggtgagttcagaaggcccaggctggccagttttggaggcatgggcaccacaagctccctcccttcttttgtgggttctggaaaccacaatcctgccaagcaccagcttcagaatggataccaaggtaatggggattatggtagctatgccccagctgctcccaccacttcctccatggggagctccatccgccacagccccctgagctcagggatctccaccccagtgaccaacgtgagccccatgcacctgcagcacatccgcgagcagatggccattgctctgaaacgcctgaaggagctggaggagcaggtgcgaaccatccctgtgctccaggtaaagatctctgtcttgcaagaagagaaaaggcagttggtctcacagctgaaaaaccaaagggctgcatcccagatcaatgtctgtggtgtgaggaagcggtcctatagtgcggggaacgcctcccagctggaacagctctcccgggcccgaagaagtggcggggaattatacattgactatgaggaggaagaaatggagaccgtagaacagagcacgcagaggataaaggagttccggcaacttacagcagacatgcaagccctggagcagaagatccaggacagcagctgtgaggcctcctcagagctcagggagaatggagagtgccggtctgtggctgtgggtgccgaggagaacatgaacgacatcgtcgtgtaccacagaggctccaggtcctgtaaggatgcagctgtagggacacttgttgagatgagaaattgtggggtcagcgtgacagaggccatgcttggagtgatgactgaagctgacaaagaaattgagctgcaacagcagaccatagaatccttgaaggaaaagatctatcgcctagaagtacagcttagagaaaccacccatgaccgggagatgactaaactgaaacaagagctgcaggctgctggatcgaggaaaaaggttgacaaagccacgatggcccagccgcttgttttcagtaaggtggtggaggcagtggtgcagaccagagaccaaatggtcggcagtcacatggacctggtggacacgtgtgttgggacctccgtggaaacaaacagtgtaggcatctcctgccagcctgaatgtaagaataaagtcgtagggcctgagctgcctatgaattggtggattgttaaggagagggtggaaatgcatgaccgatgtgctgggaggtctgtggaaatgtgtgacaagagtgtgagtgtggaagtcagcgtctgcgaaacaggcagcaacacagaggagtctgtgaacgacctcacactcctcaagacaaacttgaatctcaaagaagtgcggtctatcggttgtggagattgttctgttgacgtgaccgtctgctctccaaaggagtgcgcctcccggggcgtgaacactgaggctgttagccaggtggaagctgccgtcatggcagtgcctcgtactgcagaccaggacactagcacagatttggaacaggtgcaccagttcaccaacaccgagacggccaccctcatagagtcctgcaccaacacttgtctaagcactttggacaagcagaccagcacccagactgtggagacgcggacagtagctgtaggagaaggccgtgtcaaggacatcaactcctccaccaagacgcggtccattggtgttggaacgttgctttctggccattctgggtttgacaggccatcagctgtgaagaccaaagagtcaggtgtggggcagataaatattaacgacaactatctggttggtctcaaaatgaggactatagcttgtgggccaccacagttgactgtggggctgacagccagcagaaggagcgtgggggttggggatgaccctgtaggggaatctctggagaacccccagcctcaagctccacttggaatgatgactggcctggatcactacattgagcgtatccagaagctgctggcagaacagcagacactgctggctgagaactacagtgaactggcagaagctttcggggaacctcactcacagatgggctccctcaactctcagctcatcagcaccctgtcgtctatcaactctgtcatgaaatctgcaagcactgaagagctgaggaaccctgacttccagaaaaccagtctgggtaaaatcacaggcaattatttgggatatacctgtaagtgtgggggccttcagtcaggaagtcccttaagctcccagacatcccagcctgagcaagaagtggggacctcagaaggaaagccaatcagcagcctggatgccttccccactcaggaaggtacgctgtctccagtgaacctgacagacgaccagatcgccgctggcctctatggtaacttttctcactcacagtcattggcatcaggattctagggccagcattgccagcattccaatttaatgtcaatgtaccttttaaattgacctggaagaaagttaatatcgttatttggaaggtaggcccagaatatctttaaataaggttaccaaagaggccgggcatggtggctcacacctgtgatcccagcactttgggaggccaaggcaggcagatcatttgaggccaggagttcgagaccagcctggccaacatggtgaaaccccatctctactaaaaaatacaaaaattagccaggcatggtggtgcacacctgtagtcccagctactccggcggctgaggtgggagaatcacttgaacctgggaggtggaggttgcagtgagctgagatcacgccactgcactccagcctgggtgacagaaagaggccctgtctcaaaattacgaaagaaagctgtacaagaaagcttacctgatattacaaattatgaaatattttaaatagcattttattcacgttctggcaggcataagttttttcaggttatctcagctgaagaagaataataatccctgtttagtacgtaaatggtccttgaggctcgtgagacacgacatcactttataagcagtaaagccggatacaaatgtcagttttcactggctttgttatgtctggaaggactaattgatttttttcccatgtgaagaatgttattaatggaactttgaattattttctttgcatgcacacactttcccattgaattttgtggaaacttctcacatatatatgccaagatctacatttacatgcatgagaaaagaactgtacaggaaaaaagatcatttaacatgtatgggtgtgagttttcatttttattgccttgactttttcacagcatgtacaaacaatgaaagtacactgaagtccatcatgaagaagaaagatggtaacaaagattcaaatggcgcaaaaaagaatcttcagtttgttggcattaatggagggtaaggaaagatggtggttctagaggctaatgctgtcagtctcctttacctcctgcctaagtcacatttcaaggcgcctagtcggggaagcggccacagcgcagtgatgaaagattccctcctcagaaaggcagaaaggtgcatttgggctttgctttcctcctctggtgctgtctttaaggatttgtcactctcttaaggatacctgatgaagctgagcggtttacatctcctcacctctgatctgaaagaaatagtcttcagcgaacgcagcagggttcctgcactgtgttggacaacttgtacttacctatacgagaactcacaattgagcagaaaaagactgagagcatcactctctgggccaacgatcgtcatcttttccttcaaaatgggtccttttgcttagctctccatgtttacgacccaaattgtagggcctttcacaattgataaccacatcaccagtttgctttctaaatagaatggttattgtttgttccttctctttgcattggcccacgtacatagttaagcccctttgttgtcctacaattgaatcaaatcaatgaattgatacatggcccccacaagaaagaaataatacaaagtgtaccattagggtttaaccttatggtgcctgttttccaaatctagaagttttattcagtgataatggccaggagattttggagggcatacaccagaaaaactatcgattgcctatgtaatctattccccttgatactgggagaattaataggatgaaataggaagacatggggtgggggggggacaaaaagcacctaccgatctgttttccataaagtatgttttctcatgatttatgctaagccggagatgccattattttctttaacaagtgttacatgataccaattggttatatgataccgataaccagtttaagttagagtccattcaaaaccaccaggcatttaaatagaccttactttgaacttctaagtgcaggatctaaaaccactagtgaaatttctggagtcaattagcaaatcccttcatagaaatttctatcactgggtcttcgtgagcacaccttgcatctcctgaaatcccaattgccacctaggtatgaaacaacttcaagtgatgattccagctcagatgaaagctcttcttccgagtcagatgacgagtgtgatgtcattgagtatcctcttgaagaagaggaggaggaggaggatgaagacactcggggaatggcagaagggcaccatgcagttaatattgaaggtttgaagtctgccagggtggaagatgaaatgcaggttcaagaatgtgaacctgagaaggtggaaatcagagagaggtgtggtacattccccttccctcccttgcccctcccacatttaatgtactttggcaatagagttggccagttcagagcttttgtaattaaatgtttgcttttatctgttcctcagaggtatacacatcttgagatactaatatatacaagtgcagagtattacaactcttagatctcttatggtagaatggcctggtacctaatcacccttgttttctgaaaccttaactctgctatataatttaacatatggaaccacaatccactaaaacttgcattgtttgaacaccttaccttatatttaaagacattttaattttttggtggccagcctactttaagatttcagattttatgtttagccatttatcttgatacaggtgtatcattattacaggatcattgtgtggatgaggcctcagccaaagatcacatatactgtaaagatgatgcatatcacttacatgtttgtattttgttacacattgaatgatcaggaataccacaagaatggatttgggtatatcataaatagtagctgaaaaacactctggttggctgaaatatgtgcctcagaatgtaagttttcaagaccattagataaggatttgatgctcataaaatagagagtagaaaaggtggaaacttcagtatggtttttcagtatgtgaaatataaatagaacatttcagaaaacttacctctatttaatttggcaaatgaaagtttaactgcattaaaacaaggtaagtgtttttagtttatatttccaagtgtttcacatggctttttaacagctttgagatgtaatttatataccatatgtcatttttttacttttcatatgggttaaacacttgagtcaccaaatgtgggttcagatgtgtggtttactggtcagcacgatggatatatggtaatttgtggaaagtcaaggcaagaggatcgcttgagcacaggagtttgagactagcctggacaatatagtaagacctcatccctacaaaaatatcaattacctgggcatggtgtcacatgccagctgctctggaggataaggtgggaggatcacttgaaccctggaggttgaggctgcagtgagccagtgcactccagtctgggtgacagagcaagaccctgtctcagaaaaaaagtaatttgggtctccttcaacccccttaaaattaaaaatattttttaaaaacttagaacaggttgggcacagtggctcacacccataatgccaatactttgggaggctgaggcaggcaggcagatagcttgagcccaagagttcgagaccagcctgggcaacatggtgaaaccctgtctctacaaatacaaagccgggtgtggtggcacacacgtgtaatcccagttacttgggaagctgaggtaggaagattgcttgagcctgggacagcaaaactacagtgagccgtgattgcaccactgcactccagcctgggcaacagagtgagaccttgtctcaaaaaaaaaaaaaaaaaaaaa

SEQ ID NO: 10329 - DNA, 5051 bp, Homo sapiens
  source 1..5051: mol_type = unassigned DNA
gcgagcgagcggccggcaggttgggaggagcggccgaaggttgaatgcctttgagaacttgatgcataaaatttgcatgactcctcactcctttctggatctctcattggactcaagccagcatggctcacaccacaaaggttaacggcagtgcctcaggaaaagcaggtgatattctcagtggagaccaggacaaggaacagaaagacccttactttgtggagaccccctatggttatcaactagacttagatttcctcaaatatgtggatgacatacagaagggaaataccatcaaaagactgaacatccagaagaggcggaagccgtccgtgccatgcccagaacccaggaccacatctggtcagcaaggtatatggacttccactgaatccctctcatcctccaacagtgatgacaacaagcagtgccccaacttcctcatagccagaagtcaagttacatcaactccaatctcaaagccacctccccctctggagacctcactcccttttcttaccatcccagaaaatcgacagctgccacctccctcaccacaactcccaaagcataaccttcatgtcaccaagacactgatggagacccggagaagactggaacaggagagagccaccatgcagatgacaccgggtgagttcagaaggcccaggctggccagttttggaggcatgggcaccacaagctccctcccttcttttgtgggttctggaaaccacaatcctgccaagcaccagcttcagaatggataccaaggtaatggggattatggtagctatgccccagctgctcccaccacttcctccatggggagctccatccgccacagccccctgagctcagggatctccaccccagtgaccaacgtgagccccatgcacctgcagcacatccgcgagcagatggccattgctctgaaacgcctgaaggagctggaggagcaggtgcgaaccatccctgtgctccaggtaaagatctctgtcttgcaagaagagaaaaggcagttggtctcacagctgaaaaaccaaagggctgcatcccagatcaatgtctgtggtgtgaggaagcggtcctatagtgcggggaacgcctcccagctggaacagctctcccgggcccgaagaagtggcggggaattatacattgactatgaggaggaagaaatggagaccgtagaacagagcacgcagaggataaaggagttccggcaacttacagcagacatgcaagccctggagcagaagatccaggacagcagctgtgaggcctcctcagagctcagggagaatggagagtgccggtctgtggctgtgggtgccgaggagaacatgaacgacatcgtcgtgtaccacagaggctccaggtcctgtaaggatgcagctgtagggacacttgttgagatgagaaattgtggggtcagcgtgacagaggccatgcttggagtgatgactgaagctgacaaagaaattgagctgcaacagcagaccatagaatccttgaaggaaaagatctatcgcctagaagtacagcttagagaaaccacccatgaccgggagatgactaaactgaaacaagagctgcaggctgctggatcgaggaaaaaggttgacaaagccacgatggcccagccgcttgttttcagtaaggtggtggaggcagtggtgcagaccagagaccaaatggtcggcagtcacatggacctggtggacacgtgtgttgggacctccgtggaaacaaacagtgtaggcatctcctgccagcctgaatgtaagaataaagtcgtagggcctgagctgcctatgaattggtggattgttaaggagagggtggaaatgcatgaccgatgtgctgggaggtctgtggaaatgtgtgacaagagtgtgagtgtggaagtcagcgtctgcgaaacaggcagcaacacagaggagtctgtgaacgacctcacactcctcaagacaaacttgaatctcaaagaagtgcggtctatcggttgtggagattgttctgttgacgtgaccgtctgctctccaaaggagtgcgcctcccggggcgtgaacactgaggctgttagccaggtggaagctgccgtcatggcagtgcctcgtactgcagaccaggacactagcacagatttggaacaggtgcaccagttcaccaacaccgagacggccaccctcatagagtcctgcaccaacacttgtctaagcactttggacaagcagaccagcacccagactgtggagacgcggacagtagctgtaggagaaggccgtgtcaaggacatcaactcctccaccaagacgcggtccattggtgttggaacgttgctttctggccattctgggtttgacaggccatcagctgtgaagaccaaagagtcaggtgtggggcagataaatattaacgacaactatctggttggtctcaaaatgaggactatagcttgtgggccaccacagttgactgtggggctgacagccagcagaaggagcgtgggggttggggatgaccctgtaggggaatctctggagaacccccagcctcaagctccacttggaatgatgactggcctggatcactacattgagcgtatccagaagctgctggcagaacagcagacactgctggctgagaactacagtgaactggcagaagctttcggggaacctcactcacagatgggctccctcaactctcagctcatcagcaccctgtcgtctatcaactctgtcatgaaatctgcaagcactgaagagctgaggaaccctgacttccagaaaaccagtctgggtaaaatcacaggcaattatttgggatatacctgtaagtgtgggggccttcagtcaggaagtcccttaagctcccagacatcccagcctgagcaagaagtggggacctcagaaggaaagccaatcagcagcctggatgccttccccactcaggaaggtacgctgtctccagtgaacctgacagacgaccagatcgccgctggcctctatgcatgtacaaacaatgaaagtacactgaagtccatcatgaagaagaaagatggtaacaaagattcaaatggcgcaaaaaagaatcttcagtttgttggcattaatggagggtatgaaacaacttcaagtgatgattccagctcagatgaaagctcttcttccgagtcagatgacgagtgtgatgtcattgagtatcctcttgaagaagaggaggaggaggaggatgaagacactcggggaatggcagaagggcaccatgcagttaatattgaaggtttgaagtctgccagggtggaagatgaaatgcaggttcaagaatgtgaacctgagaaggtggaaatcagagagaggtatgaattaagtgaaaagatgttgtctgcatgcaacttactgaaaaatactataaatgaccccaaagctttgaccagcaaagatatgaggttctgtctgaacaccctccagcacgagtggttccgcgtgtccagtcagaagtcagccattccagccatggtgggggactacatagctgcttttgaggccatttccccagatgtcctccgctatgtcatcaacttggcagacggcaacggcaacacagccctccattacagcgtgtcccactccaacttcgagattgtgaagctgctgttagatgccgatgtgtgtaatgtggatcaccagaacaaggcaggctacacccccatcatgttggcggccctcgccgctgtggaagcagagaaggacatgcggattgtggaagaactcttcggctgtggggatgtgaatgccaaagctagtcaggcgggacagacggccctcatgctggcggtcagtcacggacggatagacatggtgaagggccttctggcctgtggggctgatgtcaacatccaggatgacgagggctccacggccctcatgtgtgccagcgagcacggacacgtggagattgtcaagctgctgctggcccagcccggctgcaacggtcacctagaggacaacgatggcagcactgcgctctcaatcgccctggaagcaggacacaaggacatcgctgttcttctgtatgcccatgtcaactttgcaaaagcccagtctccgggcacccctaggcttggaaggaagacgtctcctggccccacccaccgaggttcatttgattgattgtatgcaaatagccctttatttacatgccactattaagctgctaattgttcctgttggggtgacagatactgaatgtatacgtattgtgcctgagctcaccagcaaacagaagcatcaagcccaggggtaaaggctgaagctttcacagtgcagagactgctagcctgggcacacacacctcctttctggccgtcttctgtgtagggcacactttaacccagtctctgttgctgttgagtctctgctccgttttgtacagtcacagggaattctgatctgaaggggcaccttctgttcactcccacaaagtggtgtctggttctcactgagacgttttaagatttttccacaaatatttatatgtactaaatgtggaaccattagaaagttcttccaaaatctcattccagcatagttttggatttttcttttgtcttattttaaaataaggaagtcgagatgactttgatcattggtaacttgggcctgggccagacaaagtataaaacttacaaaagaatattctcatttggtcttaactaggtagatgtaatatatgactttttataaaaagggtatctatatgaacttgacacagtattttcagcttttgtattccatactaaagccatgaagaactacacgtaacatcatcatttgtattaattgcacaactccaatgctaaaggttggattgtgttagaggaatcggctctgtatttgcctctagagaaacacagtgttctctttgtatttatggattcctttttaccgtgtcacatttactttggtcctctatgtatttaaatgtttgaagtgccttagactcttgccatattttcaaaataaaattccattaagctcttt

SEQ ID NO: 10330 - DNA, 5249 bp, Homo sapiens
  source 1..5249: mol_type = unassigned DNA
gaaaaacagagcctctctgtagagatgcttaaagtgctagctttatttaaaaatcagctggcaaagcgggagtgaagaacacacattttcagaagataccggtttcctgttttcattaagaaaacagggaatgcggaacagctgagtgcggcgggggtggtgtcactgcagccggagggagacctcgccggtgaaagctcagcctatggcatccgagcgtggccggccaagtttacacgaatgttgaaacttctcctcacggggtgaggatcgagggcgcccgaggccgggtccggctgagctggagcgagctgtgcggggcagcgcgggctggcggggagcgcggcgggcgccacgtggaaaagcaggtgatattctcagtggagaccaggacaaggaacagaaagacccttactttgtggagaccccctatggttatcaactagacttagatttcctcaaatatgtggatgacatacagaagggaaataccatcaaaagactgaacatccagaagaggcggaagccgtccgtgccatgcccagaacccaggaccacatctggtcagcaaggtatatggacttccactgaatccctctcatcctccaacagtgatgacaacaagcagtgccccaacttcctcatagccagaagtcaagttacatcaactccaatctcaaagccacctccccctctggagacctcactcccttttcttaccatcccagaaaatcgacagctgccacctccctcaccacaactcccaaagcataaccttcatgtcaccaagacactgatggagacccggagaagactggaacaggagagagccaccatgcagatgacaccgggtgagttcagaaggcccaggctggccagttttggaggcatgggcaccacaagctccctcccttcttttgtgggttctggaaaccacaatcctgccaagcaccagcttcagaatggataccaaggtaatggggattatggtagctatgccccagctgctcccaccacttcctccatggggagctccatccgccacagccccctgagctcagggatctccaccccagtgaccaacgtgagccccatgcacctgcagcacatccgcgagcagatggccattgctctgaaacgcctgaaggagctggaggagcaggtgcgaaccatccctgtgctccaggtaaagatctctgtcttgcaagaagagaaaaggcagttggtctcacagctgaaaaaccaaagggctgcatcccagatcaatgtctgtggtgtgaggaagcggtcctatagtgcggggaacgcctcccagctggaacagctctcccgggcccgaagaagtggcggggaattatacattgactatgaggaggaagaaatggagaccgtagaacagagcacgcagaggataaaggagttccggcaacttacagcagacatgcaagccctggagcagaagatccaggacagcagctgtgaggcctcctcagagctcagggagaatggagagtgccggtctgtggctgtgggtgccgaggagaacatgaacgacatcgtcgtgtaccacagaggctccaggtcctgtaaggatgcagctgtagggacacttgttgagatgagaaattgtggggtcagcgtgacagaggccatgcttggagtgatgactgaagctgacaaagaaattgagctgcaacagcagaccatagaatccttgaaggaaaagatctatcgcctagaagtacagcttagagaaaccacccatgaccgggagatgactaaactgaaacaagagctgcaggctgctggatcgaggaaaaaggttgacaaagccacgatggcccagccgcttgttttcagtaaggtggtggaggcagtggtgcagaccagagaccaaatggtcggcagtcacatggacctggtggacacgtgtgttgggacctccgtggaaacaaacagtgtaggcatctcctgccagcctgaatgtaagaataaagtcgtagggcctgagctgcctatgaattggtggattgttaaggagagggtggaaatgcatgaccgatgtgctgggaggtctgtggaaatgtgtgacaagagtgtgagtgtggaagtcagcgtctgcgaaacaggcagcaacacagaggagtctgtgaacgacctcacactcctcaagacaaacttgaatctcaaagaagtgcggtctatcggttgtggagattgttctgttgacgtgaccgtctgctctccaaaggagtgcgcctcccggggcgtgaacactgaggctgttagccaggtggaagctgccgtcatggcagtgcctcgtactgcagaccaggacactagcacagatttggaacaggtgcaccagttcaccaacaccgagacggccaccctcatagagtcctgcaccaacacttgtctaagcactttggacaagcagaccagcacccagactgtggagacgcggacagtagctgtaggagaaggccgtgtcaaggacatcaactcctccaccaagacgcggtccattggtgttggaacgttgctttctggccattctgggtttgacaggccatcagctgtgaagaccaaagagtcaggtgtggggcagataaatattaacgacaactatctggttggtctcaaaatgaggactatagcttgtgggccaccacagttgactgtggggctgacagccagcagaaggagcgtgggggttggggatgaccctgtaggggaatctctggagaacccccagcctcaagctccacttggaatgatgactggcctggatcactacattgagcgtatccagaagctgctggcagaacagcagacactgctggctgagaactacagtgaactggcagaagctttcggggaacctcactcacagatgggctccctcaactctcagctcatcagcaccctgtcgtctatcaactctgtcatgaaatctgcaagcactgaagagctgaggaaccctgacttccagaaaaccagtctgggtaaaatcacaggcaattatttgggatatacctgtaagtgtgggggccttcagtcaggaagtcccttaagctcccagacatcccagcctgagcaagaagtggggacctcagaaggaaagccaatcagcagcctggatgccttccccactcaggaaggtacgctgtctccagtgaacctgacagacgaccagatcgccgctggcctctatgcatgtacaaacaatgaaagtacactgaagtccatcatgaagaagaaagatggtaacaaagattcaaatggcgcaaaaaagaatcttcagtttgttggcattaatggagggtatgaaacaacttcaagtgatgattccagctcagatgaaagctcttcttccgagtcagatgacgagtgtgatgtcattgagtatcctcttgaagaagaggaggaggaggaggatgaagacactcggggaatggcagaagggcaccatgcagttaatattgaaggtttgaagtctgccagggtggaagatgaaatgcaggttcaagaatgtgaacctgagaaggtggaaatcagagagaggtatgaattaagtgaaaagatgttgtctgcatgcaacttactgaaaaatactataaatgaccccaaagctttgaccagcaaagatatgaggttctgtctgaacaccctccagcacgagtggttccgcgtgtccagtcagaagtcagccattccagccatggtgggggactacatagctgcttttgaggccatttccccagatgtcctccgctatgtcatcaacttggcagacggcaacggcaacacagccctccattacagcgtgtcccactccaacttcgagattgtgaagctgctgttagatgccgatgtgtgtaatgtggatcaccagaacaaggcaggctacacccccatcatgttggcggccctcgccgctgtggaagcagagaaggacatgcggattgtggaagaactcttcggctgtggggatgtgaatgccaaagctagtcaggcgggacagacggccctcatgctggcggtcagtcacggacggatagacatggtgaagggccttctggcctgtggggctgatgtcaacatccaggatgacgagggctccacggccctcatgtgtgccagcgagcacggacacgtggagattgtcaagctgctgctggcccagcccggctgcaacggtcacctagaggacaacgatggcagcactgcgctctcaatcgccctggaagcaggacacaaggacatcgctgttcttctgtatgcccatgtcaactttgcaaaagcccagtctccgggcacccctaggcttggaaggaagacgtctcctggccccacccaccgaggttcatttgattgattgtatgcaaatagccctttatttacatgccactattaagctgctaattgttcctgttggggtgacagatactgaatgtatacgtattgtgcctgagctcaccagcaaacagaagcatcaagcccaggggtaaaggctgaagctttcacagtgcagagactgctagcctgggcacacacacctcctttctggccgtcttctgtgtagggcacactttaacccagtctctgttgctgttgagtctctgctccgttttgtacagtcacagggaattctgatctgaaggggcaccttctgttcactcccacaaagtggtgtctggttctcactgagacgttttaagatttttccacaaatatttatatgtactaaatgtggaaccattagaaagttcttccaaaatctcattccagcatagttttggatttttcttttgtcttattttaaaataaggaagtcgagatgactttgatcattggtaacttgggcctgggccagacaaagtataaaacttacaaaagaatattctcatttggtcttaactaggtagatgtaatatatgactttttataaaaagggtatctatatgaacttgacacagtattttcagcttttgtattccatactaaagccatgaagaactacacgtaacatcatcatttgtattaattgcacaactccaatgctaaaggttggattgtgttagaggaatcggctctgtatttgcctctagagaaacacagtgttctctttgtatttatggattcctttttaccgtgtcacatttactttggtcctctatgtatttaaatgtttgaagtgccttagactcttgccatattttcaaaataaaattccattaagctct

SEQ ID NO: 10331 - DNA, 1926 bp, Homo sapiens
  source 1..1926: mol_type = unassigned DNA
gagtgtgatgtcattgagtatcctcttgaagaagaggaggaggaggaggatgaagacactcggggaatggcagaagggcaccatgcagttaatattgaaggtttgaagtctgccagggtggaagatgaaatgcaggttcaagaatgtgaacctgagaaggtggaaatcagagagaggtatgaattaagtgaaaagatgttgtctgcatgcaacttactgaaaaatactataaatgaccccaaagctttgaccagcaaagatatgggccaggtgcagtggctgacacctatgatcccaacacttcgggaggccgatgcaggtggatcacatgagaggttctgtctgaacaccctccagcacgagtggttccgcgtgtccagtcagaagtcagccattccagccatggtgggggactacatagctgcttttgaggccatttccccagatgtcctccgctatgtcatcaacttggcagacggcaacggcaacacagccctccattacagcgtgtcccactccaacttcgagattgtgaagctgctgttagatgccgatgtgtgtaatgtggatcaccagaacaaggcaggctacacccccatcatgttggcggccctcgccgctgtggaagcagagaaggacatgcggattgtggaagaactcttcggctgtggggatgtgaatgccaaagctagtcaggcgggacagacggccctcatgctggcggtcagtcacggacggatagacatggtgaagggccttctggcctgtggggctgatgtcaacatccaggatgacgagggctccacggccctcatgtgtgccagcgagcacggacacgtggagattgtcaagctgctgctggcccagcccggctgcaacggtcacctagaggacaacgatggcagcactgcgctctcaatcgccctggaagcaggacacaaggacatcgctgttcttctgtatgcccatgtcaactttgcaaaagcccagtctccgggcacccctaggcttggaaggaagacgtctcctggccccacccaccgaggttcatttgattgattgtatgcaaatagccctttatttacatgccactattaagctgctaattgttcctgttggggtgacagatactgaatgtatacgtattgtgcctgagctcaccagcaaacagaagcatcaagcccaggggtaaaggctgaagctttcacagtgcagagactgctagcctgggcacacacacctcctttctggccgtcttctgtgtagggcacactttaacccagtctctgttgctgttgagtctctgctccgttttgtacagtcacagggaattctgatctgaaggggcaccttctgttcactcccacaaagtggtgtctggttctcactgagacgttttaagatttttccacaaatatttatatgtactaaatgtggaaccattagaaagttcttccaaaatctcattccagcatagttttggatttttcttttgtcttattttaaaataaggaagtcgagatgactttgatcattggtaacttgggcctgggccagacaaagtataaaacttacaaaagaatattctcatttggtcttaactaggtagatgtaatatatgactttttataaaaagggtatctatatgaacttgacacagtattttcagcttttgtattccatactaaagccatgaagaactacacgtaacatcatcatttgtattaattgcacaactccaatgctaaaggttggattgtgttagaggaatcggctctgtatttgcctctagagaaacacagtgttctctttgtatttatggattcctttttaccgtgtcacatttactttggtcctctatgtatttaaatgtttgaagtgccttagactcttgccatattttcaaaataaaattccattaagctc

SEQ ID NO: 10332 - DNA, 2266 bp, Homo sapiens
  source 1..2266: mol_type = unassigned DNA
gtatgaattaagtgaaaagatgttgtctgcatgcaacttactgaaaaatactataaatgaccccaaagctttgaccagcaaagatatgaggttctgtctgaacaccctccagcacgagtggttccgcgtgtccagtcagaagtcagccattccagccatggtgggggactacatagctgcttttgaggccatttccccagatgtcctccgctatgtcatcaacttggcagacggcaacggcaacacagccctccattacagcgtgtcccactccaacttcgagattgtgaagctgctgttagatgccgatgtgtgtaatgtggatcaccagaacaaggcaggctacacccccatcatgttggcggccctcgccgctgtggaagcagagaaggacatgcggattgtggaagaactcttcggctgtggggatgtgaatgccaaagctagtcaggcgggacagacggccctcatgctggcggtcagtcacggacggatagacatggtgaagggccttctggcctgtggggctgatgtcaacatccaggatgacgagggctccacggccctcatgtgtgccagcgagcacggacacgtggagattgtcaagctgctgctggcccagcccggctgcaacggtcacctagaggacaacgatggcagcactgcgctctcaatcgccctggaagcaggacacaaggacatcgctgttcttctgtatgcccatgtcaactttgcaaaagcccagtctccggtcagtgttgtgcatttggcatttgtaaataggctgaaatccaccagactggtggacccccttcctccaggaattgacgggagacagattttatgttgattcagaaaatggaagttttagtctggagcttaagagttcatcctttccgcctccaccccgcaaaaagcaggagaactaatgttttagcagaggctggaccttgcttgtccttgcaagacatatgctcacagcttcccatagaggttttgattctgtgcagaattatccagatagcagcccctgagcccatggggatatttcgccatggttctggcattgttcctgaagcagatggcaggcagcctgtagtccacagttcactctgagtgggaaggtgacttcccaggacagccggacatagcactgctgagcccagctggccttggagctgtggacacctgttccctgttctcagccagagctctcctggctcgggctcacagctgcttgttgcctgtggtgggccaagatcctatgtcacagggtacacatctgcctgaggtcacttattaacccccagtttttttcctttcctggtctctagggcacccctaggcttggaaggaagacgtctcctggccccacccaccgaggttcatttgattgattgtatgcaaatagccctttatttacatgccactattaagctgctaattgttcctgttggggtgacagatactgaatgtatacgtattgtgcctgagctcaccagcaaacagaagcatcaagcccaggggtaaaggctgaagctttcacagtgcagagactgctagcctgggcacacacacctcctttctggccgtcttctgtgtagggcacactttaacccagtctctgttgctgttgagtctctgctccgttttgtacagtcacagggaattctgatctgaaggggcaccttctgttcactcccacaaagtggtgtctggttctcactgagacgttttaagatttttccacaaatatttatatgtactaaatgtggaaccattagaaagttcttccaaaatctcattccagcatagttttggatttttcttttgtcttattttaaaataaggaagtcgagatgactttgatcattggtaacttgggcctgggccagacaaagtataaaacttacaaaagaatattctcatttggtcttaactaggtagatgtaatatatgactttttataaaaagggtatctatatgaacttgacacagtattttcagcttttgtattccatactaaagccatgaagaactacacgtaacatcatcatttgtattaattgcacaactccaatgctaaaggttggattgtgttagaggaatcggctctgtatttgcctctagagaaacacagtgttctctttgtatttatggattcctttttaccgtgtcacatttactttggtcctctatgtatttaaatgtttgaagtgccttagactcttgccatattttcaaaataaaattccattaagctctt

SEQ ID NO: 10333 - DNA, 5688 bp, Homo sapiens
  source 1..5688: mol_type = unassigned DNA
gagctccgggtccgcggcggagcgagcgagcggccggcaggttgggaggagcggccgaagaaaaacaggacaaagaaacctgtgtgaattttcagcttttcaccttctctgattttatttcttcctcactcttcctttgacagtcctcgcagtccgcctgagagagtagagaagaccccctcccagaaccttcctgtaaggtctccccgctgacttcctgtagtggatgtgactgtgtgccaggtgcctgccgaagacccctgtcactgactgtgccctttgggaaagagtcaacaatggcctcctcctatggctgacttcgttcatgttcaggctctccagcttgctagtgagaattgccaaggattggttcatggcaggatagaactaaactgatagatgaaagctccacagtgcttcaagacggggtcccgttcatgttaagcagttttccttccttcaaaataaaaaactagcagtccttagggaggacagttttttccttccttttcctattctggctccaacagctgtctcaacacagcccgagatggggagcagcctggcttccaccggcaatagctgtattgtgggagtgtgaaagagaagccaccttttcctccctctgcccaagccacctggcccctttgtcctttctcctcctcgtcctctgaggttgaatgcctttgagaacttgatgcataaaatttgcatgactcctcactcctttctggatctctcattggactcaagccagcatggctcacaccacaaaggttaacggcagtgcctcaggaaaagcaggtgatattctcagtggagaccaggacaaggaacagaaagacccttactttgtggagaccccctatggttatcaactagacttagatttcctcaaatatgtggatgacatacagaagggaaataccatcaaaagactgaacatccagaagaggcggaagccgtccgtgccatgcccagaacccaggaccacatctggtcagcaaggtatatggacttccactgaatccctctcatcctccaacagtgatgacaacaagcagtgccccaacttcctcatagccagaagtcaagttacatcaactccaatctcaaagccacctccccctctggagacctcactcccttttcttaccatcccagaaaatcgacagctgccacctccctcaccacaactcccaaagcataaccttcatgtcaccaagacactgatggagacccggagaagactggaacaggagagagccaccatgcagatgacaccgggtgagttcagaaggcccaggctggccagttttggaggcatgggcaccacaagctccctcccttcttttgtgggttctggaaaccacaatcctgccaagcaccagcttcagaatggataccaaggtaatggggattatggtagctatgccccagctgctcccaccacttcctccatggggagctccatccgccacagccccctgagctcagggatctccaccccagtgaccaacgtgagccccatgcacctgcagcacatccgcgagcagatggccattgctctgaaacgcctgaaggagctggaggagcaggtgcgaaccatccctgtgctccaggtaaagatctctgtcttgcaagaagagaaaaggcagttggtctcacagctgaaaaaccaaagggctgcatcccagatcaatgtctgtggtgtgaggaagcggtcctatagtgcggggaacgcctcccagctggaacagctctcccgggcccgaagaagtggcggggaattatacattgactatgaggaggaagaaatggagaccgtagaacagagcacgcagaggataaaggagttccggcaacttacagcagacatgcaagccctggagcagaagatccaggacagcagctgtgaggcctcctcagagctcagggagaatggagagtgccggtctgtggctgtgggtgccgaggagaacatgaacgacatcgtcgtgtaccacagaggctccaggtcctgtaaggatgcagctgtagggacacttgttgagatgagaaattgtggggtcagcgtgacagaggccatgcttggagtgatgactgaagctgacaaagaaattgagctgcaacagcagaccatagaatccttgaaggaaaagatctatcgcctagaagtacagcttagagaaaccacccatgaccgggagatgactaaactgaaacaagagctgcaggctgctggatcgaggaaaaaggttgacaaagccacgatggcccagccgcttgttttcagtaaggtggtggaggcagtggtgcagaccagagaccaaatggtcggcagtcacatggacctggtggacacgtgtgttgggacctccgtggaaacaaacagtgtaggcatctcctgccagcctgaatgtaagaataaagtcgtagggcctgagctgcctatgaattggtggattgttaaggagagggtggaaatgcatgaccgatgtgctgggaggtctgtggaaatgtgtgacaagagtgtgagtgtggaagtcagcgtctgcgaaacaggcagcaacacagaggagtctgtgaacgacctcacactcctcaagacaaacttgaatctcaaagaagtgcggtctatcggttgtggagattgttctgttgacgtgaccgtctgctctccaaaggagtgcgcctcccggggcgtgaacactgaggctgttagccaggtggaagctgccgtcatggcagtgcctcgtactgcagaccaggacactagcacagatttggaacaggtgcaccagttcaccaacaccgagacggccaccctcatagagtcctgcaccaacacttgtctaagcactttggacaagcagaccagcacccagactgtggagacgcggacagtagctgtaggagaaggccgtgtcaaggacatcaactcctccaccaagacgcggtccattggtgttggaacgttgctttctggccattctgggtttgacaggccatcagctgtgaagaccaaagagtcaggtgtggggcagataaatattaacgacaactatctggttggtctcaaaatgaggactatagcttgtgggccaccacagttgactgtggggctgacagccagcagaaggagcgtgggggttggggatgaccctgtaggggaatctctggagaacccccagcctcaagctccacttggaatgatgactggcctggatcactacattgagcgtatccagaagctgctggcagaacagcagacactgctggctgagaactacagtgaactggcagaagctttcggggaacctcactcacagatgggctccctcaactctcagctcatcagcaccctgtcgtctatcaactctgtcatgaaatctgcaagcactgaagagctgaggaaccctgacttccagaaaaccagtctgggtaaaatcacaggcaattatttgggatatacctgtaagtgtgggggccttcagtcaggaagtcccttaagctcccagacatcccagcctgagcaagaagtggggacctcagaaggaaagccaatcagcagcctggatgccttccccactcaggaaggtacgctgtctccagtgaacctgacagacgaccagatcgccgctggcctctatgcatgtacaaacaatgaaagtacactgaagtccatcatgaagaagaaagatggtaacaaagattcaaatggcgcaaaaaagaatcttcagtttgttggcattaatggagggtatgaaacaacttcaagtgatgattccagctcagatgaaagctcttcttccgagtcagatgacgagtgtgatgtcattgagtatcctcttgaagaagaggaggaggaggaggatgaagacactcggggaatggcagaagggcaccatgcagttaatattgaaggtttgaagtctgccagggtggaagatgaaatgcaggttcaagaatgtgaacctgagaaggtggaaatcagagagaggtatgaattaagtgaaaagatgttgtctgcatgcaacttactgaaaaatactataaatgaccccaaagctttgaccagcaaagatatgaggttctgtctgaacaccctccagcacgagtggttccgcgtgtccagtcagaagtcagccattccagccatggtgggggactacatagctgcttttgaggccatttccccagatgtcctccgctatgtcatcaacttggcagacggcaacggcaacacagccctccattacagcgtgtcccactccaacttcgagattgtgaagctgctgttagatgccgatgtgtgtaatgtggatcaccagaacaaggcaggctacacccccatcatgttggcggccctcgccgctgtggaagcagagaaggacatgcggattgtggaagaactcttcggctgtggggatgtgaatgccaaagctagtcaggcgggacagacggccctcatgctggcggtcagtcacggacggatagacatggtgaagggccttctggcctgtggggctgatgtcaacatccaggatgacgagggctccacggccctcatgtgtgccagcgagcacggacacgtggagattgtcaagctgctgctggcccagcccggctgcaacggtcacctagaggacaacgatggcagcactgcgctctcaatcgccctggaagcaggacacaaggacatcgctgttcttctgtatgcccatgtcaactttgcaaaagcccagtctccgggcacccctaggcttggaaggaagacgtctcctggccccacccaccgaggttcatttgattgattgtatgcaaatagccctttatttacatgccactattaagctgctaattgttcctgttggggtgacagatactgaatgtatacgtattgtgcctgagctcaccagcaaacagaagcatcaagcccaggggtaaaggctgaagctttcacagtgcagagactgctagcctgggcacacacacctcctttctggccgtcttctgtgtagggcacactttaacccagtctctgttgctgttgagtctctgctccgttttgtacagtcacagggaattctgatctgaaggggcaccttctgttcactcccacaaagtggtgtctggttctcactgagacgttttaagatttttccacaaatatttatatgtactaaatgtggaaccattagaaagttcttccaaaatctcattccagcatagttttggatttttcttttgtcttattttaaaataaggaagtcgagatgactttgatcattggtaacttgggcctgggccagacaaagtataaaacttacaaaagaatattctcatttggtcttaactaggtagatgtaatatatgactttttataaaaagggtatctatatgaacttgacacagtattttcagcttttgtattccatactaaagccatgaagaactacacgtaacatcatcatttgtattaattgcacaactccaatgctaaaggttggattgtgttagaggaatcggctctgtatttgcctctagagaaacacagtgttctctttgtatttatggattcctttttaccgtgtcacatttactttggtcctctatgtatttaaatgtttgaagtgccttagactcttgccatattttcaaaataaaattccattaagctctttt

SEQ ID NO: 10334 - DNA, 5162 bp, Homo sapiens
  source 1..5162: mol_type = unassigned DNA
gcgggacccagggaaggcagcggccggagcgcgcaaggtgttgaaagacagagaagcgaagacagagacgtggaaagacagggagagagacacggagagagacgcagaaggacagagacgtggagagagacgcagagagacagagacgtggagagacacagagagacgtggagagacacagagagacttggagagagacaaagcaagacaggacgggagaacaaggacaagctcaggtaagcctcagccggtgctgcaggcagtctgactcgcagtccctcaagtgacttccaaggagcatctgtagaaaagaagatggcccaggtcctgcacgtgcctgctcccttcccagggacccctggcccagcctccccacctgccttccctgccaaggaccccgatccaccctactccgtggagaccccctatggctaccgcctggacctggacttcctcaagtacgtggatgacatcgagaagggccacacgctgcgacgcgtggcagtgcagcgccgcccccgcctgagctcgctgccccgtggccctggctcctggtggacgtccactgagtcgctgtgctccaatgccagtggggacagccgccactcagcctattcctactgcggccgtggcttctaccctcagtatggtgctctggagacccgcggtggcttcaatccgcgggtggagcgcacgctgctggatgcccgtcgccgtctcgaggaccaggcggccacacccaccggcctgggctccctgacccccagtgcggccggctcgacagcctccctggtgggcgtggggttgccacccccgacaccacggagttcaggactgtccacaccggtgcctcccagtgccgggcacctggcccacgtgcgggagcagatggcgggtgccctgcggaagctgcggcagctggaggagcaggtgaagctgatccctgtgctccaggtgaagctctcggtgctccaggaggaaaagcggcagctcacagtacaacttaagagccagaagttcctgggccaccccacagcgggccggggtcgcagcgagctctgcctggacctccccgatcccccagaggacccagtggcactggagacccggagtgtgggcacctgggttcgagaacgggacttgggcatgcctgatggggaggctgccctcgccgccaaggtcgctgtgctggagacccagctcaagaaggcgctgcaggagctgcaggcagctcaggcccggcaggctgacccccagccccaggcctggccaccgccggacagcccggtccgcgtggatacagtccgggtggtagaagggccacgggaggtggaggtggtggccagcacagccgctggcgcccccgcacagcgggcccagagcctggagccttacggcacagggctgagggccctggcaatgcctggtaggcctgagagcccacctgtgttccgcagccaggaggtggtggagacaatgtgcccagtgcccgctgcagctaccagcaacgtccatatggtgaagaagattagcatcacagagcgaagctgcgatggagcagcaggcctcccagaagttcctgccgaatcgtcttcgtcacccccggggtccgaggtagcctcccttacacagcctgagaagagcacaggccgagtgcccacccaggagcccacccacagggagcccaccaggcaagcagcctcccaagagtccgaggaggccgggggcaccggcgggcccccggcaggcgtgcgatctatcatgaaacggaaagaggaggttgcagaccccacggcccaccggaggagcctccagttcgtgggggtcaacggcgggtatgagtcgtcatccgaggactccagcacagcagagaacatctcagacaacgacagcacagagaacgaggccccagagccgagggagagggttccgagtgtggccgaagccccccagctcaggcctgcagggacggcagcggccaagaccagccggcaggagtgtcagctgtctcgagaatctcagcacatacccactgctgagggggcatcaggatcaaacacggaggaggagatcaggatggagctaagccctgacctcatctcagcctgcttggccctggaaaagtacctggacaatcccaacgccctcacagagcgggagctgaaagtggcctacaccacagtgctgcaggagtggctgcgcctggcctgccgcagcgacgcacaccccgagctggtgcggcggcacctggtcacgttccgggccatgtctgcgcggctgctggactacgtggtcaacatcgccgacagcaacggcaacacagccctgcactactccgtgtctcatgccaacttccccgtggtgcagcagctgctcgacagcggtgtctgcaaggtggacaaacagaaccgtgctggctacagccctattatgctcaccgccctggccaccctgaagacccaggacgacatcgagactgtccttcagctcttccggcttggcaacatcaatgccaaagccagccaggcaggacagacggccctgatgctggccgtcagccacgggcgggtggacgttgtcaaagccctgctggcctgtgaggcagatgtcaacgtgcaagatgatgacggctccacggccctcatgtgcgcctgtgagcacggccacaaggagatcgcggggctgctgctggccgtgcccagctgtgacatctcactcacagatcgcgatgggagcacagctctgatggtggccttggacgcagggcagagtgagattgcgtccatgctgtattcccgcatgaacatcaagtgctcgtttgccccaatgtcagatgacgagagccctacatcatcctcggcagaagagtagccgtgagggaggcggggaccagccagaccgggagcaaaccgtcccttgtccccgtctcctccctgttcccgttcctccctggcccaccccactcacactccccaaggcccacggctcaaaggcaagcgagctctccctctgcttccctgggggagccccgacggccacaggactccagctccaagtgggttttcttggctcccctgttcaaagtggccacagcgcagaccgaagcaaaattcttgtatacattggcgccagggctgatgctggggtgtgggttttatgaagaacattgagaacaatcagctggtaattatggatggaggaagagggagaggaaaaaaatattgtatttttgaatcattgttgcaggagggggtgggaatcttaggatttgttgccagatttgaaagtcactggaacttgcatattttcattttaatcctaagtgttattacgcaccagttggggttcacccttcatcccccacatttaattgtctgatatagaatagtgttgtgtccactgccccgctagacggctttcttaggggaattttcttctggttgtttcacaagacagattctgtccttgtcacccgggacagaaaactcagtcttttcaccctcattcagatgaagggactcaggacaggctctgtgacttacagggacccaatcaattcacaatgagaaattaccggccaggcgtggtgactcacgtctgtaatcccagcactttgggagggcaaggcaagagcttgagcttgagcctagacgttaaagaccagcctgggcaacacagcaagacccatctctacaagaaatttaaaaactagccaggcgtggtggtgcgcgcctgtagtcccagctacttgggaggctgagccctggaggtcgaggctacagtgagctatgatcacaccattgcacttcagcctgggcgacacagcgagaccctgtctcaagaaagaaaagaaaaagagacaaattacccagaaacccctcccttccccacatggaggccttggcaaatgttaattttcctagaaaatccttcagacctgaagacgcaggaaaagaatctggctctcagggtggcttctgcgtccccgccgccaggccccagactatggtcacagggccgtcctgttcctccccgggactccagaatttctctcctcaaaggaaagaaaacagggcatgcgcttgttggcaaaacgcagggccggctcccaaaaaccccatgtgtgtacgattaaaagttggccgtccccaggcctcccagcgcaaacttcaagagacagggctttgctgaaaaccaaacatgggccagctgggctttttaacaacctagagactttccggagctgcctggaacagagcctgcgggaaacggggcttgccagagacactcacagtttccttcatggcctgttttggtcccctaagaatctccacatcattgtctttcttgtgccttttccttggtgagcaacagaaagggaagggttccaagcctctaaaaatgtgctttgtgatcaggagtgcgctccaaaccaaatacgcgcgctgccctttcgaggccagtgagctcagcctccaaggctttaaagccacatttcagcaagagaaagcgctgagagctcgcaggttcattaaagaaggcaaagcactggtttctctccttagaaaagtaggtttcttggcttgatgtagactggcttgctttgatttttagtgaagggaatgtacgtaaaacaaaatagggcttggctggtcaaaggagacaagcaggatggatggatggatggatggatggatggatggatggatggatggatgaatagatagatggtgtttgcatgtaaattgcagagaaaacaaaaccaaagctgattggaaacaattaattgtgggtgtctgagggggaaggtcgcagctttgggcagctttgagaagcggtacaagagttctgtgcctgtgtgtccagccctggagccagccagtgcatttattttaagctcttagaagcaactccttggcccaggaatgcgtgacccctgagatgggtccacgcatctctctacacttccttctctccgtgggatactggactcgtgcctctgcgcccattctcttctcacgcatatccatgagctttaatttcactttctgatcacggtacgtccataaagccagtattacacttaaatgaagtattcttttttgtaatcgttttttttagaaggtaaacaaatttaataaagctaccaataatgttgatga

SEQ ID NO: 10335 - DNA, 2952 bp, Homo sapiens
  source 1..2952: mol_type = unassigned DNA
ggaaaagtacctggacaatcccaacgccctcacagagcgggagctgaaagtggcctacaccacagtgctgcaggagtggctgcgcctggcctgccgcagcgacgcacaccccgagctggtgcggcggcacctggtcacgttccgggccatgtctgcgcggctgctggactacgtggtcaacatcgccgacagcaacggcaacacagccctgcactactccgtgtctcatgccaacttccccgtggtgcagcagctgctcgacagcggtgtctgcaaggtggacaaacagaaccgtgctggctacagccctattatgctcaccgccctggccaccctgaagacccaggacgacatcgagactgtccttcagctcttccggcttggcaacatcaatgccaaagccagccaggcaggacagacggccctgatgctggccgtcagccacgggcgggtggacgttgtcaaagccctgctggcctgtgaggcagatgtcaacgtgcaagatgatgacggctccacggccctcatgtgcgcctgtgagcacggccacaaggagatcgcggggctgctgctggccgtgcccagctgtgacatctcactcacagatcgctttgccccaatgtcagatgacgagagccctacatcatcctcggcagaagagtagccgtgagggaggcggggaccagccagaccgggagcaaaccgtcccttgtccccgtctcctccctgttcccgttcctccctggcccaccccactcacactccccaaggcccacggctcaaaggcaagcgagctctccctctgcttccctgggggagccccgacggccacaggactccagctccaagtgggttttcttggctcccctgttcaaagtggccacagcgcagaccgaagcaaaattcttgtatacattggcgccagggctgatgctggggtgtgggttttatgaagaacattgagaacaatcagctggtaattatggatggaggaagagggagaggaaaaaaatattgtatttttgaatcattgttgcaggagggggtgggaatcttaggatttgttgccagatttgaaagtcactggaacttgcatattttcattttaatcctaagtgttattacgcaccagttggggttcacccttcatcccccacatttaattgtctgatatagaatagtgttgtgtccactgccccgctagacggctttcttaggggaattttcttctggttgtttcacaagacagattctgtccttgtcacccgggacagaaaactcagtcttttcaccctcattcagatgaagggactcaggacaggctctgtgacttacagggacccaatcaattcacaatgagaaattaccggccaggcgtggtgactcacgtctgtaatcccagcactttgggagggcaaggcaagagcttgagcttgagcctagacgttaaagaccagcctgggcaacacagcaagacccatctctacaagaaatttaaaaactagccaggcgtggtggtgcgcgcctgtagtcccagctacttgggaggctgagccctggaggtcgaggctacagtgagctatgatcacaccattgcacttcagcctgggcgacacagcgagaccctgtctcaagaaagaaaagaaaaagagacaaattacccagaaacccctcccttccccacatggaggccttggcaaatgttaattttcctagaaaatccttcagacctgaagacgcaggaaaagaatctggctctcagggtggcttctgcgtccccgccgccaggccccagactatggtcacagggccgtcctgttcctccccgggactccagaatttctctcctcaaaggaaagaaaacagggcatgcgcttgttggcaaaacgcagggccggctcccaaaaaccccatgtgtgtacgattaaaagttggccgtccccaggcctcccagcgcaaacttcaagagacagggctttgctgaaaaccaaacatgggccagctgggctttttaacaacctagagactttccggagctgcctggaacagagcctgcgggaaacggggcttgccagagacactcacagtttccttcatggcctgttttggtcccctaagaatctccacatcattgtctttcttgtgccttttccttggtgagcaacagaaagggaagggttccaagcctctaaaaatgtgctttgtgatcaggagtgcgctccaaaccaaatacgcgcgctgccctttcgaggccagtgagctcagcctccaaggctttaaagccacatttcagcaagagaaagcgctgagagctcgcaggttcattaaagaaggcaaagcactggtttctctccttagaaaagtaggtttcttggcttgatgtagactggcttgctttgatttttagtgaagggaatgtacgtaaaacaaaatagggcttggctggtcaaaggagacaagcaggatggatggatggatggatggatggatggatggatggatggatggatgaatagatagatggtgtttgcatgtaaattgcagagaaaacaaaaccaaagctgattggaaacaattaattgtgggtgtctgagggggaaggtcgcagctttgggcagctttgagaagcggtacaagagttctgtgcctgtgtgtccagccctggagccagccagtgcatttattttaagctcttagaagcaactccttggcccaggaatgcgtgacccctgagatgggtccacgcatctctctacacttccttctctccgtgggatactggactcgtgcctctgcgcccattctcttctcacgcatatccatgagctttaatttcactttctgatcacggtacgtccataaagccagtattacacttaaatgaagtattcttttttgtaatcgttttttttagaaggtaaacaaatttaataaagctaccaataatgttga

SEQ ID NO: 10336 - DNA, 672 bp, Homo sapiens
  source 1..672: mol_type = unassigned DNA
attactcccctggtgacgggagggttgtttgagattcaggaggagatcagcaagttgagggtacatttcaccatcagagcaggacagacggccctgatgctggccgtcagccacgggcgggtggacgttgtcaaagccctgctggcctgtgaggcagatgtcaacgtgcaagatgatgacggctccacggccctcatgtgcgcctgtgagcacggccacaaggagatcgcggggctgctgctggccgtgcccagctgtgacatctcactcacagatcgcgatgggagcacagctctgatggtggccttggacgcagggcagagtgagattgcgtccatgctgtattcccgcatgaacatcaagtgctcgtttgccccaatgtcagatgacgagagccctacatcatcctcggcagaagagtagccgtgagggaggcggggaccagccagaccgggagcaaaccgtcccttgtccccgtctcctccctgttcccgttcctccctggcccaccccactcacactccccaaggcccacggctcaaaggcaagcgagctctccctctgcttccctgggggagccccgacggccacaggactccagctccaagtgggttttcttggctcccctgttcaaagtggccacagcgcagaccgaagcaaaattcttgtata

SEQ ID NO: 10337 - DNA, 3048 bp, Homo sapiens
  source 1..3048: mol_type = unassigned DNA
gcggcgcgcgcgaagacgctcgggcggcgggacccagggaaggcagcggccggagcgcgcaaggggtgagcctccaggcaaatggaaaacggaatttcctgcaattggtgaccatgtgttccaggtgttgaaagacagagaagcgaagacagagacgtggaaagacagggagagagacacggagagagacgcagaaggacagagacgtggagagagacgcagagagacagagacgtggagagacacagagagacgtggagagacacagagagacttggagagagacaaagcaagacaggacgggagaacaaggacaagctcaggtgcccctggagccccagccctgccttcatgcccagcaggtgccctacctggcccatcctcccaaggtaagcctcagccggtgctgcaggcagtctgactcgcagtccctcaagtgacttccaaggagcatctgtagaaaagaagatggcccaggtcctgcacgtgcctgctcccttcccagggacccctggcccagcctccccacctgccttccctgccaaggaccccgatccaccctactccgtggagaccccctatggctaccgcctggacctggacttcctcaagtacgtggatgacatcgagaagggccacacgctgcgacgcgtggcagtgcagcgccgcccccgcctgagctcgctgccccgtggccctggctcctggtggacgtccactgagtcgctgtgctccaatgccagtggggacagccgccactcagcctattcctactgcggccgtggcttctaccctcagtatggtgctctggagacccgcggtggcttcaatccgcgggtggagcgcacgctgctggatgcccgtcgccgtctcgaggaccaggcggccacacccaccggcctgggctccctgacccccagtgcggccggctcgacagcctccctggtgggcgtggggttgccacccccgacaccacggagttcaggactgtccacaccggtgcctcccagtgccgggcacctggcccacgtgcgggagcagatggcgggtgccctgcggaagctgcggcagctggaggagcaggtgaagctgatccctgtgctccaggtgaagctctcggtgctccaggaggaaaagcggcagctcacagtacaacttaagagccagaagttcctgggccaccccacagcgggccggggtcgcagcgagctctgcctggacctccccgatcccccagaggacccagtggcactggagacccggagtgtgggcacctgggttcgagaacgggacttgggcatgcctgatggggaggctgccctcgccgccaaggtcgctgtgctggagacccagctcaagaaggcgctgcaggagctgcaggcagctcaggcccggcaggctgacccccagccccaggcctggccaccgccggacagcccggtccgcgtggatacagtccgggtggtagaagggccacgggaggtggaggtggtggccagcacagccgctggcgcccccgcacagcgggcccagagcctggagccttacggcacagggctgagggccctggcaatgcctggtaggcctgagagcccacctgtgttccgcagccaggaggtggtggagacaatgtgcccagtgcccgctgcagctaccagcaacgtccatatggtgaagaagattagcatcacagagcgaagctgcgatggagcagcaggcctcccagaagttcctgccgaatcgtcttcgtcacccccggggtccgaggtagcctcccttacacagcctgagaagagcacaggccgagtgcccacccaggagcccacccacagggagcccaccaggcaagcagcctcccaagagtccgaggaggccgggggcaccgcacctccgctgtcctcccctccaggcgggcccccggcaggcgtgcgatctatcatgaaacggaaagaggaggttgcagaccccacggcccaccggaggagcctccagttcgtgggggtcaacggcgggtatgagtcgtcatccgaggactccagcacagcagagaacatctcagacaacgacagcacagagaacgaggccccagagccgagggagagggttccgagtgtggccgaagccccccagctcaggcctgcagggacggcagcggccaagaccagccggcaggagtgtcagctgtctcgagaatctcagcacatacccactgctgagggggcatcaggatcaaacacggaggaggagatcaggatggagctaagccctgacctcatctcagcctgcttggccctggaaaagtacctggacaatcccaacgccctcacagagcgggagctgaaagtggcctacaccacagtgctgcaggagtggctgcgcctggcctgccgcagcgacgcacaccccgagctggtgcggcggcacctggtcacgttccgggccatgtctgcgcggctgctggactacgtggtcaacatcgccgacagcaacggcaacacagccctgcactactccgtgtctcatgccaacttccccgtggtgcagcagctgctcgacagcggtgtctgcaaggtggacaaacagaaccgtgctggctacagccctattatgctcaccgccctggccaccctgaagacccaggacgacatcgagactgtccttcagctcttccggcttggcaacatcaatgccaaagccagccaggcaggacagacggccctgatgctggccgtcagccacgggcgggtggacgttgtcaaagccctgctggcctgtgaggcagatgtcaacgtgcaagatgatgacggctccacggccctcatgtgcgcctgtgagcacggccacaaggagatcgcggggctgctgctggccgtgcccagctgtgacatctcactcacagatcgcgatgggagcacagctctgatggtggccttggacgcagggcagagtgagattgcgtccatgctgtattcccgcatgaacatcaagtgctcgtttgccccaatgtcagatgacgagagccctacatcatcctcggcagaagagtag

SEQ ID NO: 10338 - DNA, 2703 bp, Homo sapiens
  source 1..2703: mol_type = unassigned DNA
atggcccaggtcctgcacgtgcctgctcccttcccagggacccctggcccagcctccccacctgccttccctgccaaggaccccgatccaccctactccgtggagaccccctatggctaccgcctggacctggacttcctcaagtacgtggatgacatcgagaagggccacacgctgcgacgcgtggcagtgcagcgccgcccccgcctgagctcgctgccccgtggccctggctcctggtggacgtccactgagtcgctgtgctccaatgccagtggggacagccgccactcagcctattcctactgcggccgtggcttctaccctcagtatggtgctctggagacccgcggtggcttcaatccgcgggtggagcgcacgctgctggatgcccgtcgccgtctcgaggaccaggcggccacacccaccggcctgggctccctgacccccagtgcggccggctcgacagcctccctggtgggcgtggggttgccacccccgacaccacggagttcaggactgtccacaccggtgcctcccagtgccgggcacctggcccacgtgcgggagcagatggcgggtgccctgcggaagctgcggcagctggaggagcaggtgaagctgatccctgtgctccaggtgaagctctcggtgctccaggaggaaaagcggcagctcacagtacaacttaagagccagaagttcctgggccaccccacagcgggccggggtcgcagcgagctctgcctggacctccccgatcccccagaggacccagtggcactggagacccggagtgtgggcacctgggttcgagaacgggacttgggcatgcctgatggggaggctgccctcgccgccaaggtcgctgtgctggagacccagctcaagaaggcgctgcaggagctgcaggcagctcaggcccggcaggctgacccccagccccaggcctggccaccgccggacagcccggtccgcgtggatacagtccgggtggtagaagggccacgggaggtggaggtggtggccagcacagccgctggcgcccccgcacagcgggcccagagcctggagccttacggcacagggctgagggccctggcaatgcctggtaggcctgagagcccacctgtgttccgcagccaggaggtggtggagacaatgtgcccagtgcccgctgcagctaccagcaacgtccatatggtgaagaagattagcatcacagagcgaagctgcgatggagcagcaggcctcccagaagttcctgccgaatcgtcttcgtcacccccggggtccgaggtagcctcccttacacagcctgagaagagcacaggccgagtgcccacccaggagcccacccacagggagcccaccaggcaagcagcctcccaagagtccgaggaggccgggggcaccggcgggcccccggcaggcgtgcgatctatcatgaaacggaaagaggaggttgcagaccccacggcccaccggaggagcctccagttcgtgggggtcaacggcgggtatgagtcgtcatccgaggactccagcacagcagagaacatctcagacaacgacagcacagagaacgaggccccagagccgagggagagggttccgagtgtggccgaagccccccagctcaggcctgcagggacggcagcggccaagaccagccggcaggagtgtcagctgtctcgagaatctcagcacatacccactgctgagggggcatcaggatcaaacacggaggaggagatcaggatggagctaagccctgacctcatctcagcctgcttggccctggaaaagtacctggacaatcccaacgccctcacagagcgggagctgaaagtggcctacaccacagtgctgcaggagtggctgcgcctggcctgccgcagcgacgcacaccccgagctggtgcggcggcacctggtcacgttccgggccatgtctgcgcggctgctggactacgtggtcaacatcgccgacagcaacggcaacacagccctgcactactccgtgtctcatgccaacttccccgtggtgcagcagctgctcgacagcggtgtctgcaaggtggacaaacagaaccgtgctggctacagccctattatgctcaccgccctggccaccctgaagacccaggacgacatcgagactgtccttcagctcttccggcttggcaacatcaatgccaaagccagccaggcaggacagacggccctgatgctggccgtcagccacgggcgggtggacgttgtcaaagccctgctggcctgtgaggcagatgtcaacgtgcaagatgatgacggctccacggccctcatgtgcgcctgtgagcacggccacaaggagatcgcggggctgctgctggccgtgcccagctgtgacatctcactcacagatcgcgatgggagcacagctctgatggtggccttggacgcagggcagagtgagattgcgtccatgctgtattcccgcatgaacatcaagtgctcggtgagtctcaatccggccgggtaggcacgggatgggtgggtctctgaaaggacagagatttgttgtttttgtttttgaggcagagtctcactctgtcgcccagggtggagtgcggtggcacgatctgggctcattgcaacctccgcctcccggcttcaagccattctgctgcctcagcctcctgagtagctgggataacag

SEQ ID NO: 10339 - DNA, 1812 bp, Homo sapiens
  source 1..1812: mol_type = unassigned DNA
agtgggaggaccctgcctcggggacttagggaggaaggaaggacgaggccggacaccccggcgcgcacacacacctgctgtccaggtaagcctcagccggtgctgcaggcagtctgactcgcagtccctcaagtgacttccaaggagcatctgtagaaaagaagatggcccaggtcctgcacgtgcctgctcccttcccagggacccctggcccagcctccccacctgccttccctgccaaggaccccgatccaccctactccgtggagaccccctatggctaccgcctggacctggacttcctcaagtacgtggatgacatcgagaagggccacacgctgcgacgcgtggcagtgcagcgccgcccccgcctgagctcgctgccccgtggccctggctcctggtggacgtccactgagtcgctgtgctccaatgccagtggggacagccgccactcagcctattcctactgcggccgtggcttctaccctcagtatggtgctctggagacccgcggtggcttcaatccgcgggtggagcgcacgctgctggatgcccgtcgccgtctcgaggaccaggcggccacacccaccggcctgggctccctgacccccagtgcggccggctcgacagcctccctggtgggcgtggggttgccacccccgacaccacggagttcaggactgtccacaccggtgcctcccagtgccgggcacctggcccacgtgcgggagcagatggcgggtgccctgcggaagctgcggcagctggaggagcaggtgaagctgatccctgtgctccaggtgaagctctcggtgctccaggaggaaaagcggcagctcacagtacaacttaagagccagaagttcctgggccaccccacagcgggccggggtcgcagcgagctctgcctggacctccccgatcccccagaggacccagtggcactggagacccggagtgtgggcacctgggttcgagaacgggacttgggcatgcctgatggggaggctgccctcgccgccaaggtcgctgtgctggagacccagctcaagaaggcgctgcaggagctgcaggcagctcaggcccggcaggctgacccccagccccaggcctggccaccgccggacagcccggtccgcgtggatacagtccgggtggtagaagggccacgggaggtggaggtggtggccagcacagccgctggcgcccccgcacagcgggcccagagcctggagccttacggcacagggctgagggccctggcaatgcctggtaggcctgagagcccacctgtgttccgcagccaggaggtggtggagacaatgtgcccagtgcccgctgcagctaccagcaacgtccatatggtgaagaagattagcatcacagagcgaagctgcgatggagcagcaggtaagcggtcgcaggcaggcaggggagaatggcttggggggggggggcctctttcttcccatggctcatcctggactctcagaacgccagggtccaggcagggtgcggtggcgcatgcctgtaatcccagcactttgggaggccgaggcgggcagatcacttgaggtcaggagttggagaccagcctggccaacatggtgaaacccatctctactaaaaatacaaaaattagccaggtgtggtggcgtgcgcctgtaaacctcagctacccaggaggctgaggcaggagaatcgcttgaactagggaagcggaggttgcagtgagctgagattacaccactgcactccagcctgggcaacagagggagactctgtctcaaaaaaaaaaaaaaaaaaaaa

SEQ ID NO: 10340 - DNA, 624 bp, Homo sapiens
  source 1..624: mol_type = unassigned DNA
gagacacagagagacttggagagagacaaagcaagacaggacgggagaacaaggacaagctcaggtgaagctctcggtgctccaggaggaaaagcggcagctcacagtacaacttaagagccagaagttcctgggccaccccacagcgggccggggtcgcagcgagctctgcctggacctccccgatcccccagaggacccagtggcactggagacccggagtgtgggcacctgggttcgagaacgggacttgggcatgcctgatggggaggctgccctcgccgccaaggtcgctgtgctggagacccagctcaagaaggcgctgcaggagctgcaggcagctcaggcccggcaggctgacccccagccccaggcctggccaccgccggacagcccggtccgcgtggatacagtccgggtggtagaagggccacgggaggtggaggtggtggccagcacagccgctggcgcccccgcacagcgggcccagagcctggagccttacggcacagggctgagggccctggcaatgcctggtaggcctgagagcccacctgtgttccgcagccaggaggtggtggagacaatgtgcccagtgcccgctgcagctaccagcaacgtcca

SEQ ID NO: 10341 - DNA, 923 bp, Homo sapiens
  source 1..923: mol_type = unassigned DNA
agagaaaattgtttccataaaggggaaaggcttcactcctagctgcctccccaactttccctaccccttccccccgacccagtccaggcctgacccagctctcagctttggggtcactgggggtccccttcgccatgctttgcctctctttgtccccctgcgtctctgtctcctcagatccttgcaggaagacgaggttcccttcttccccaaccccttagcgcctcaacccccatccttccgtgtggccagctccgggcctgggctgaggggagggggtgcaggaagggtggggcctgttgggcttggggccccccagccccagggctatgtggaggctgggctatgggaacagctggagcctgtccagggcctggacagatgtgcaagcaggcagtgaggtaagcctcagccggtgctgcaggcagtctgactcgcagtccctcaagtgacttccaaggagcatctgtagaaaagaagatggcccaggtcctgcacgtgcctgctcccttcccagggacccctggcccagcctccccacctgccttccctgccaaggaccccgatccaccctactccgtggagaccccctatggctaccgcctggacctggacttcctcaagtacgtggatgacatcgagaagggccacacgctgcgacgcgtggcagtgcagcgccgcccccgcctgagctcgctgccccgtggccctggctcctggtggacgtccactgagtcgctgtgctccaatgccagtggggacagccgccactcagcctattcctactgcggccgtggcttctaccctcagtatggtgctctggagacccgcggtggcttcaatccgcgggtggagcgcacgctgctggatgcccgtcgccgtctcgaggaccaggcggccacacccaccggcctgggctccct

SEQ ID NO: 10342 - DNA, 542 bp, Homo sapiens
  source 1..542: mol_type = unassigned DNA
tgcggcgcgcgcgaagacgctcgggcggcgggacccagggaaggcagcggccggagcgcgcaaggtgttgaaagacagagaagcgaagacagagacgtggaaagacagggagagagacacggagagagacgcagaaggacagagacgtggagagagacgcagagagacagagacgtggagagacacagagagacgtggagagacacagagagacttggagagagacaaagcaagacaggacgggagaacaaggacaagctcaggtgcccctggagccccagccctgccttcatgcccagcaggtgccctacctggcccatcctcccaaggtaagcctcagccggtgctgcaggcagtctgactcgcagtccctcaagtgacttccaaggagcatctgtagaaaagaagatggcccaggtcctgcacgtgcctgctcccttcccagggacccctggcccagcctccccacctgccttccctgccaaggaccccgatccaccctactccgtggagaccccctatggctaccgcctggacctgga

SEQ ID NO: 10343 - DNA, 576 bp, Homo sapiens
  source 1..576: mol_type = unassigned DNA
gctcgggcggcgggacccagggaaggcagcggccggagcgcgcaagaattagctaggcgtggtggcaggtgcctgtaatcccagctactcaggaggctgaggcaggagaatcgcttgaacctgggaggcagaggttgccgtgagctgagatcgcgccattgcactccagcctgggcgacaagagcaaaactccgtctcagaaaaaaaaaaaaaaaagagttgatgtgttgaaagacagagaagcgaagacagagacgtggaaagacagggagagagacacggagagagacgcagaaggacagagacgtggagagagacgcagagagacagagacgtggagagacacagagagacgtggagagacacagagagacttggagagagacaaagcaagacaggacgggagaacaaggacaagctcaggtgcccctggagccccagccctgccttcatgcccagcaggtgccctacctggcccatcctcccaaggtaagcctcagccggtgctgcaggcagtctgactcgcagtccctcaagtgacttccaaggagcatctgtagaaaagaagatggccca

SEQ ID NO: 10344 - DNA, 417 bp, Homo sapiens
  source 1..417: mol_type = unassigned DNA
agaattagctaggcgtggtggcaggtgcctgtaatcccagctactcaggaggctgaggcaggagaatcgcttgaacctgggaggcagaggttgccgtgagctgagatcgcgccattgcactccagcctgggcgacaagagcaaaactccgtctcagaaaaaaaaaaaaaaaagagttgatgtgttgaaagacagagaagcgaagacagagacgtggaaagacagggagagagacacggagagagacgcagaaggacagagacgtggagagagacgcagagagacagagacgtggagagacacagagagacgtggagagacacagagagacttggagagagacaaagcaagacaggacgggagaacaaggacaagctcaggtaagcctcagccggtgctgcaggcagtctgactcgca

SEQ ID NO: 10345 - DNA, 437 bp, Homo sapiens
  source 1..437: mol_type = unassigned DNA
aattagctaggcgtggtggcaggtgcctgtaatcccagctactcaggaggctgaggcaggagaatcgcttgaacctgggaggcagaggttgccgtgagctgagatcgcgccattgcactccagcctgggcgacaagagcaaaactccgtctcagaaaaaaaaaaaaaaaagagttgatgggtgagcctccaggcaaatggaaaacggaatttcctgcaattggtgaccatgtgttccaggtgttgaaagacagagaagcgaagacagagacgtggaaagacagggagagagacacggagagagacgcagaaggacagagacgtggagagagacgcagagagacagagacgtggagagacacagagagacgtggagagacacagagagacttggagagagacaaagcaagacaggacgggagaacaaggacaagctca

SEQ ID NO: 10346 - DNA, 1126 bp, Homo sapiens
  source 1..1126: mol_type = unassigned DNA
cccgctctcccctgtctctgtcccactttctgcctctgttcctccccggctctgccctctccccgcactgtcccccctcgccctcctccgcggccatgccccagacggcgggaaggcggccgggcgtccggccgggctgggcctgggcttggcggctgggccggcgtggggagcggcagctgtttgccattagcccgggatcccacaggccccgccccctctctgcacggggcggggtccttctcgcctccccccaccccgagtttggggcgggaagacccccccccaccaccaccaccgacctccgcgatgtgcaggccggtcttgggtggtgggttggggagacccgcgccccttccctgcgctccctacctgtcccctcttataggctccagtctctccatctctgtcttatcctgtcaccccttccccattccccaggggtcccatggcgagagaagggtctcagccacagacatccatctcccccaccacaccccctcgtctcctttctcttccccttactcgggacgtgctggtcctcatcgagggcggtgagatgactgagtaccctcagacctcagtctccgtatctgggaaacgggtagagatatctgatgtggagtctgagggtggtggcttggtgggcagtggggggatccaccaggcttaggttcatgttcaggcccagccacttccccatggccccagtgaccccgaggaagccactgtacctttctgtaccctctgcatcccctgtctgtgaaacggggcgataagtgcccatctcatagaattgtcatgacaattaaaagagttgatgttaggctgggtgcagtggctcatgcctgtaatcccagcactttgggaggccaaggcgggcggatcacctgaggtcaggagttcgagaccagcctgaccaacatggagaaacaccatctctactaaaaatacagaattagctaggcgtggtggcaggtgcctgtaatcccagctactcaggaggctgaggcaggagaatcgcttgaacctgggaggcagaggttgccgtgagctgagatcgcgccattgcactccagcctgggcgacaagagcaaaactccgtctcagaaaaaaaaaaaaaaaa

SEQ ID NO: 10347 - DNA, 2080 bp, Homo sapiens
  source 1..2080: mol_type = unassigned DNA
ggcaagctggagggagctgcagggacagaggccaaagctgtctttccttgtgtaagggaggaactcttgctggccggggaacctcttggaattggtcttttttggggtttcagaggcaaagcttgaacaccatcagtcaagagtggttccgcgtctccagccggaagtcgtctagccccgccgtggtggcctcctacctccacgaggtccagcctcactccccacacttcctgaaactgcttgtcaacttggccgatcacaacgggaacacggcccttcactacagcgtgtcccactccaacttctccatcgtgaagctgctgctggagacaggcgtctgcaatgtggaccatcagaacaaagctggctacactgccgtaatgatcactcccttggcttccgcagagaccaatgaagacatggctgttgtctggaagctcttaagagaaggaaatgtgaacattcaagctactcagggaggccagactgcgctgatgctgggagtcagccacgacagggaggacatggttcaagcgctgcttagctgccaggcagatgtcaatctgcaggaccacgatggatcctcggccctcatggtggcctgtcaccatggcaacgtggacctggtgcggctgctcctggcacacccagcctgcgacagcagcctgactgacaaggctggccgcacagctttgtccatcgctctgaagtcacccacccatatggaaattgctgggcttctgagagcccacgcggagcagggcaggtccctggggctgtaggggctgcagaagaactggccgtggggaacaaaagccttcttctctggactcctccctcgcccttgaagagggcagaggtcacaggccagagagccacccttctagagaagaaactatgtcaaatatgcacatacattcctgttgtataattctgctcattaggatgctttgtagtttttgccttaggccaagcctgaaaactacacgggcttcagagcagggttcaaggtgcaaggtgaggggtacgtcggtgtcatccaaacatccaaaacatcttcagccttgaattcctcatgactctaccctctgtaacattgtgtagcaagcaggcaggcaggagcacattagcacattagaaaagcaatactttttacatggaattttacagtgcactatctttctgttttttaagcaagtgtatacaaatatgtcccattgatatgcatgtctatagatgggaggggatttaagccaaccccctggcaagcattctgtaggggaccctagaagaatcaccgtgcagactggtgaaactgaacaagcaccatttgggagctttgtttcgatggggttgacagagaaatcttaaaatctgacagggtagaagaagcactttggcatcaatgccatatgtacagtcttgactatttctgagtcatctagtggctccaatttgctccagggaaattggaattaattaagaaatttattatctagtaagttgctatgtaataaagaaaaaaaagaaattcaatccaatgacacacaccacatgtatttgggcagagtcagattctctcagctattttgagtctgtggaagaaacaaaaaaaagcttcctcctgaggatgggttattgtcatcaagaagccacctgcatagccgtatccattacctcatggtaattcccggtgctttcccctcatatcccctagaagcaaatatctgttctgaggttttttgggacttctggctgcaataggagcaagggacccaggcagggcagagcaataccttccgaagcttccatattccctggggccagcacatgcaaggtttatatggtcagtagctcacgtgaagtcatctgaatctttcttaaatctgctctcttaaaatctcttatgcaaaaaaaaaaaaaaaaagccccttatataaaaagaagtaatgtcaaagtttgatgagctttacattggaaactcaaaagcttgcactctcattttggctcagatgccaatttgctgggtgcccctgtggtgagtcatgaaacctccttgggccgcaatttcatcatctct

SEQ ID NO: 10348 - DNA, 4665 bp, Homo sapiens
  source 1..4665: mol_type = unassigned DNA
tcgggcgctgttggcagctggcgacgcggggcgaagccgcggctggcggcgcctggccagtcccgcatccgccgcggtgggtgtgcccgcaggggtgcgccggggccagggccgagaccgtcggccagagggcgcctggagggtgtgcgcgccgcggacgaccagggtgcgccagccccggggtgcgcgcctgggacgcggacagtgcacccggaggttgcgtgcgctccgaagccggggtgtgcgcctagctgccccggccccgtgcaccgcgggccgcctcgcgcaggacttccgcagctcgccaagaaccttcaacaagttttacagactcattggatgaagagtgcctgagacactgagggtcagcgctccaaagatggagaagacagatgccaaagaccagtcctctcagggggatgaagagaaagaccctccgaagagccacccttattctgtggagaccccatatggctttcatttagacctggacttcctcaagtatgtggatgacatcgagaagggaaacactatcaaaagaattcctatccacagaagggccaagcaggccaaatttagcactctgccccgaaacttcagccttcctgacagtggggctcgcccccctgcagccccgcccctccaaaactggtctcccgtggtgccaagggaggcatcacttgggacacaggagcaaaaccagtcaccaccgcttggtaatgccccccaggcctcaacaagcaggagtgaggtgagctaccacaggaaggctctgttggcagaggccaccagacagttggaagctgctgagccagaggatgccgagctcacttttgggagtggacggccccagctcttgagagcatccagcatgcctgccacgctgctgcacagcagggcttctgaggagccaggcctgagcctggggccccctgcccctcctgccctccctccccttcagggtgaaggcagtgtctgtgatggcacctttgaacctgcagaaggattggcaggtttccacagctccagcccacgagcatcaactcggattccagagctggtccaggagggagctgagcctccagagggtgtggtgaaggttccaaatcacctccctctcccaggccctcctttctcattccagaatgtgcttgtagttctagaggacaaggaagatgaacacaatgccagagaagcagaggtgttgttcacccctggctcccctacgccaagcccgccacctctgccatcacccatccctgagaatgagctcctcctggaagaaatcgagctcaacatcagcgagattccacccccgccacctgtagaggtggacatgagaagcattggcatcagggtaactgaggaaagcctgggccttgccagggtggatccaggcagcatctccagcctgaaacagcaggtctcggccctggagggagagttgtctggaagaaccgaggaactggcacaggtcagaactgctctccagcagcaggaagaggaaatcaaagctagggagcaaagaattcgagagctggagttcactgtagcccaactggaaggacagtttcaccaagagaacgccaaagacactcagggccagacggacgtgatggtgaacactgaccctgtccatggactcttgaccagggagtcgtgtgataagggcattgaagtcaaccttctaggcagcatggagtctgaaagctgggggcaccgaggagaggagaatggcctcctatgggggccagatggtcataaacaagggaatcagagcccagcagaacgtgtgcttctgccccagctgtcactgccacagggacccgagcaggtccttacctcctctgtacatagcttcctctccactgaactcaggattgaagaagcaggcactgaacaggaaggaggccctcagggaggaaccaggggagcaggaggctttctgtggggcagcgacagaaagactcccccagcagggagggaggagaccagttccaatctcccagggaaggagcacccgggaaggccaccaagctcgccaacggatgccactattgggcagtatgtgaagaagatccaggagctcctgcaggagcagtggaactgcctggagcatgggtacccggagctggccagcgccatcaagcagccagcctccaagctcagcagcatccagagccagctgctgagctccctcaacctgctgctgtcggcctactcggcccaggctcacccacccaaggagccaccggcctcctcctcctccccgccagtggagatctccccatcgaccagccttaaatccataatgaaaaagaaagactatggcttccgtgcaggaggtaatgggaccaaaaagaaccttcagtttgttggggttaacggtgggtatgagaccacctcaagtgaggagaccagcggtgaggacagcaccccagaggacttgtctgacagcgaggcagagaagaagtgtgacggcccagatcacaagcatgtcaaagatgcccatctcacctgcgaggctgggcagggcatccctgagggcacctgccatgctgcccaggaaagtgggcctggggaagaagtcccccactccaaggccgagagatataaaccctcagaagaatttcttaatgcatgccgggcactgagccagcatctgccagaaactgggaccaccacagaccagctcttgaggcaaagcttgaacaccatcagtcaagagtggttccgcgtctccagccggaagtcgtctagccccgccgtggtggcctcctacctccacgaggtccagcctcactccccacacttcctgaaactgcttgtcaacttggccgatcacaacgggaacacggcccttcactacagcgtgtcccactccaacttctccatcgtgaagctgctgctggagacaggcgtctgcaatgtggaccatcagaacaaagctggctacactgccgtaatgatcactcccttggcttccgcagagaccaatgaagacatggctgttgtctggaagctcttaagagaaggaaatgtgaacattcaagctactcagggaggccagactgcgctgatgctgggagtcagccacgacagggaggacatggttcaagcgctgcttagctgccaggcagatgtcaatctgcaggaccacgatggatcctcggccctcatggtggcctgtcaccatggcaacgtggacctggtgcggctgctcctggcacacccagcctgcgacagcagcctgactgacaaggctggccgcacagctttgtccatcgctctgaagtcacccacccatatggaaattgctgggcttctgagagcccacgcggagcagggcaggtccctggggctgtaggggctgcagaagaactggccgtggggaacaaaagccttcttctctggactcctccctcgcccttgaagagggcagaggtcacaggccagagagccacccttctagagaagaaactatgtcaaatatgcacatacattcctgttgtataattctgctcattaggatgctttgtagtttttgccttaggccaagcctgaaaactacacgggcttcagagcagggttcaaggtgcaaggtgaggggtacgtcggtgtcatccaaacatccaaaacatcttcagccttgaattcctcatgactctaccctctgtaacattgtgtagcaagcaggcaggcaggagcacattagcacattagaaaagcaatactttttacatggaattttacagtgcactatctttctgttttttaagcaagtgtatacaaatatgtcccattgatatgcatgtctatagatgggaggggatttaagccaaccccctggcaagcattctgtaggggaccctagaagaatcaccgtgcagactggtgaaactgaacaagcaccatttgggagctttgtttcgatggggttgacagagaaatcttaaaatctgacagggtagaagaagcactttggcatcaatgccatatgtacagtcttgactatttctgagtcatctagtggctccaatttgctccagggaaattggaattaattaagaaatttattatctagtaagttgctatgtaataaagaaaaaaaagaaattcaatccaatgacacacaccacatgtatttgggcagagtcagattctctcagctattttgagtctgtggaagaaacaaaaaaaagcttcctcctgaggatgggttattgtcatcaagaagccacctgcatagccgtatccattacctcatggtaattcccggtgctttcccctcatatcccctagaagcaaatatctgttctgaggttttttgggacttctggctgcaataggagcaagggacccaggcagggcagagcaataccttccgaagcttccatattccctggggccagcacatgcaaggtttatatggtcagtagctcacgtgaagtcatctgaatctttcttaaatctgctctcttaaaatctcttatgcaaaaaaaaaaaaaaaaagccccttatataaaaagaagtaatgtcaaagtttgatgagctttacattggaaactcaaaagcttgcactctcattttggctcagatgccaatttgctgggtgcccctgtggtgagtcatgaaacctccttgggccgcaatttcatcatctct

SEQ ID NO: 10349 - DNA, 3023 bp, Homo sapiens
  source 1..3023: mol_type = unassigned DNA
aaaaaagattttagtacttccaggaacccagtggaataaaaactgatgtgtgtgacagtggaggctcgggacctctactcttgcctttgctctaaggttgggtctgactatgggcccactgcctacagctgtatggatagcacagggcacaaagatgccagccagggagggcaaatgagagttgaaagccagcccacactccatttgccaagccttgcgctgcagcaccacatccacccagagggggctgttctcatttgcattgtgcaaaggcagtgtctggggccaagaatggccctgctgcgtggactccagacctcttcctgggcttttgcattcctgtgttcctctctggttcttgcatagtagaggttttctctggcctggttttggaggagcattatattgatatctggtatagttcactgaatattttctctgcgtgcatgtgtgtgtgtacgtgcatgtgtgtgtgtacaggggcaggagattaagtgctgctcacatatggaaatgggcccttcggctgagcagcacttcctgttgtaacagatcaaaccctcttcactgtcgggtaaagtggaaccacgttttgctttgcagggcagcatgcgagtctgcttcctgccacaaatcacaatttgactgctttctcattgtttcagtgctagttctagccttccccgttgggagccgcctcctgtcctgttgagcacattgcaagatctgtgtccttgctcgtgtatctactgtgagcacggtgtcatcaccacccccacaaccctagtgtcagtatgcacttgtgagccaggaaggaccactgaggtgcccttgagcagaagtgggtgctagaccatgagtccagaggcctacgttctgctcctacactcccattcactgagcaagtctgggcctcagatttcccagctgtaagacagggacaacaatggcacctacgccacatggttcttcatccacacttagaggggcattgttaacagagacagttctcccaacattgagcagaaagcaaggctcctccaagaggtccccaaaacattgatttacatgatctggttccctgtccctccttacctctccacacacctgcaacccttgtcccctcaaagcaatatcctggttttgctacattcccatgcatccccaagatcattctaacctgtgatgttgtgtctgcctagagatctccccatcgaccagccttaaatccataatgaaaaagaaagactatggcttccgtgcaggaggtaatgggaccaaaaagaaccttcagtttgttggggttaacggtgggtatgagaccacctcaagtgaggagaccagcggtgaggacagcaccccagaggacttgtctgacagcgaggcagagaagaagtgtgacggcccagatcacaagcatgtcaaagatgcccatctcacctgcgaggctgggcagggcatccctgagggcacctgccatgctgcccaggaaagtgggcctggggaagaagtcccccactccaaggccgagagatataaaccctcagaagaatttcttaatgcatgccgggcactgagccagcatctgccagaaactgggaccaccacagaccagctcttgaggcaaagcttgaacaccatcagtcaagagtggttccgcgtctccagccggaagtcgtctagccccgccgtggtggcctcctacctccacgaggtccagcctcactccccacacttcctgaaactgcttgtcaacttggccgatcacaacgggaacacggcccttcactacagcgtgtcccactccaacttctccatcgtgaagctgctgctggagacaggcgtctgcaatgtggaccatcagaacaaagctggctacactgccgtaatgatcactcccttggcttccgcagagaccaatgaagacatggctgttgtctggaagctcttaagagaaggaaatgtgaacattcaagctactcagggaggccagactgcgctgatgctgggagtcagccacgacagggaggacatggttcaagcgctgcttagctgccaggcagatgtcaatctgcaggaccacgatggatcctcggccctcatggtggcctgtcaccatggcaacgtggacctggtgcggctgctcctggcacacccagcctgcgacagcagcctgactgacaaggctggccgcacagctttgtccatcgctctgaagtcacccacccatatggaaattgctgggcttctgagagcccacgcggagcagggcaggtccctggggctgtaggggctgcagaagaactggccgtggggaacaaaagccttcttctctggactcctccctcgcccttgaagagggcagaggtcacaggccagagagccacccttctagagaagaaactatgtcaaatatgcacatacattcctgttgtataattctgctcattaggatgctttgtagtttttgccttaggccaagcctgaaaactacacgggcttcagagcagggttcaaggtgcaaggtgaggggtacgtcggtgtcatccaaacatccaaaacatcttcagccttgaattcctcatgactctaccctctgtaacattgtgtagcaagcaggcaggcaggagcacattagcacattagaaaagcaatactttttacatggaattttacagtgcactatctttctgttttttaagcaagtgtatacaaatatgtcccattgatatgcatgtctatagatgggaggggatttaagccaaccccctggcaagcattctgtaggggaccctagaagaatcaccgtgcagactggtgaaactgaacaagcaccatttgggagctttgtttcgatggggttgacagagaaatcttaaaatctgacagggtagaagaagcactttggcatcaatgccatatgtacagtcttgactatttctgagtcatctagtggctccaatttgctccagggaaattggaattaattaagaaatttattatctagtaagttgctatgtaat

SEQ ID NO: 10350 - DNA, 2103 bp, Homo sapiens
  source 1..2103: mol_type = unassigned DNA
gagaccgtcggccagagggcgcctggagggtgtgcgcgccgcggacgaccagggtgcgccagccccggggtgcgcgcctgggacgcggacagtgcacccggaggttgcgtgcgctccgaagccggggtgtgcgcctagctgccccggccccgtgcaccgcgggccgcctcgcgcaggacttccgcagctcgccaagaaccttcaacaagttttacagactcattggatgaagagtgcctgagacactgagggtcagcgctccaaagatggagaagacagatgagatctccccatcgaccagccttaaatccataatgaaaaagaaagactatggcttccgtgcaggaggtaatgggaccaaaaagaaccttcagtttgttggggttaacggtgggtatgagaccacctcaagtgaggagaccagcggtgaggacagcaccccagaggacttgtctgacagcgaggcagagaagaagtgtgacggcccagatcacaagcatgtcaaagatgcccatctcacctgcgaggctgggcagggcatccctgagggcacctgccatgctgcccaggaaagtgggcctggggaagaagtcccccactccaaggccgagagatataaaccctcagaagaatttcttaatgcatgccgggcactgagccagcatctgccagaaactgggaccaccacagaccagctcttgaggcaaagcttgaacaccatcagtcaagagtggttccgcgtctccagccggaagtcgtctagccccgccgtggtggcctcctacctccacgaggtccagcctcactccccacacttcctgaaactgcttgtcaacttggccgatcacaacgggaacacggcccttcactacagcgtgtcccactccaacttctccatcgtgaagctgctgctggagacaggcgtctgcaatgtggaccatcagaacaaagctggctacactgccgtaatgatcactcccttggcttccgcagagaccaatgaagacatggctgttgtctggaagctcttaagagaaggaaatgtgaacattcaagctactcagggaggccagactgcgctgatgctgggagtcagccacgacagggaggacatggttcaagcgctgcttagctgccaggcagatgtcaatctgcaggaccacgatggatcctcggccctcatggtggcctgtcaccatggcaacgtggacctggtgcggctgctcctggcacacccagcctgcgacagcagcctgactgacaaggctggccgcacagctttgtccatcgctctgaagtcacccacccatatggaaattgctgggcttctgagagcccacgcggagcagggcaggtccctggggctgtaggggctgcagaagaactggccgtggggaacaaaagccttcttctctggactcctccctcgcccttgaagagggcagaggtcacaggccagagagccacccttctagagaagaaactatgtcaaatatgcacatacattcctgttgtataattctgctcattaggatgctttgtagtttttgccttaggccaagcctgaaaactacacgggcttcagagcagggttcaaggtgcaaggtgaggggtacgtcggtgtcatccaaacatccaaaacatcttcagccttgaattcctcatgactctaccctctgtaacattgtgtagcaagcaggcaggcaggagcacattagcacattagaaaagcaatactttttacatggaattttacagtgcactatctttctgttttttaagcaagtgtatacaaatatgtcccattgatatgcatgtctatagatgggaggggatttaagccaaccccctggcaagcattctgtaggggaccctagaagaatcaccgtgcagactggtgaaactgaacaagcaccatttgggagctttgtttcgatggggttgacagagaaatcttaaaatctgacagggtagaagaagcactttggcatcaatgccatatgtacagtcttgactatttctgagtcatctagtggctccaatttgctccagggaaattggaattaattaagaaatttattatctagtaagttgctatgtaat

SEQ ID NO: 10351 - DNA, 7997 bp, Homo sapiens
  source 1..7997: mol_type = unassigned DNA
cttgcagcgcccagaaatggaccgagcggacccgccgccgcacgcaccctgctccactccaagctcctaagggctcctggcgcgccgcgtagccttggcgaggtccgcgctggggtgcggagagcgaagggaactggagagccatgtagatccaggctctcgcccgcccgcctccttcgggatcgaatcaagggctcccatagtgttaggagggggcgagagtgctgtttatcgtcatttgcctcggagcttcgagagagggtggtattttgcttttccgccccgcatcctccggaactccctgcaccggagagaggacggcgtctccaggttgctggcaaccggtgagaatgggggtagggaaggaacattttcgccgtagctgctccgtaaagcgattgtccaactgagaggggcgtcggacgagtggaccagggcggcgagtttgcccggcgcgtctcggatgctgctgcggcggccgccgcggctcccgccagggcactgcaaagacgacctgccgcattcccactcgggctctccgctgactcagcaccgcccctgcgccaagccagccggccagcgtgcatcgatcgccctggtgggagcttagaaggcggcaggcgaagaggggtaggaggggggagagccgaggagaagcagagagggtggcaggcgtggggatctgccgagccggcactgcaccgggtcctaggaaggctctcggaggggaggggaggccagggcgacccccgaagcaatggcccagtccgctagaacggcactgcgttaaggcacctgggatcaggaagaaatatctaaacaacaacaacagaaaaccaacaaacccccaaacccaaacccaaccctctgcaaaaagctgcacccggcccgcaggcgagggggattccaaactgagtgaaaggcagggtggaggggaaggcagcgagaggcaaagtcgcagatctcccgacctgctcgtgttgaagcacctccccctgggcgtgagggagacgcgcgctccggtgggggggccgcttgggtcccccccacccctggtccctggctgcttcccaccccgggctctctcctggcctcccacccccgcgcccggcttccaccatgacggtgatgtctggggagaacgtggacgaggcttcggccgccccgggccacccccaggatggcagctacccccggcaggccgaccacgacgaccacgagtgctgcgagcgcgtggtgatcaacatctccgggctgcgcttcgagacgcagctcaagaccctggcgcagttccccaacacgctgctgggcaaccctaagaaacgcatgcgctacttcgaccccctgaggaacgagtacttcttcgaccgcaaccggcccagcttcgacgccatcctctactactaccagtccggcggccgcctgcggaggccggtcaacgtgcccctggacatgttctccgaggagatcaagttttacgagttgggcgaggaggccatggagaagttccgggaggacgagggcttcatcaaggaggaggagcgccctctgcccgagaaggagtaccagcgccaggtgtggctgctcttcgagtaccccgagagctcggggcccgccagggtcatcgccatcgtctccgtcatggtcatcctcatctccatcgtcatcttttgcctggagacgctccccgagctgaaggatgacaaggacttcacgggcaccgtccaccgcatcgacaacaccacggtcatctacaattccaacatcttcacagaccccttcttcatcgtggaaacgctgtgtatcatctggttctccttcgagctggtggtgcgcttcttcgcctgccccagcaagacggacttcttcaaaaacatcatgaacttcatagacattgtggccatcattccttatttcatcacgctgggcaccgagatagctgagcaggaaggaaaccagaagggcgagcaggccacctccctggccatcctcagggtcatccgcttggtaagggtttttagaatcttcaagctctcccgccactctaagggcctccagatcctgggccagaccctcaaagctagtatgagagagctagggctgctcatctttttcctcttcatcggggtcatcctgttttctagtgcagtgtactttgccgaggcggaagaagctgagtcgcacttctccagtatccccgatgctttctggtgggcggtggtgtccatgaccactgtaggatacggtgacatgtaccctgtgacaattggaggcaagatcgtgggctccttgtgtgccatcgctggtgtgctaacaattgccctgcccgtacctgtcattgtgtccaatttcaactatttctaccaccgagaaactgagggggaagagcaggctcagttgctccacgtcagttcccctaacttagcctctgacagtgacctcagtcgccgcagttcctctactatgagcaagtctgagtacatggagatcgaagaggatatgaataatagcatagcccattatagacaggtcaatatcagaactgccaattgcaccactgctaaccaaaactgcgttaataagagcaagctactgaccgatgtttaaaaaacaaaggcaagcaaacaaaaaagccccacttagcagctcaaaagacttaaaaaacaaaacagaaaacctagtgactcatgtcacgctttgtagatactttactaagtagacttggaatgctctatttaactgtcaatgcgttgttgcattgaggattttgggggtggtgaaccagaagctttcaagatccatgacaaaataaactattttccttttattaaaaaatgggaaaagagagagtattttctaaaactggcttaaaaagattcagtccacgaactagtctaggtaaaataataatcatatgcttccccaaactgaaacatttttaatgctttggtttctttaacttttttaaaaactcagaacaagatgatcacttagaaatatgaaattgaaattcgcatgggactccagtaaaacatctttgcaaactgcgtagcacattgaagacagtgcatcagatgtattatatgtaacatgatagaccagccaaaatggacaatgaatagatatttttatttcgatcaactgaactgcatattacaaggtgaaaaaagaaaactccgattacttaagactggttcacaaagcaccttataaattggatactggtcctgatctgtagggatttccccctgggcccattctctttctaatccagattattctctaagaaaaagttaactgaattaaattaattgattcttctgcagtgccgctaaatggtctcaactgcagatgagccaaatacaggtcttttctcaccaggcctgcactccgacccctggctttcagaactggatgtaaaaccttagcctccttattgcaagagagcacaaatgaagttaaatgtaagcatgtttgaatctgatacaatttattttataatcgcatgctgagaagttaacccagacaataggggataagcttaagttgaaatcgattcttctaaaaatagatcctttttcatttgcattcaccaaaagtgcactcctccatttattaactattttattagtaaataaagtactgtatttaagtgcatatgttagtcagatgggaacaataactttttggagctcaaagcatgttctcttattcagcattatggcctatttgactaagatgtaccttgaattaattaatgcatgatttcagtaataaaaattttaaaagtaataaaaattacaagtctgtggggtgaaaggcccaatagaaattatggggggtgggggtgggggcactcagtcaattttcctgcctttgctcagggaaataccaggtttttgtgcaggtataggcggagagaggaccaatatgcccatcccttaaagggaagccatgtgaaaaactcaataagtcatcaaagtacatatagcaacacctaagaacaagtattctttctagctgaagacaaacacaagcaacacaaacaagcaaacaaacaaacaaacaaaaaggtgcaatactgcatgttttttggtgcattcttaggatgtaaatgaaaatgtttctctattatatgcatccgaagcagagctgatttttttttctttgcagtcattctttgaagtctgtagagacttcagccctccccttgaggctccctgaagaaactaaaccaattgatttaatagttgcttagtgcctttatcctgtacccacagtgaactgtagaaagtgcctccttaacacagctgagaagttaggtagcaaaagtggggaagggttggggcacagaccttttgctttttctttttccattctcgctctctcatttcaccactgtgagaagaccacaccaccctaaaccctggagaggagagacccaggagggtgctgtctctctggccatctactagcattggtccctttgacagcctgacgctggatgtgaactgagacccatctttgaactggacatgaactgtgaacttgttttttcctctctccaccaaagccaagataaactttttgggaatttgtttcctatcgagggccactttggacacacaaggcttcctcaggtccagtgtagtgctcctggcacctttccttatttttttctctgtcggtaacagcactttgcaaatctctctgacggtccagtcttttcaggcattgttgtggatgtgggaacactcagttcataataacctttcctaggccttccctcctggtctacccctttcagatatttcctgatgcccctatgatcttcccacctggcagtcacttcacaggttgaacatctaacttctgctgcccccccgttacccagcccagagaatggtggggaccctgttcctggctgaaagagagccacggaacacaggcctctggagctcggcagctgcccaccggtggagaggtactcacagcctttcaaaggaccctgaggtggggaatcttcattctgcacttagcatgtggctgcctgttacctgacattctggcccagcttcttctgaaaatctgtcctgcttctcccacccctttcccccatcctgtcctagaactagcagtgaggcaatcaccctagaaactcgagttacacccattctggctaactcgattaaaagaaagaacatggatatcttattttcctatgtgacttttgtgaatctgtgagatgaacacaacacacatcgtggaagatgaggggccaagaactgcgcagcatccgactacagggcattaaaccctcccatgtgatgtctccttctcgtctgaaccttaactcattctggcgattcctttcctacttgcttaaaaatccccaattaggaaaaaaatgccaacctcctcccaggcttggggttatcttgatctttcatttcaacgttgaggtctagtgcacacagaacttgaaacaccgcactctgtcaacagcaataatccactcagtactgtgggatggatgggttaatggatgagaaaacggcaccaagactgactttgggtatttggtatatttaccgtggttacactctggactggttgattcttctgcatgtgatatagaaaaaagtgctgcatgcggtgaacctgtcagtctgggactgggggtgagttgttgttatgagtttggggtggtgtgaggaaagtgaatgctgcttagctcatctgtagctcattgcaatgaattcagtaagaatggagtacagggattatctgtgtagcataggcatgcaatgtttgaccaagctcttaccctcgcactgtaatgtgttgaaatgtctttgtagacctgaaggtgcacttaacaaaactgcctattaagggatgactattttttggtttacttattcatatttattttagcagcctttttaccttttcttccccttcctaggcatggagctgtaacagctcatgtcctgactatgtgttttctccagaaggagaagacttctgatgtgctgatagctataattcctctcttccagtctattggggccctagttcaatagggtggcaatagaagagttggtcacaccagggctgttagccatcccagaatctctgaagtggttaactcacctgaagtgatctgaatcagagagaccaaagacattcatttcctctgtcctcagatttctagaagacaaattctagccaggaaaactttctgtttttgcatctcccttttcccatttgtgcccaactccccttgcactccctggagacttgagttctgattttcagttatatcagctcattgggagtgtgttcgtgggtgagccttgcagaatcagataaaccaatagcaagtccttctccaggattctggccagtgggcagtcatttccctgaaatgaattgtagggcaggtttagattccactatggtggacgtgaagcacaggtggtgtcacaatcttgatttgcttgagaattaaaaaaatacatgtaaatggtaaatgaggaatacatttttttaaagtagaaatttggtttagcctataaaaggccttcttcacattgtgtatagttacacgtttttcaaattaggtaccatctaaaagtcaataaaaatagtttcctagccctctcatttaatataggagacctcaaaacacatgctttttaacaattttacattttaattcttagtttggtagattggattgaaagaaaggagaaagaacattagcagaaggcactttcccattttcttccaggaatgacttattcctggggtggtgagaattggtgggtggtaaccatccatagtataaaattgttagaaagaatataaactgccaaacaagcatgttatcttcaggcttttccaagcaagaatgaagtcttttgatgtttatgttcattttaagaagacaaacaaactaaaattttaagaccagacacaacccaagttgaattgtgatctcaggaggtgaactctcattcaccatgtggcatattactacctgtatttatatcatggaatttcagggtatatgtgaacatgtctagtatgactcaggtaaacctttaaagaatgtatgttacttaccatttttgtaaagaagcaaacaggagctgaattgttaaccaaaactgttccattaccttgggtcactgtgcaaactaattcagggtacagatataaagtttagaagccttgggattaaatgccagcctctttgctcaggcaaaatgaccctgggctttcttgggaagtccagcatgtatgtaaggggtgaggccctgctgacctcagggcttttcgctttaaggagattaaccctagtcacagtgattttcatttaggagctaactaggagtttactctttatgacgtgaaacttcaaagagtatagaaaacttttgtaccacaatcaaagaagaagaaatggtgtatggaaagaaaacaaaacaaaacaagaaatctcttgtaaaatattccaggtcaaagttgtctcctctccaaaccttgcagaagcacctttcttctcttcagcgcactgttttgggactgtttatgcagcagatgtaagtagacaacatggactccatgtgacatgcctctaatagtaaagataaagtattactgaggttaaaaataaaaattgagtagtattaatttaaagtgcaccatcaggacaacaaaccatttaagctgaaaaaacgctattttatttcttgagtttgccagttgcttccaccttgagttaaggacgtgtctcatcttcacctactgcgcattctcccttctctaactgtgtaatatgtcaggtcaaggacattgaatgttatgaattgagaacctaattgatgcgcatagttttcatctatgcaattttacttgcttctgtcactttacgatctgttcatatttggcatcaattaaagatactttttaaggatcttatcaaggaa

SEQ ID NO: 10352 - DNA, 506 bp, Homo sapiens
  source 1..506: mol_type = unassigned DNA
cggccgccgcggctcccgccagggcactgcaaagacgacctgccgcattcccactcgggctctccgctgactcagcaccgcccctgcgccaagccagccggccaggtcaaagttgtctcctctccaaaccttgcagaagcacctttcttctcttcagcgcactgttttgggactgtttatgcagcagatgtaagtagacaacatggactccatgtgacatgcctctaatagtaaagataaagtattactgaggttaaaaataaaaattgagtagtattaatttaaagtgcaccatcaggacaacaaaccatttaagctgaaaaaacgctattttatttcttgagtttgccagttgcttccaccttgagttaaggacgtgtctcatcttcacctactgcgcattctcccttctctaactgtgtaatatgtcaggtcaaggacattgaatgttatgaattgagaacctaattgatgcgcatagttttcatctatgcaattttacttgc

SEQ ID NO: 10353 - DNA, 2618 bp, Homo sapiens
  source 1..2618: mol_type = unassigned DNA
ctggcgcagttccccaacacgctgctgggcaaccctaagaaacgcatgcgctacttcgaccccctgaggaacgagtacttcttcgaccgcaaccggcccagcttcgacgccatcctctactactaccagtccggcggccgcctgcggaggccggtcaacgtgcccctggacatgttctccgaggagatcaagttttacgagttgggcgaggaggccatggagaagttccgggaggacgagggcttcatcaaggaggaggagcgccctctgcccgagaaggagtaccagcgccaggtgtggctgctcttcgagtaccccgagagctcggggcccgccagggtcatcgccatcgtctccgtcatggtcatcctcatctccatcgtcatcttttgcctggagacgctccccgagctgaaggatgacaaggacttcacgggcaccgtccaccgcatcgacaacaccacggtcatctacaattccaacatcttcacagaccccttcttcatcgtggaaacgctgtgtatcatctggttctccttcgagctggtggtgcgcttcttcgcctgccccagcaagacggacttcttcaaaaacatcatgaacttcatagacattgtggccatcattccttatttcatcacgctgggcaccgagatagctgagcaggaaggaaaccagaagggcgagcaggccacctccctggccatcctcagggtcatccgcttggtaagggtttttagaatcttcaagctctcccgccactctaagggcctccagatcctgggccagaccctcaaagctagtatgagagagctagggctgctcatctttttcctcttcatcggggtcatcctgttttctagtgcagtgtactttgccgaggcggaagaagctgagtcgcacttctccagtatccccgatgctttctggtgggcggtggtgtccatgaccactgtaggatacggtgacatgtaccctgtgacaattggaggcaagatcgtgggctccttgtgtgccatcgctggtgtgctaacaattgccctgcccgtacctgtcattgtgtccaatttcaactatttctaccaccgagaaactgagggggaagagcaggctcagttgctccacgtcagttcccctaacttagcctctgacagtgacctcagtcgccgcagttcctctactatgagcaagtctgagtacatggagatcgaagaggatatgaataatagcatagcccattatagacaggtcaatatcagaactgccaattgcaccactgctaaccaaaactgcgttaataagagcaagctactgaccgatgtttaaaaaacaaaggcaagcaaacaaaaaagccccacttagcagctcaaaagacttaaaaaacaaaacagaaaacctagtgactcatgtcacgctttgtagatactttactaagtagacttggaatgctctatttaactgtcaatgcgttgttgcattgaggattttgggggtggtgaaccagaagctttcaagatccatgacaaaataaactattttccttttattaaaaaatgggaaaagagagagtattttctaaaactggcttaaaaagattcagtccacgaactagtctaggtaaaataataatcatatgcttccccaaactgaaacatttttaatgctttggtttctttaacttttttaaaaactcagaacaagatgatcacttagaaatatgaaattgaaattcgcatgggactccagtaaaacatctttgcaaactgcgtagcacattgaagacagtgcatcagatgtattatatgtaacatgatagaccagccaaaatggacaatgaatagatatttttatttcgatcaactgaactgcatattacaaggtgaaaaaagaaaactccgattacttaagactggttcacaaagcaccttataaattggatactggtcctgatctgtagggatttccccctgggcccattctctttctaatccagattattctctaagaaaaagttaactgaattaaattaattgattcttctgcagtgccgctaaatggtctcaactgcagatgagccaaatacaggtcttttctcaccaggcctgcactccgacccctggctttcagaactggatgtaaaaccttagcctccttattgcaagagagcacaaatgaagttaaatgtcaaagttgtctcctctccaaaccttgcagaagcacctttcttctcttcagcgcactgttttgggactgtttatgcagcagatgtaagtagacaacatggactccatgtgacatgcctctaatagtaaagataaagtattactgaggttaaaaataaaaattgagtagtattaatttaaagtgcaccatcaggacaacaaaccatttaagctgaaaaaacgctattttatttcttgagtttgccagttgcttccaccttgagttaaggacgtgtctcatcttcacctactgcgcattctcccttctctaactgtgtaatatgtcaggtcaaggacattgaatgttatgaattgagaacctaattgatgcgcatagttttcatctatgcaattttacttgcttctgtcactttacgatctgttcatatttggcat

SEQ ID NO: 10354 - DNA, 578 bp, Homo sapiens
  source 1..578: mol_type = unassigned DNA
cgagatagctgagcaggaaggaaaccagaagggcgagcaggccacctccctggccatcctcagggtcatccgcttggcctgcactccgacccctggctttcagaactggatgtaaaaccttagcctccttattgcaagagagcacaaatgaagttaaatgtcaaagttgtctcctctccaaaccttgcagaagcacctttcttctcttcagcgcactgttttgggactgtttatgcagcagatgtaagtagacaacatggactccatgtgacatgcctctaatagtaaagataaagtattactgaggttaaaaataaaaattgagtagtattaatttaaagtgcaccatcaggacaacaaaccatttaagctgaaaaaacgctattttatttcttgagtttgccagttgcttccaccttgagttaaggacgtgtctcatcttcacctactgcgcattctcccttctctaactgtgtaatatgtcaggtcaaggacattgaatgttatgaattgagaacctaattgatgcgcatagttttcatctatgcaattttacttgcttctgtcactttacgatc

SEQ ID NO: 10355 - DNA, 4052 bp, Homo sapiens
  source 1..4052: mol_type = unassigned DNA
tgtgctccctgccgaggagatgtgagggattttctcttgggggagaaatcagtggtcgagcgcctgcccagctcaaatgccacccggctcagagggaggcctgcggcccagggatcccggagggagagcaacgtcacacctcctgaggacagccaggactccagcttttgctgagctttgcatcttgcctccttccttcaaaaggctccaggcccatgctcggctgtcttcaagtcccgcatgcccctggccaggcacctcaccgcccctccagcccagcccaatcctagagctcacctccaggacccagagtctgcccttctgcccagaatgactcaccattatttctagctcgagtgagaagacgtgatgaggagttgggctgcctgttggtgcatctcagattcctgcagcatctgatcagctctgcaaggaagagagcttcacgtctctggtcaggtggtcagaaaagatctccctgataaagtcactttgaacagaggtctgaaggatgtgaagaaggagccataaggatatctgaaagataggaggaaaataaaaaacaaaagactcaaaatactggcctgatgcagctctgatggaaaggaggacccctggccagagaggaagattcctaaggctcatcaaccaaccactgcagggagctttcagatttagaggagaagccccactccccctactaaacctctccaactggagctgacagtctttgccattggcctgtgaatgttcccttcctcctattggtcagcctggggccctgacccaccccacactccaaaattctgttaatttcatccagcattgttcaggtggctcctgtgcaccaggccgtgaggatacaaagatgactaagccttggccggcatcctggaggagctcacacggagagacctattaggactggcctgcactagcggtaggaatctggctggagctgaacgttcacactcttttggcagatggagatggagggttccaggccagaagggaacgcctgcagcgacagagctgagaagggagctcggattttatgtgaccacccccacctcctgggagaagccaaactacagaaacagagtcctggccttgccctgaggacaaagacccaaaatgtgcctgtacctaaagcaccctcccctttccaccataggactcaggggcgggagggagggagggggctgcctccaaccttgctcactgctccgttgttagaagagggatctacaaatgacggaggcaagggtttgccctgcatgactgctggactgtgtgggcatttttcattaccaggctccttcaagatgctgatgagaatacacccccataattacacccctccccatcttacagcttcctcagggatgggtctccccatccccatcctgtcactcttgacaggttgccatgtggtcagtgggtttctttgtgagggtcagagagggaggcctgggcctgctgagaggactgagctcccatctgccttcatcagactggaaactgagccattcagaacctcatccaatgtgtttttttccaacccagtttgattaaagtcagtatcacctgaaacccaagactaatgtatgtcgacaaggactcccaggtggccccctcggccaggacaactctccctccctgcagccctttggaaacaaactcaacaggcaggaggcgccattaccacggggccaggagccgggcccttgctgagtgagaccgagacgccactctggaaagtctcagggcatcaatatttcatgccgctggagctgtctttgtttttatgcaaattgctcaggctgccagatgggcaaaggctggcagcgtcatccatcaccaggctgttccctcgtcagcaacctcaccggctgccagggccctgcaggctggcctcagctgcggcccgtcctctcagtcggtctgcacagcgggacacagccccatcctagacactgtgggagacgcaggggaagccagagtccttgctccaggggactcacagatggacgactcataatgagataggaggcagctcgtcacttcagtgtgaatctgcatacctttcattttaacccacaaacctccacctgtgtggagggcatagcagggacatagcgagagtgggatgccataaatgactgaagtcaaggttgtaatggtccagcaacatttgcagaatcctgaaatggtgcacagaatcctgaaatggacaatcacctggaagcactgctgtagagggacttccgcattgagaggggactggagccaactactcccaacacctcctttccagaattccaagtctcagggttcctgtgcatgtccacctgttttctcctcaacaaaacaaaacaaaaaacttcccaagaacccaagagcatcctggtgggattctggaagattgggccaatccaagattctttgcagatgctggacatttaactctatcaaactggtaggagtcattccactcctacatatttgctcaaaggaaatgaaagcataaccccacacaaagactaaggcatgaatgttcacggcagctttccaaaaactgcaaccaacccaaaagtccagcagcaaatgaaaagataaacaacttgtgttatatccattcagtggaatactacacaacaataaaaaggaatgaactattgatacattcaacaacattaatgaatcataaaatatttcttctgaatgaaagatgaaaaaatggagtctggatgaggatacactgtttgaaactggcactgccccactacctccaacaccaccctgaccctcatcagccaccctcctatatgcaactttgagctggacactggggtgacgcaggtgggattgtaggggaatcctgtcctccaagaccaagcaggctgataggaaaagctctgcaaaacacagtcatgcatcctgaaaacttacaagagagctgaagagtgaaggctgatcccctggaagctggtgctccaaactgaggacaaaagtgagcatctacacaagcaggctagcagcacagggagacagagggctctctcagacactggccagggcaggctcctgggacaagaaagcgggactgattcacacctggaagataatcatcagggagcaccatctgcggtccaagaccccaaaggagaaaatggtgctccgaagacatgagatcaacacagagctggagtcccccacccacagccatccagctgccaagcagttcaggacaaggcccccaaatcatcatgcgaattactgtgaagctacatttctccagggctttaccatgtacagagccaggatttgaactcgggtggactgattctattctcagattccatcctgcctcccagccatcctactgctcaccgagccttgcagagcaggctggcacctggcatgcttggcagtgggtacatccttcctcattccacaactgaggaagcagcagctccgtgaaattaggccgtttgcaatggccacatactcctgagaggtagaatgggtactctaccagtgctgaccaaccagacttgagctcatcattcaacacatggcacctgaactgagaaaaggggtcatgggatggaaagagctctggacccctgacaattctgtggccctagcctacagctccccacaaggctcagctcctatatagggactccatggtctagtgggaaaggccctgggccagaaggccatggccaggtttaggtcaggactctgtagcactagttatgtgaccttaggaagtcactttgtccctgtgacttggtttccgcatctgcaaaacagagataacatctaacctcacgtgattattgtcatctagtgagataagtgaatgtggaatcactttgaaaagactacaacactacactgcaggatagccttgtcgcctgtaaaggaaacctctccaaggctgtgaccactacagattttgcctgaggttaagtcccttacttctctcccactcccacccccagcctgcctgggttcagtgttcttaaattgaaactgaagct

SEQ ID NO: 10356 - DNA, 1120 bp, Homo sapiens
  source 1..1120: mol_type = unassigned DNA
gaccaggccaatgctcctgtgcttcctggggccagtagcagcaccctgagctccctgccaccaggcagctgaaaggcatagcgtgaggtgcttctctcagtcccaattatgacagtggccaccggagacccagcagacgaggctgctgccctccctgggcacccacaggacacctatgacccagaggcagaccacgagtgctgtgagagggtggtgatcaacatctcagggctgcggtttgagacccagctaaagaccttagcccagtttccagagaccctcttaggggacccaaagaaacgaatgaggtactttgaccccctccgaaatgagtactttttcgatcggaaccgccctagctttgatgccattttgtactactaccagtcagggggccgattgaggcgacctgtgaatgtgcccttagatatattctctgaagaaattcggttttatgagctgggagaagaagcgatggagatgtttcgggaagatgaaggctacatcaaggaggaagagcgtcctctgcctgaaaatgagtttcagagacaagtgtggcttctctttgaatacccagagagctcagggcctgccaggattatagctattgtgtctgtcatggtgattctgatctcaattgtcagcttctgtctggaaacattgcccatcttccgggatgagaatgaagacatgcatggtagtggggtgaccttccacacctattccaacagcaccatcgggtaccagcagtccacttccttcacagaccctttcttcattgtagagacactctgcatcatctggttctcctttgaattcttggtgaggttctttgcctgtcccagcaaagccggcttcttcaccaacatcatgaacatcattgacattgtggccatcatcccctacttcatcaccctggggacagagttggctgagaagccagaggacgctcagcaaggccagcaggccatgtcactggccatcctccgtgtcatccggtggtcagaaaagatctccctgataaagtcactttgaacagaggtctgaaggatgtgaagaaggagccataaggatatctgaaaggatctctatatggcaagagctaccaccaaatctctcc

SEQ ID NO: 10357 - DNA, 426 bp, Homo sapiens
  source 1..426: mol_type = unassigned DNA
cacccagctgagctctcctggaggttctggcaacgtcacacctcctgaggacagccaggactccagcttttgctgagctttgcatcttgcctccttccttcaaaaggctccaggcccatgctcggctgtcttcaagtcccgcatgcccctggccaggcacctcaccgcccctccagcccagcccaatcctagagctcacctccaggacccagagtctgcccttctgcccagaatgactcaccattatttctagctcgagtgagaagacgtgatgaggagttgggctgcctgttggtgcatctcagattcctgcagcatctgatcagctctgcaaggaagagagcttcacgtctctggtcaggccataccgtaatcccagggtgggcactattgcttgtacacattttatcaatgagaaaaccagga

SEQ ID NO: 10358 - DNA, 1189 bp, Homo sapiens
  source 1..1189: mol_type = unassigned DNA
tcgatcggaaccgccctagctttgatgccattttgtactactaccagtcagggggccgattgaggcgacctgtgaatgtgcccttagatatattctctgaagaaattcggttttatgagctgggagaagaagcgatggagatgtttcgggaagatgaaggctacatcaaggaggaagagcgtcctctgcctgaaaatgagtttcagagacaagtgtggcttctctttgaatacccagagagctcagggcctgccaggattatagctattgtgtctgtcatggtgattctgatctcaattgtcagcttctgtctggaaacattgcccatcttccgggatgagaatgaagacatgcatggtagtggggtgaccttccacacctattccaacagcaccatcgggtaccagcagtccacttccttcacagaccctttcttcattgtagagacactctgcatcatctggttctcctttgaattcttggtgaggttctttgcctgtcccagcaaagccggcttcttcaccaacatcatgaacatcattgacattgtggccatcatcccctacttcatcaccctggggacagagttggctgagaagccagaggacgctcagcaaggccagcaggccatgtcactggccatcctccgtgtcatccggtggtcagaaaagatctccctgataaagtcactttgaacagaggtctgaaggatgtgaagaaggagccataaggatatctgaaagttcatgtcctcaggtactaggcatgtgggctttcagaacagtaagaagcatctactagaaacccaatagggtctcagaaaacaacactgcctaactaccaaggttattttgtgatgggccagaagaatcagtatgttctgatatcaggaaggcatgcagcagagcttctctcacagacctgtggacaacttagagaaatctcaaggaagggtggtgagggaggctgcaatagcacccagtgttgacgctgtcctgatcagcattcccactgacgatttggatgaggacacggacagcatgctgatcaaacctgagagggcatgacccagaacagatgtcacagtccatcttaagagattcttcaggcaaagactttggagctttagttggcttgtctccgtattaaccaatcgtgtgatattactccaacaagtcattacttggag

SEQ ID NO: 10359 - DNA, 11877 bp, Homo sapiens
  source 1..11877: mol_type = unassigned DNA
ggcgctgcgtggcgcggtgcggctgcgggcggcggccgggagctccgtacgcgccgcccgcgggactgcagagccggctcccggctggccgcccgcaccccgccgccgcccgctgccggggttctgccggcgctggccgtaacctaggaacatggaggccccggtgcccatccggaagggcaacgtcacacctcctgaggacagccaggactccagcttttgctgagctttgcatcttgcctccttccttcaaaaggctccaggcccatgctcggctgtcttcaagtcccgcatgcccctggccaggcacctcaccgcccctccagcccagcccaatcctagagctcacctccaggacccagagtctgcccttctgcccagaatgactcaccattatttctagctcgagtgagaagacgtgatgaggagttgggctgcctgttggtgcatctcagattcctgcagcatctgatcagctctgcaaggaagagagcttcacgtctctggtcagccaagcgaggctgtctctccagctctcagagagctctcggggctctcctgcaggagaccaggccaatgctcctgtgcttcctggggccagtagcagcaccctgagctccctgccaccaggcagctgaaaggcatagcgtgaggtgcttctctcagtcccaattatgacagtggccaccggagacccagcagacgaggctgctgccctccctgggcacccacaggacacctatgacccagaggcagaccacgagtgctgtgagagggtggtgatcaacatctcagggctgcggtttgagacccagctaaagaccttagcccagtttccagagaccctcttaggggacccaaagaaacgaatgaggtactttgaccccctccgaaatgagtactttttcgatcggaaccgccctagctttgatgccattttgtactactaccagtcagggggccgattgaggcgacctgtgaatgtgcccttagatatattctctgaagaaattcggttttatgagctgggagaagaagcgatggagatgtttcgggaagatgaaggctacatcaaggaggaagagcgtcctctgcctgaaaatgagtttcagagacaagtgtggcttctctttgaatacccagagagctcagggcctgccaggattatagctattgtgtctgtcatggtgattctgatctcaattgtcagcttctgtctggaaacattgcccatcttccgggatgagaatgaagacatgcatggtagtggggtgaccttccacacctattccaacagcaccatcgggtaccagcagtccacttccttcacagaccctttcttcattgtagagacactctgcatcatctggttctcctttgaattcttggtgaggttctttgcctgtcccagcaaagccggcttcttcaccaacatcatgaacatcattgacattgtggccatcatcccctacttcatcaccctggggacagagttggctgagaagccagaggacgctcagcaaggccagcaggccatgtcactggccatcctccgtgtcatccggttggtaagagtctttaggattttcaagttgtccagacactccaaaggtctccagattctaggtcagaccctcaaagccagcatgagagaattgggcctcctgatattctttctcttcataggggtcatccttttctctagtgctgtgtattttgcagaggccgatgagcgagagtcccagttccccagcatcccagatgccttctggtgggcagtcgtctccatgacaactgtaggctatggagacatggttccgactaccattgggggaaagatagtgggttccctatgtgcgattgcaggtgtgttaactattgccttaccggtccctgtcattgtgtccaatttcaactacttctaccaccgggagacagagggagaggaacaggcccaatacttgcaagtgacaagctgtccaaagatcccatcctcccctgacctaaagaaaagtagaagtgcctctaccattagtaagtctgattacatggagatccaggagggtgtaaataacagtaatgaggactttagagaggaaaacttgaaaacagccaactgtaccttggctaacacaaactatgtgaatattaccaaaatgttaactgatgtctgattgaaacctattaccgtactcacagctcaatggaactaatgcagatgttgcataatagcctgcattgtagtcagtgtgttctacagtgtgtatctggttctgcatggaaagcaatagttgtgcaagtgacttttgatcttttgacttttgatttagaacacagaatatctatcatggctttcatgcacatcctcatcaccggcttatgaacttccaaagacgggagtcacctatcaagctaggatttcagatagacacgttgaggccacctcatatcccatacacagtgcaccatatcagtgccatcattccttcctaatgaaatgcacacaacatccaagagatgcactcccctccccaccatcccaccaccttatttgagcccacctgccctttcacagaggaacacaatcatggcttagctttaaatagctggtgtttgttcaaaaggtcatactcatttttgcattgaaaagaacacacagtcctgtgtgttggaattactttctgtgtcacaggctggagtttgtgaattgcagttgccaagtagatgctctggaggcttgtgtttcataacggaaaatgctgcattctgctttttctctgcagtgtcgatgtgagggaagcccgggggagggacagttagtatgaccgaatatgagttgtcaagtttcacatttgttcccttaggcctatggggagaagctaacaaaccaacagacctctaagcctctgatttcaccatttttgcaggctccagggtcacaaaaacatgtctggtttcttactggagtttgcagacatctgctttcccactgatgtggcccagctacactgacactgcagtgaaatttaccagtgatgcaatagagctgcatgggtgtttgttgcatgaatctcaatatttaaaacacaggagataacctattttcctagtagcctacacagtgttaatatttagagtattaataggcttggaatggtcttgaactaggggtttttttcccatcagaaggcaaaaatccctccatcaggggaaaaaaaatagactatttggaatggaactaaaacttctggccccccagcctacctatccctgttcttctaaacaggaacgcagacctctgcaaagccagaagagtaagcggggaaggcagcatctgaacacctcacatgactgcaccttaggaattaacctagtcgcgggcatgactgtacagtggaccagggcatctggtcctgatgacaggcaggtctgtggatccagtgtatataaatatatatcgagtatctctctttcacgcgttcctctacctagctagtgatagaaaagaaattgcatttgaacattgtacaagcttatgcaatatttttgacaaagggcaatttatgcatgtgtttgactatgtgcactagggtgtatatatatacatacatatgtgtgtatatgtatacacacacacacacacacacacacacacacacacatatatatatatatatattcattttctggagttcaggttcaggagcaaatccactgcttggtgggttggctgtctaagaggcctaatgggttaatttgtctcattggtaaccccactgggcctgggtttgctgccattgcctcagacactccggtatccatggattcctagacgttagaattgtctttctgccctccatgtgctgcagcttcagttcccatggctgaagcttgtcttactgagtgcacaagggccctgtggccctcacagttccagctgtcctgggccagacccaccccgggcctcctctctacagttcatcctgttcatcatctccattttcacctcttcccttgccacttggatcttattatcatttggctctgcatccgtcactttcacaaacctttcgctaaagagccagaatggatcccctgctttgaaaccaaggacaccaaggagtaggactccctgggaccaaattccactgatctggacctaaagggagcctcctctatgtggaaatgtctgaagtccgggactaagtgatggagtccctagatgatccaaaggcatcattttgatctccagacccaaactctctccccattaaactggcaaccagagctgctttttaaaaagaaccaaaggatgggtaaagaatcatttcccaccccccagaagaagtagagtgcaaatgagcactgcacagcctaaaggtagacagtaggttgaccctgaaatggcttcaggtagggggcttttaactcaccagactgggcgtctttgccttttgacggagtagcttaattttcccaaacagtgaattgcaggggtcgggctatgcaggggtggctccagcccaggcctcactgctgcctagttagcacctacagttgtcttggggcatggggcaccagctcagggtgctaggcccagggtgctcattagtgcctggtcacccacatccccaggtatctgcagggcatcccatgcccagcacaaagcctctgtgcttctcttcctctccttcatgggaggtggtgctgaatttccaaggcatggggtgggagggacacagatctttggaaaatagaaggtaaagcaacccatatctgaggcctaggtcagggatagatatcttatcacagtgtccttggcccaggactctaaaatgttcacatacagtcatgcacattcaccacaaaataggtacactgttgtcacacacaaacataaaacatgtaacgtgcaaaatacagacagaccaggttaacataaaagcaaacacagaagatatatggttataattgtatataaaatgcacactctgcacagatatagaatttacacagaacatacacaaaagacaaacatacaccacatacaaatatacaacctgaaactcagatgcaaaatacataaaaaactacatggacaaaatgcatatgcatataagatacacaaaggctactttaccattgtttctacacataaaatacacacaaactcagtatatacacacgatgcattaacttataataggcatacaagatacatagcacacatgcccaaaaatatcgcacaatacacatgaaatgcagacatatactcagacccattgccctgcccccagagctatgaattaacaggcacaaacaaaagatcagatgtaatcacctttgcctggcctgtgtctatatcccccaggatctttcaaggaatctctttctctattcttttctctcactaccagatttcactcctgagaagtaactcctaggtttcaagcaggaggatgggccaccacatcaagcagatatctgactaagaccaggaattgcatggggtctctaccaattcaccttcctcccaccagaaacctgggtgcagggtgtgaaagtacctgggacagctggtagcctaatataggcctccttgccatgacccttccttccttccagcaaatccgcacagacaacccaatagcccaggctccccttctcccagcacctgggatctccagattcagccctattctcttaaaagcagtaatggctcaagaaactgcaggatcttgagcccaggaccagggtaaagatgtccccaacattctctaagcccacagattttattgcccttccatcctttgcagctttgttgggggcacggtcaggaagttgagaccctatagagacctgtctcttaaaatgagccacctttacttgcttgtggcatttcacttgctcttgtgcataagcccaaaggggccaactcctgattcccctctgggtgtgttcaatcccgggcacgctcttccttttcctcttgttgggctcccctggatgccctgcctcccatccaattgctatgcaacccagttcagcttaagtaaaaagtgattaagaacatacatctaaggctaagcaagctaacactttttagagggcctgactttatcctatattctaaggccatatttaaatactttctaagattacccaccattttggattactcttggagctggttcttcccctaagtaggactagctgagagctgagtgcattttagcaaaggcttcacctacatcggaagtaaagagttgcagtcaggctttggatcaggcctcactcctgatttctgctcctgcagccatcccgttgtgtctcactctcccttccagtgatggtcgcagctcccagtctctacagaaaaggtaacaacagtagggagtggacatatgggtccaaaacgtgtgctttgctggaaacttgtgtttccaggtcaaggtaccattcctgttggcttcatcaagtgcctctgtggattcattttcaagaaacttggagttttcaggagaccgaaaaggaataggcccaggaaaggtggagagattgtcaggaagagagagtggctgagtgggtcaaatttcagagtaaactttttaggagccaacatttaattaagaaaataattaaggctctgtgctttctgaaacttcagtaatatttgacatgctctcttccttcttctctgcttgcctctgtccctctcacctgtgtttctgaggctagtgttggcatgtcaccatgaggttagccttttaaaaggggccccacgggagtgtgcctctagattgcgttagcctagtatggaaagggctcccatggaagctatgatggcctgagaccccagcctgggtgttcatgttgctgctccgtgttgggagggcccaggactagcttgttctacctattcttcctggatctctcactatattatagtgaggactctatcagtatcaacccatgtggagagaggacagcaccctctgaagctcctcaggctggggattcagcactgcccacagtagtagagtcacagaggctgactcccccctaaggaaactatagaacagtgtgcaaattgcatatgaaggtggcaccactacccctatgtcaggcaggggagcacagtgctttgacttgtttactcaagagaggggatgatggtgctgagctctgctccccagagctttcctggggcccattgtcataataacttgtatgtgggtgatggccgcctcatctgcgagggctataatatccatggtgctccttggttgcacaatggaggttcccctagccttggcaaggtatccattgccgggtttgaactcatgaccttaacctcattaacatcatcagtcacctgagccaacgcgcagagagggggatgctgggagctctctcagtagctattgtgaccatcatctatatcttcagacttagcccttgttgagtccaaccctgttcccctatcaaagcaaccagcagggacagatggaggtaggggctcccctacatgcaggaaggttctcttcctcaaactaacctagtttacttttcctttttttctgcttcccttcccaccaaatctcagcttcatctctcatagtttgtgtttgaatatttttaaagaggaaaagtgcaataaaataaatagtgactgttttctttagcaatagctctttcaaaatcttgctctcaggactgaaaagtgatagatagtacctggattatcagataatgcccttgacttctgggggctcattcacagtctctgtagtttcttcttcttcccacgtgttcacatgactcctgtcctcttgagatctgacctccttctggaatggacacatatgctaagatgcagtgtatgcacaaggaaggcctgtgagagggctttgtcactttgtctccttcctgtgtgcacctctctgtctccatgtgtgtctctgtcccctctccctctgtctccccatttctgcctgctgtcatacagcatccttacaacctctaggcatgaaaatcctaagtttgtgtgaccttttcagcccattttgttgactttccctcagtctggcagatgtaatggaagcctacacgaaagcacttcccaatagataagaataaagcatcctgagccattacagaagatcatttccatgcactaaaagccattacttgatccttttgcttccccttctcccttccccagggagacggatgctgagggaatgtggcctggaggtttgcacttgggatcagtagcctgggcagatttgggaattgccctctgactctctttcaaaataagctgacttgctcaaccaaagggactccgtgagagctgcagaaggaagcaggttcttgtgggtttcagtagaagtctacagggatagaagtttgggtggttagggcatgacattagtgaaataaagactctaccacccgctagagtgtgcagctgcacaaatatttgcacacatagccaggggcttcagaagagtcccctttcctaacatctgtgagcttaaatgttcagactggacaatcagggaaggctggcaaccccagggtcccattccatccttttttgatctaccttgctctatacacatatgtacagcaaaacctcagttaactgatggggaaacctcagggacaggaacatcctgattgctttgcaattttggttatttgagtgggaatgggaaagcatgtctggttcaacctttgttattgagaaaaatatttcctaagtaggttagcataactttcctgccttagttaagtagagtgtttgaagataacagggaccttgccttgctcagggtcaacattgtaaacctcaatgcttattgtacagtagtggacataggtagagaagaccaaagagacaggctgaatggctgctggctacaagacaggcctggaaatgggccactggggcacatcctggctcatcggagcccttgctgtcatttgcctctttctactgaaaggatagtaagaaaacataattcttgtcaatcgaggttttggttaattggtcctgagtttttagaggttttccatatatacatatatttatgtgtgtatatatatatatatagtatatgtatatatgtatactatttttaaattatagaattatacattgaccaatctccttagtttcacttatgtggaataaatttggcaatccaaggaataaactgcatttatgtgcattttttgaatgacctcctttgcattcttttcacctctccagttctactctttttttttctgcttagggacctctctagaaggcagatctttcataaaaaaagaacaggctacaggatcacctctttcctttccctcccaggtggctgcctgactcagggataaaagggaagtctgatctaacagccaggtgctttagcctttcttctgtctgccctggttggctataacctcatcactgaggatcagaaaagttattccaaactttgtactcgaggggagtggaaagcttgaagacctggcaaaggatttatctatttagcattctctttgtcattggtggtgccctaggtttgaggtttgtgagatctgaaagtaacattccaatgaagaactaaagcacatctctgccacacagaaggtgaggtttgtggcaatcaatggaactaacaaatccattctgttttttattatgactaaacctaagttgagggtgtgggtattagagcagctgaaattcagttgcctctttgggggtaagctgtacacatcactcaagaaacagctggatgcaagctaaaacctgctctcattctccctcttgcctgctagtgtgttagatccatggaagacagtttctctcagcctcacctcttgcatttgactgttgctttctacctagatgggagtgggagggatttttcactgtatctggagcaattgaagtggtgcaggggtgtctgccatctccccacacccacagaagccctccagtctggctatgttagttgtgatcaggcagcagaagcccataacccagacttgacatgaccagctggtgcactgaggcagttgaggtggcctgtctggatggctacttcttgtacttcatgaacctcagcatggaaatggatataactttctgtgctcctctgcactcctaaaatagtctaatatgttccagatgagtttgcagctgagaactccctgcatcattccactgatggatgcacagggcatgattatgtaataatgtggacagctactgcaacatctagatcattgagggcagtgtagatgtggctgtgtgctaggacccttggtagctatccagaggactcagtctggtgtctttctgagtctctgtgagaggcctctaagccctgcttctccttgaaaatgattccctagacaccgaatgccttgtttgtatgagtgaataaatgctctgggctgctagagaaagcaataggaggagctgggaggaagagaatattcaggggcgcactttgctaccaaacaatttccatgtcagctgctaacattactgcctttttagcctatgaagtgtagggcaaggactttgacctgccaggtggggctggaaaggagcacatcagctccaggctaagaaatgggatagaaaagcaagaagagaggcctggctggctttggcgggggtgagtctcagctcctgagggtttgaacatgctctgtgcttgccccagttctgccttcacgtgggatccagcgacccagtttccttttgttgtcgtgcttggatggttccttcatttgaagggccccaggaagctggaaagtcccatgatcaagctctagcctgctgagcaaacaataccccagccaaattggcctcttcctggttttctgcatccctgcacccctctctccactaaggataatcttggaacagttgcgattaatggtgccagcaatcaaggaagattctctagttttcatcagggacatagctgtaaagctcatgagtggaggatgctatttccttttccagacctgtgtgcttatgtgcttatataggctgcctctggagactttatattgtgtgtgatgtgtgtgtatatatatatacacacacatatatatatatatgtatatatatatatagagagagagagagagaggaaatggccgccactcacttaggctcatgcagcacagactccagttagggtttgcactggcttccttgctgcttgtgcatgaatcttcagctgccctcccatgtcctgtctctaataattgctgaaaactcaaagaggtagataaataagcctccttgggatcaatagcagaaggaactccaaggctgatggtaaagcttcgtaaggatgatgccgaaagggaactggggtctccatggtgataagaggctggggaccaatgagagctgaaggcggagcaggacttgcggggaagactcatgggagttgggagtcatttaactatttgtttgcttcttgaaaatttagacaccagctgtaactacattgcacaggatgtattgatattatcattcttgctgacatattctggaagctttcagccccaccaacactgccccacccaggacttctgcagctgagagttcctgtgtcagtagggtctgatatttgtacataggttatacatatatgtgtacatatgtgcctcaatgaacattgcctgtccacctgatcatgggtgtacatagacttcatagagctccacagtcttttgtaaatattgacacaagtaaataagtatataaatatatattactggggatttattttaacatcattctgtgtgatatgaaaaaaataaaatttttgacagaca

SEQ ID NO: 10360 - DNA, 1959 bp, Homo sapiens
  source 1..1959: mol_type = unassigned DNA
ggcacatagaagagtgagccatcatctggtttccagcgccaagacttctgcaggagagcctccgctgggctttcaagttggcaacgtcacacctcctgaggacagccaggactccagcttttgctgagctttgcatcttgcctccttccttcaaaaggctccaggcccatgctcggctgtcttcaagtcccgcatgcccctggccaggcacctcaccgcccctccagcccagcccaatcctagagctcacctccaggacccagagtctgcccttctgcccagaatgactcaccattatttctagctcgagtgagaagacgtgatgaggagttgggctgcctgttggtgcatctcagattcctgcagcatctgatcagctctgcaaggaagagagcttcacgtctctggtcagccaagcgaggctgtctctccagctctcagagagctctcggggctctcctgcaggagaccaggccaatgctcctgtgcttcctggggccagtagcagcaccctgagctccctgccaccaggcagctgaaaggcatagcgtgaggtgcttctctcagtcccaattatgacagtggccaccggagacccagcagacgaggctgctgccctccctgggcacccacaggacacctatgacccagaggcagaccacgagtgctgtgagagggtggtgatcaacatctcagggctgcggtttgagacccagctaaagaccttagcccagtttccagagaccctcttaggggacccaaagaaacgaatgaggtactttgaccccctccgaaatgagtactttttcgatcggaaccgccctagctttgatgccattttgtactactaccagtcagggggccgattgaggcgacctgtgaatgtgcccttagatatattctctgaagaaattcggttttatgagctgggagaagaagcgatggagatgtttcgggaagatgaaggctacatcaaggaggaagagcgtcctctgcctgaaaatgagtttcagagacaagtgtggcttctctttgaatacccagagagctcagggcctgccaggattatagctattgtgtctgtcatggtgattctgatctcaattgtcagcttctgtctggaaacattgcccatcttccgggatgagaatgaagacatgcatggtagtggggtgaccttccacacctattccaacagcaccatcgggtaccagcagtccacttccttcacagaccctttcttcattgtagagacactctgcatcatctggttctcctttgaattcttggtgaggttctttgcctgtcccagcaaagccggcttcttcaccaacatcatgaacatcattgacattgtggccatcatcccctacttcatcaccctggggacagagttggctgagaagccagaggacgctcagcaaggccagcaggccatgtcactggccatcctccgtgtcatccggttggaacgcagacctctgcaaagccagaagagtaagcggggaaggcagcatctgaacacctcacatgactgcaccttaggaattaacctagtcgcgggcatgactgtacagtggaccagggcatctggtcctgatgacaggcagacaccagctgtaactacattgcacaggatgtattgatattatcattcttgctgacatattctggaagctttcagccccaccaacactgccccacccaggacttctgcagctgagagttcctgtgtcagtagggtctgatatttgtacataggttatacatatatgtgtacatatgtgcctcaatgaacattgcctgtccacctgatcatgggtgtacatagacttcatagagctccacagtcttttgtaaatattgacacaagtaaataagtatataaatatatattactggggatttattttaacatcattctgtgtgatatgaaaaaaataaaatttttgacagaca

SEQ ID NO: 10361 - DNA, 10836 bp, Homo sapiens
  source 1..10836: mol_type = unassigned DNA
tctgccggcgctggccgtaacctaggaacatggaggccccggtgcccatccggaagggcaacgtcacacctcctgaggacagccaggactccagcttttgctgagctttgcatcttgcctccttccttcaaaaggctccaggcccatgctcggctgtcttcaagtcccgcatgcccctggccaggcacctcaccgcccctccagcccagcccaatcctagagctcacctccaggacccagagtctgcccttctgcccagaatgactcaccattatttctagctcgagtgagaagacgtgatgaggagttgggctgcctgttggtgcatctcagattcctgcagcatctgatcagctctgcaaggaagagagcttcacgtctctggtcagagacactctgcatcatctggttctcctttgaattcttggtgaggttctttgcctgtcccagcaaagccggcttcttcaccaacatcatgaacatcattgacattgtggccatcatcccctacttcatcaccctggggacagagttggctgagaagccagaggacgctcagcaaggccagcaggccatgtcactggccatcctccgtgtcatccggttggtaagagtctttaggattttcaagttgtccagacactccaaaggtctccagattctaggtcagaccctcaaagccagcatgagagaattgggcctcctgatattctttctcttcataggggtcatccttttctctagtgctgtgtattttgcagaggccgatgagcgagagtcccagttccccagcatcccagatgccttctggtgggcagtcgtctccatgacaactgtaggctatggagacatggttccgactaccattgggggaaagatagtgggttccctatgtgcgattgcaggtgtgttaactattgccttaccggtccctgtcattgtgtccaatttcaactacttctaccaccgggagacagagggagaggaacaggcccaatacttgcaagtgacaagctgtccaaagatcccatcctcccctgacctaaagaaaagtagaagtgcctctaccattagtaagtctgattacatggagatccaggagggtgtaaataacagtaatgaggactttagagaggaaaacttgaaaacagccaactgtaccttggctaacacaaactatgtgaatattaccaaaatgttaactgatgtctgattgaaacctattaccgtactcacagctcaatggaactaatgcagatgttgcataatagcctgcattgtagtcagtgtgttctacagtgtgtatctggttctgcatggaaagcaatagttgtgcaagtgacttttgatcttttgacttttgatttagaacacagaatatctatcatggctttcatgcacatcctcatcaccggcttatgaacttccaaagacgggagtcacctatcaagctaggatttcagatagacacgttgaggccacctcatatcccatacacagtgcaccatatcagtgccatcattccttcctaatgaaatgcacacaacatccaagagatgcactcccctccccaccatcccaccaccttatttgagcccacctgccctttcacagaggaacacaatcatggcttagctttaaatagctggtgtttgttcaaaaggtcatactcatttttgcattgaaaagaacacacagtcctgtgtgttggaattactttctgtgtcacaggctggagtttgtgaattgcagttgccaagtagatgctctggaggcttgtgtttcataacggaaaatgctgcattctgctttttctctgcagtgtcgatgtgagggaagcccgggggagggacagttagtatgaccgaatatgagttgtcaagtttcacatttgttcccttaggcctatggggagaagctaacaaaccaacagacctctaagcctctgatttcaccatttttgcaggctccagggtcacaaaaacatgtctggtttcttactggagtttgcagacatctgctttcccactgatgtggcccagctacactgacactgcagtgaaatttaccagtgatgcaatagagctgcatgggtgtttgttgcatgaatctcaatatttaaaacacaggagataacctattttcctagtagcctacacagtgttaatatttagagtattaataggcttggaatggtcttgaactaggggtttttttcccatcagaaggcaaaaatccctccatcaggggaaaaaaaatagactatttggaatggaactaaaacttctggccccccagcctacctatccctgttcttctaaacaggaacgcagacctctgcaaagccagaagagtaagcggggaaggcagcatctgaacacctcacatgactgcaccttaggaattaacctagtcgcgggcatgactgtacagtggaccagggcatctggtcctgatgacaggcaggtctgtggatccagtgtatataaatatatatcgagtatctctctttcacgcgttcctctacctagctagtgatagaaaagaaattgcatttgaacattgtacaagcttatgcaatatttttgacaaagggcaatttatgcatgtgtttgactatgtgcactagggtgtatatatatacatacatatgtgtgtatatgtatacacacacacacacacacacacacacacacacacatatatatatatatatattcattttctggagttcaggttcaggagcaaatccactgcttggtgggttggctgtctaagaggcctaatgggttaatttgtctcattggtaaccccactgggcctgggtttgctgccattgcctcagacactccggtatccatggattcctagacgttagaattgtctttctgccctccatgtgctgcagcttcagttcccatggctgaagcttgtcttactgagtgcacaagggccctgtggccctcacagttccagctgtcctgggccagacccaccccgggcctcctctctacagttcatcctgttcatcatctccattttcacctcttcccttgccacttggatcttattatcatttggctctgcatccgtcactttcacaaacctttcgctaaagagccagaatggatcccctgctttgaaaccaaggacaccaaggagtaggactccctgggaccaaattccactgatctggacctaaagggagcctcctctatgtggaaatgtctgaagtccgggactaagtgatggagtccctagatgatccaaaggcatcattttgatctccagacccaaactctctccccattaaactggcaaccagagctgctttttaaaaagaaccaaaggatgggtaaagaatcatttcccaccccccagaagaagtagagtgcaaatgagcactgcacagcctaaaggtagacagtaggttgaccctgaaatggcttcaggtagggggcttttaactcaccagactgggcgtctttgccttttgacggagtagcttaattttcccaaacagtgaattgcaggggtcgggctatgcaggggtggctccagcccaggcctcactgctgcctagttagcacctacagttgtcttggggcatggggcaccagctcagggtgctaggcccagggtgctcattagtgcctggtcacccacatccccaggtatctgcagggcatcccatgcccagcacaaagcctctgtgcttctcttcctctccttcatgggaggtggtgctgaatttccaaggcatggggtgggagggacacagatctttggaaaatagaaggtaaagcaacccatatctgaggcctaggtcagggatagatatcttatcacagtgtccttggcccaggactctaaaatgttcacatacagtcatgcacattcaccacaaaataggtacactgttgtcacacacaaacataaaacatgtaacgtgcaaaatacagacagaccaggttaacataaaagcaaacacagaagatatatggttataattgtatataaaatgcacactctgcacagatatagaatttacacagaacatacacaaaagacaaacatacaccacatacaaatatacaacctgaaactcagatgcaaaatacataaaaaactacatggacaaaatgcatatgcatataagatacacaaaggctactttaccattgtttctacacataaaatacacacaaactcagtatatacacacgatgcattaacttataataggcatacaagatacatagcacacatgcccaaaaatatcgcacaatacacatgaaatgcagacatatactcagacccattgccctgcccccagagctatgaattaacaggcacaaacaaaagatcagatgtaatcacctttgcctggcctgtgtctatatcccccaggatctttcaaggaatctctttctctattcttttctctcactaccagatttcactcctgagaagtaactcctaggtttcaagcaggaggatgggccaccacatcaagcagatatctgactaagaccaggaattgcatggggtctctaccaattcaccttcctcccaccagaaacctgggtgcagggtgtgaaagtacctgggacagctggtagcctaatataggcctccttgccatgacccttccttccttccagcaaatccgcacagacaacccaatagcccaggctccccttctcccagcacctgggatctccagattcagccctattctcttaaaagcagtaatggctcaagaaactgcaggatcttgagcccaggaccagggtaaagatgtccccaacattctctaagcccacagattttattgcccttccatcctttgcagctttgttgggggcacggtcaggaagttgagaccctatagagacctgtctcttaaaatgagccacctttacttgcttgtggcatttcacttgctcttgtgcataagcccaaaggggccaactcctgattcccctctgggtgtgttcaatcccgggcacgctcttccttttcctcttgttgggctcccctggatgccctgcctcccatccaattgctatgcaacccagttcagcttaagtaaaaagtgattaagaacatacatctaaggctaagcaagctaacactttttagagggcctgactttatcctatattctaaggccatatttaaatactttctaagattacccaccattttggattactcttggagctggttcttcccctaagtaggactagctgagagctgagtgcattttagcaaaggcttcacctacatcggaagtaaagagttgcagtcaggctttggatcaggcctcactcctgatttctgctcctgcagccatcccgttgtgtctcactctcccttccagtgatggtcgcagctcccagtctctacagaaaaggtaacaacagtagggagtggacatatgggtccaaaacgtgtgctttgctggaaacttgtgtttccaggtcaaggtaccattcctgttggcttcatcaagtgcctctgtggattcattttcaagaaacttggagttttcaggagaccgaaaaggaataggcccaggaaaggtggagagattgtcaggaagagagagtggctgagtgggtcaaatttcagagtaaactttttaggagccaacatttaattaagaaaataattaaggctctgtgctttctgaaacttcagtaatatttgacatgctctcttccttcttctctgcttgcctctgtccctctcacctgtgtttctgaggctagtgttggcatgtcaccatgaggttagccttttaaaaggggccccacgggagtgtgcctctagattgcgttagcctagtatggaaagggctcccatggaagctatgatggcctgagaccccagcctgggtgttcatgttgctgctccgtgttgggagggcccaggactagcttgttctacctattcttcctggatctctcactatattatagtgaggactctatcagtatcaacccatgtggagagaggacagcaccctctgaagctcctcaggctggggattcagcactgcccacagtagtagagtcacagaggctgactcccccctaaggaaactatagaacagtgtgcaaattgcatatgaaggtggcaccactacccctatgtcaggcaggggagcacagtgctttgacttgtttactcaagagaggggatgatggtgctgagctctgctccccagagctttcctggggcccattgtcataataacttgtatgtgggtgatggccgcctcatctgcgagggctataatatccatggtgctccttggttgcacaatggaggttcccctagccttggcaaggtatccattgccgggtttgaactcatgaccttaacctcattaacatcatcagtcacctgagccaacgcgcagagagggggatgctgggagctctctcagtagctattgtgaccatcatctatatcttcagacttagcccttgttgagtccaaccctgttcccctatcaaagcaaccagcagggacagatggaggtaggggctcccctacatgcaggaaggttctcttcctcaaactaacctagtttacttttcctttttttctgcttcccttcccaccaaatctcagcttcatctctcatagtttgtgtttgaatatttttaaagaggaaaagtgcaataaaataaatagtgactgttttctttagcaatagctctttcaaaatcttgctctcaggactgaaaagtgatagatagtacctggattatcagataatgcccttgacttctgggggctcattcacagtctctgtagtttcttcttcttcccacgtgttcacatgactcctgtcctcttgagatctgacctccttctggaatggacacatatgctaagatgcagtgtatgcacaaggaaggcctgtgagagggctttgtcactttgtctccttcctgtgtgcacctctctgtctccatgtgtgtctctgtcccctctccctctgtctccccatttctgcctgctgtcatacagcatccttacaacctctaggcatgaaaatcctaagtttgtgtgaccttttcagcccattttgttgactttccctcagtctggcagatgtaatggaagcctacacgaaagcacttcccaatagataagaataaagcatcctgagccattacagaagatcatttccatgcactaaaagccattacttgatccttttgcttccccttctcccttccccagggagacggatgctgagggaatgtggcctggaggtttgcacttgggatcagtagcctgggcagatttgggaattgccctctgactctctttcaaaataagctgacttgctcaaccaaagggactccgtgagagctgcagaaggaagcaggttcttgtgggtttcagtagaagtctacagggatagaagtttgggtggttagggcatgacattagtgaaataaagactctaccacccgctagagtgtgcagctgcacaaatatttgcacacatagccaggggcttcagaagagtcccctttcctaacatctgtgagcttaaatgttcagactggacaatcagggaaggctggcaaccccagggtcccattccatccttttttgatctaccttgctctatacacatatgtacagcaaaacctcagttaactgatggggaaacctcagggacaggaacatcctgattgctttgcaattttggttatttgagtgggaatgggaaagcatgtctggttcaacctttgttattgagaaaaatatttcctaagtaggttagcataactttcctgccttagttaagtagagtgtttgaagataacagggaccttgccttgctcagggtcaacattgtaaacctcaatgcttattgtacagtagtggacataggtagagaagaccaaagagacaggctgaatggctgctggctacaagacaggcctggaaatgggccactggggcacatcctggctcatcggagcccttgctgtcatttgcctctttctactgaaaggatagtaagaaaacataattcttgtcaatcgaggttttggttaattggtcctgagtttttagaggttttccatatatacatatatttatgtgtgtatatatatatatatagtatatgtatatatgtatactatttttaaattatagaattatacattgaccaatctccttagtttcacttatgtggaataaatttggcaatccaaggaataaactgcatttatgtgcattttttgaatgacctcctttgcattcttttcacctctccagttctactctttttttttctgcttagggacctctctagaaggcagatctttcataaaaaaagaacaggctacaggatcacctctttcctttccctcccaggtggctgcctgactcagggataaaagggaagtctgatctaacagccaggtgctttagcctttcttctgtctgccctggttggctataacctcatcactgaggatcagaaaagttattccaaactttgtactcgaggggagtggaaagcttgaagacctggcaaaggatttatctatttagcattctctttgtcattggtggtgccctaggtttgaggtttgtgagatctgaaagtaacattccaatgaagaactaaagcacatctctgccacacagaaggtgaggtttgtggcaatcaatggaactaacaaatccattctgttttttattatgactaaacctaagttgagggtgtgggtattagagcagctgaaattcagttgcctctttgggggtaagctgtacacatcactcaagaaacagctggatgcaagctaaaacctgctctcattctccctcttgcctgctagtgtgttagatccatggaagacagtttctctcagcctcacctcttgcatttgactgttgctttctacctagatgggagtgggagggatttttcactgtatctggagcaattgaagtggtgcaggggtgtctgccatctccccacacccacagaagccctccagtctggctatgttagttgtgatcaggcagcagaagcccataacccagacttgacatgaccagctggtgcactgaggcagttgaggtggcctgtctggatggctacttcttgtacttcatgaacctcagcatggaaatggatataactttctgtgctcctctgcactcctaaaatagtctaatatgttccagatgagtttgcagctgagaactccctgcatcattccactgatggatgcacagggcatgattatgtaataatgtggacagctactgcaacatctagatcattgagggcagtgtagatgtggctgtgtgctaggacccttggtagctatccagaggactcagtctggtgtctttctgagtctctgtgagaggcctctaagccctgcttctccttgaaaatgattccctagacaccgaatgccttgtttgtatgagtgaataaatgctctgggctgctagagaaagcaataggaggagctgggaggaagagaatattcaggggcgcactttgctaccaaacaatttccatgtcagctgctaacattactgcctttttagcctatgaagtgtagggcaaggactttgacctgccaggtggggctggaaaggagcacatcagctccaggctaagaaatgggatagaaaagcaagaagagaggcctggctggctttggcgggggtgagtctcagctcctgagggtttgaacatgctctgtgcttgccccagttctgccttcacgtgggatccagcgacccagtttccttttgttgtcgtgcttggatggttccttcatttgaagggccccaggaagctggaaagtcccatgatcaagctctagcctgctgagcaaacaataccccagccaaattggcctcttcctggttttctgcatccctgcacccctctctccactaaggataatcttggaacagttgcgattaatggtgccagcaatcaaggaagattctctagttttcatcagggacatagctgtaaagctcatgagtggaggatgctatttccttttccagacctgtgtgcttatgtgcttatataggctgcctctggagactttatattgtgtgtgatgtgtgtgtatatatatatacacacacatatatatatatatgtatatatatatatagagagagagagagagaggaaatggccgccactcacttaggctcatgcagcacagactccagttagggtttgcactggcttccttgctgcttgtgcatgaatcttcagctgccctcccatgtcctgtctctaataattgctgaaaactcaaagaggtagataaataagcctccttgggatcaatagcagaaggaactccaaggctgatggtaaagcttcgtaaggatgatgccgaaagggaactggggtctccatggtgataagaggctggggaccaatgagagctgaaggcggagcaggacttgcggggaagactcatgggagttgggagtcatttaactatttgtttgcttcttgaaaatttagacaccagctgtaactacattgcacaggatgtattgatattatcattcttgctgacatattctggaagctttcagccccaccaacactgccccacccaggacttctgcagctgagagttcctgtgtcagtagggtctgatatttgtacataggttatacatatatgtgtacatatgtgcctcaatgaacattgcctgtccacctgatcatgggtgtacatagacttcatagagctccacagtcttttgtaaatattgacacaagtaaata

SEQ ID NO: 10362 - DNA, 6673 bp, Homo sapiens
  source 1..6673: mol_type = unassigned DNA
gagagcagctggggactagcaacctggatcaacccagggaggcccctggagaaggcaggcccagccaagcctgagtcttgctccctgggagaaaatgcttcaagctgatgggaagcctgcccagaagaggcaaggaggctgagggatagtcctcaggcctggcatcagaatagaggatgggcatgggggcctgttacctcccatgagggaagctgccagaccctcctaaatcttggcaccagctggttcaaatgccctggttccaccttgctgctgtttttttccaggcaacgtcacacctcctgaggacagccaggactccagcttttgctgagctttgcatcttgcctccttccttcaaaaggctccaggcccatgctcggctgtcttcaagtcccgcatgcccctggccaggcacctcaccgcccctccagcccagcccaatcctagagctcacctccaggacccagagtctgcccttctgcccagaatgactcaccattatttctagctcgagtgagaagacgtgatgaggagttgggctgcctgttggtgcatctcagattcctgcagcatctgatcagctctgcaaggaagagagcttcacgtctctggtcagagacactctgcatcatctggttctcctttgaattcttggtgaggttctttgcctgtcccagcaaagccggcttcttcaccaacatcatgaacatcattgacattgtggccatcatcccctacttcatcaccctggggacagagttggctgagaagccagaggacgctcagcaaggccagcaggccatgtcactggccatcctccgtgtcatccggttggaacgcagacctctgcaaagccagaagagtaagcggggaaggcagcatctgaacacctcacatgactgcaccttaggaattaacctagtcgcgggcatgactgtacagtggaccagggcatctggtcctgatgacaggcaggtctgtggatccagtgtatataaatatatatcgagtatctctctttcacgcgttcctctacctagctagtgatagaaaagaaattgcatttgaacattgtacaagcttatgcaatatttttgacaaagggcaatttatgcatgtgtttgactatgtgcactagggtgtatatatatacatacatatgtgtgtatatgtatacacacacacacacacacacacacacacacacacatatatatatatatatattcattttctggagttcaggttcaggagcaaatccactgcttggtgggttggctgtctaagaggcctaatgggttaatttgtctcattggtaaccccactgggcctgggtttgctgccattgcctcagacactccggtatccatggattcctagacgttagaattgtctttctgccctccatgtgctgcagcttcagttcccatggctgaagcttgtcttactgagtgcacaagggccctgtggccctcacagttccagctgtcctgggccagacccaccccgggcctcctctctacagttcatcctgttcatcatctccattttcacctcttcccttgccacttggatcttattatcatttggctctgcatccgtcactttcacaaacctttcgctaaagagccagaatggatcccctgctttgaaaccaaggacaccaaggagtaggactccctgggaccaaattccactgatctggacctaaagggagcctcctctatgtggaaatgtctgaagtccgggactaagtgatggagtccctagatgatccaaaggcatcattttgatctccagacccaaactctctccccattaaactggcaaccagagctgctttttaaaaagaaccaaaggatgggtaaagaatcatttcccaccccccagaagaagtagagtgcaaatgagcactgcacagcctaaaggtagacagtaggttgaccctgaaatggcttcaggtagggggcttttaactcaccagactgggcgtctttgccttttgacggagtagcttaattttcccaaacagtgaattgcaggggtcgggctatgcaggggtggctccagcccaggcctcactgctgcctagttagcacctacagttgtcttggggcatggggcaccagctcagggtgctaggcccagggtgctcattagtgcctggtcacccacatccccaggtatctgcagggcatcccatgcccagcacaaagcctctgtgcttctcttcctctccttcatgggaggtggtgctgaatttccaaggcatggggtgggagggacacagatctttggaaaatagaaggtaaagcaacccatatctgaggcctaggtcagggatagatatcttatcacagtgtccttggcccaggactctaaaatgttcacatacagtcatgcacattcaccacaaaataggtacactgttgtcacacacaaacataaaacatgtaacgtgcaaaatacagacagaccaggttaacataaaagcaaacacagaagatatatggttataattgtatataaaatgcacactctgcacagatatagaatttacacagaacatacacaaaagacaaacatacaccacatacaaatatacaacctgaaactcagatgcaaaatacataaaaaactacatggacaaaatgcatatgcatataagatacacaaaggctactttaccattgtttctacacataaaatacacacaaactcagtatatacacacgatgcattaacttataataggcatacaagatacatagcacacatgcccaaaaatatcgcacaatacacatgaaatgcagacatatactcagacccattgccctgcccccagagctatgaattaacaggcacaaacaaaagatcagatgtaatcacctttgcctggcctgtgtctatatcccccaggatctttcaaggaatctctttctctattcttttctctcactaccagatttcactcctgagaagtaactcctaggtttcaagcaggaggatgggccaccacatcaagcagatatctgactaagaccaggaattgcatggggtctctaccaattcaccttcctcccaccagaaacctgggtgcagggtgtgaaagtacctgggacagctggtagcctaatataggcctccttgccatgacccttccttccttccagcaaatccgcacagacaacccaatagcccaggctccccttctcccagcacctgggatctccagattcagccctattctcttaaaagcagtaatggctcaagaaactgcaggatcttgagcccaggaccagggtaaagatgtccccaacattctctaagcccacagattttattgcccttccatcctttgcagctttgttgggggcacggtcaggaagttgagaccctatagagacctgtctcttaaaatgagccacctttacttgcttgtggcatttcacttgctcttgtgcataagcccaaaggggccaactcctgattcccctctgggtgtgttcaatcccgggcacgctcttccttttcctcttgttgggctcccctggatgccctgcctcccatccaattgctatgcaacccagttcagcttaagtaaaaagtgattaagaacatacatctaaggctaagcaagctaacactttttagagggcctgactttatcctatattctaaggccatatttaaatactttctaagattacccaccattttggattactcttggagctggttcttcccctaagtaggactagctgagagctgagtgcattttagcaaaggcttcacctacatcggaagtaaagagttgcagtcaggctttggatcaggcctcactcctgatttctgctcctgcagccatcccgttgtgtctcactctcccttccagtgatggtcgcagctcccagtctctacagaaaaggtaacaacagtagggagtggacatatgggtccaaaacgtgtgctttgctggaaacttgtgtttccaggtcaaggtaccattcctgttggcttcatcaagtgcctctgtggattcattttcaagaaacttggagttttcaggagaccgaaaaggaataggcccaggaaaggtggagagattgtcaggaagagagagtggctgagtgggtcaaatttcagagtaaactttttaggagccaacatttaattaagaaaataattaaggctctgtgctttctgaaacttcagtaatatttgacatgctctcttccttcttctctgcttgcctctgtccctctcacctgtgtttctgaggctagtgttggcatgtcaccatgaggttagccttttaaaaggggccccacgggagtgtgcctctagattgcgttagcctagtatggaaagggctcccatggaagctatgatggcctgagaccccagcctgggtgttcatgttgctgctccgtgttgggagggcccaggactagcttgttctacctattcttcctggatctctcactatattatagtgaggactctatcagtatcaacccatgtggagagaggacagcaccctctgaagctcctcaggctggggattcagcactgcccacagtagtagagtcacagaggctgactcccccctaaggaaactatagaacagtgtgcaaattgcatatgaaggtggcaccactacccctatgtcaggcaggggagcacagtgctttgacttgtttactcaagagaggggatgatggtgctgagctctgctccccagagctttcctggggcccattgtcataataacttgtatgtgggtgatggccgcctcatctgcgagggctataatatccatggtgctccttggttgcacaatggaggttcccctagccttggcaaggtatccattgccgggtttgaactcatgaccttaacctcattaacatcatcagtcacctgagccaacgcgcagagagggggatgctgggagctctctcagtagctattgtgaccatcatctatatcttcagacttagcccttgttgagtccaaccctgttcccctatcaaagcaaccagcagggacagatggaggtaggggctcccctacatgcaggaaggttctcttcctcaaactaacctagtttacttttcctttttttctgcttcccttcccaccaaatctcagcttcatctctcatagtttgtgtttgaatatttttaaagaggaaaagtgcaataaaataaatagtgactgttttctttagcaatagctctttcaaaatcttgctctcaggactgaaaagtgatagatagtacctggattatcagataatgcccttgacttctgggggctcattcacagtctctgtagtttcttcttcttcccacgtgttcacatgactcctgtcctcttgagatctgacctccttctggaatggacacatatgctaagatgcagtgtatgcacaaggaaggcctgtgagagggctttgtcactttgtctccttcctgtgtgcacctctctgtctccatgtgtgtctctgtcccctctccctctgtctccccatttctgcctgctgtcatacagcatccttacaacctctaggcatgaaaatcctaagtttgtgtgaccttttcagcccattttgttgactttccctcagtctggcagatgtaatggaagcctacacgaaagcacttcccaatagataagaataaagcatcctgagccattacagaagatcatttccatgcactaaaagccattacttgatccttttgcttccccttctcccttccccagggagacggatgctgagggaatgtggcctggaggtttgcacttgggatcagtagcctgggcagatttgggaattgccctctgactctctttcaaaataagctgacttgctcaaccaaagggactccgtgagagctgcagaaggaagcaggttcttgtgggtttcagtagaagtctacagggatagaagtttgggtggttagggcatgacattagtgaaataaagactctaccacccgctagagtgtgcagctgcacaaatatttgcacacatagccaggggcttcagaagagtcccctttcctaacatctgtgagcttaaatgttcagactggacaatcagggaaggctggcaaccccagggtcccattccatccttttttgatctaccttgctctatacacatatgtacagcaaaacctcagttaactgatggggaaacctcagggacaggaacatcctgattgctttgcaattttggttatttgagtgggaatgggaaagcatgtctggttcaacctttgttattgagaaaaatatttcctaagtaggttagcataactttcctgccttagttaagtagagtgtttgaagataacagggaccttgccttgctcagggtcaacattgtaaacctcaatgcttattgtacagtagtggacataggtagagaagaccaaagagacaggctgaatggctgctggctacaagacaggcctggaaatgggccactggggcacatcctggctcatcggagcccttgctgtcatttgcctctttctactgaaaggatagtaagaaaacataattcttgtcaatcgaggttttggttaattggtcctgagtttttagaggttttccatatatacatatatttatgtgtgtatatatatatatatag

SEQ ID NO: 10363 - DNA, 5256 bp, Homo sapiens
  source 1..5256: mol_type = unassigned DNA
gggactgcagagccggctcccggctggccgcccgcaccccgccgccgcccgctgccggggttctgccggcgctggccgtaacctaggaacatggaggccccggtgcccatccggaagggcaacgtcacacctcctgaggacagccaggactccagcttttgctgagctttgcatcttgcctccttccttcaaaaggctccaggcccatgctcggctgtcttcaagtcccgcatgcccctggccaggcacctcaccgcccctccagcccagcccaatcctagagctcacctccaggacccagagtctgcccttctgcccagaatgactcaccattatttctagctcgagtgagaagacgtgatgaggagttgggctgcctgttggtgcatctcagattcctgcagcatctgatcagctctgcaaggaagagagcttcacgtctctggtcagcttctgtctggaaacattgcccatcttccgggatgagaatgaagacatgcatggtagtggggtgaccttccacacctattccaacagcaccatcgggtaccagcagtccacttccttcacagaccctttcttcattgtagagacactctgcatcatctggttctcctttgaattcttggtgaggttctttgcctgtcccagcaaagccggcttcttcaccaacatcatgaacatcattgacattgtggccatcatcccctacttcatcaccctggggacagagttggctgagaagccagaggacgctcagcaaggccagcaggccatgtcactggccatcctccgtgtcatccggttggtaagagtctttaggattttcaagttgtccagacactccaaaggtctccagattctaggtcagaccctcaaagccagcatgagagaattgggcctcctgatattctttctcttcataggggtcatccttttctctagtgctgtgtattttgcagaggccgatgagcgagagtcccagttccccagcatcccagatgccttctggtgggcagtcgtctccatgacaactgtaggctatggagacatggttccgactaccattgggggaaagatagtgggttccctatgtgcgattgcaggtgtgttaactattgccttaccggtccctgtcattgtgtccaatttcaactacttctaccaccgggagacagagggagaggaacaggcccaatacttgcaagtgacaagctgtccaaagatcccatcctcccctgacctaaagaaaagtagaagtgcctctaccattagtaagtctgattacatggagatccaggagggtgtaaataacagtaatgaggactttagagaggaaaacttgaaaacagccaactgtaccttggctaacacaaactatgtgaatattaccaaaatgttaactgatgtctgattgaaacctattaccgtactcacagctcaatggaactaatgcagatgttgcataatagcctgcattgtagtcagtgtgttctacagtgtgtatctggttctgcatggaaagcaatagttgtgcaagtgacttttgatcttttgacttttgatttagaacacagaatatctatcatggctttcatgcacatcctcatcaccggcttatgaacttccaaagacgggagtcacctatcaagctaggatttcagatagacacgttgaggccacctcatatcccatacacagtgcaccatatcagtgccatcattccttcctaatgaaatgcacacaacatccaagagatgcactcccctccccaccatcccaccaccttatttgagcccacctgccctttcacagaggaacacaatcatggcttagctttaaatagctggtgtttgttcaaaaggtcatactcatttttgcattgaaaagaacacacagtcctgtgtgttggaattactttctgtgtcacaggctggagtttgtgaattgcagttgccaagtagatgctctggaggcttgtgtttcataacggaaaatgctgcattctgctttttctctgcagtgtcgatgtgagggaagcccgggggagggacagttagtatgaccgaatatgagttgtcaagtttcacatttgttcccttaggcctatggggagaagctaacaaaccaacagacctctaagcctctgatttcaccatttttgcaggctccagggtcacaaaaacatgtctggtttcttactggagtttgcagacatctgctttcccactgatgtggcccagctacactgacactgcagtgaaatttaccagtgatgcaatagagctgcatgggtgtttgttgcatgaatctcaatatttaaaacacaggagataacctattttcctagtagcctacacagtgttaatatttagagtattaataggcttggaatggtcttgaactaggggtttttttcccatcagaaggcaaaaatccctccatcaggggaaaaaaaatagactatttggaatggaactaaaacttctggccccccagcctacctatccctgttcttctaaacaggaacgcagacctctgcaaagccagaagagtaagcggggaaggcagcatctgaacacctcacatgactgcaccttaggaattaacctagtcgcgggcatgactgtacagtggaccagggcatctggtcctgatgacaggcaggtctgtggatccagtgtatataaatatatatcgagtatctctctttcacgcgttcctctacctagctagtgatagaaaagaaattgcatttgaacattgtacaagcttatgcaatatttttgacaaagggcaatttatgcatgtgtttgactatgtgcactagggtgtatatatatacatacatatgtgtgtatatgtatacacacacacacacacacacacacacacacacacatatatatatatatatattcattttctggagttcaggttcaggagcaaatccactgcttggtgggttggctgtctaagaggcctaatgggttaatttgtctcattggtaaccccactgggcctgggtttgctgccattgcctcagacactccggtatccatggattcctagacgttagaattgtctttctgccctccatgtgctgcagcttcagttcccatggctgaagcttgtcttactgagtgcacaagggccctgtggccctcacagttccagctgtcctgggccagacccaccccgggcctcctctctacagttcatcctgttcatcatctccattttcacctcttcccttgccacttggatcttattatcatttggctctgcatccgtcactttcacaaacctttcgctaaagagccagaatggatcccctgctttgaaaccaaggacaccaaggagtaggactccctgggaccaaattccactgatctggacctaaagggagcctcctctatgtggaaatgtctgaagtccgggactaagtgatggagtccctagatgatccaaaggcatcattttgatctccagacccaaactctctccccattaaactggcaaccagagctgctttttaaaaagaaccaaaggatgggtaaagaatcatttcccaccccccagaagaagtagagtgcaaatgagcactgcacagcctaaaggtagacagtaggttgaccctgaaatggcttcaggtagggggcttttaactcaccagactgggcgtctttgccttttgacggagtagcttaattttcccaaacagtgaattgcaggggtcgggctatgcaggggtggctccagcccaggcctcactgctgcctagttagcacctacagttgtcttggggcatggggcaccagctcagggtgctaggcccagggtgctcattagtgcctggtcacccacatccccaggtatctgcagggcatcccatgcccagcacaaagcctctgtgcttctcttcctctccttcatgggaggtggtgctgaatttccaaggcatggggtgggagggacacagatctttggaaaatagaaggtaaagcaacccatatctgaggcctaggtcagggatagatatcttatcacagtgtccttggcccaggactctaaaatgttcacatacagtcatgcacattcaccacaaaataggtacactgttgtcacacacaaacataaaacatgtaacgtgcaaaatacagacagaccaggttaacataaaagcaaacacagaagatatatggttataattgtatataaaatgcacactctgcacagatatagaatttacacagaacatacacaaaagacaaacatacaccacatacaaatatacaacctgaaactcagatgcaaaatacataaaaaactacatggacaaaatgcatatgcatataagatacacaaaggctactttaccattgtttctacacataaaatacacacaaactcagtatatacacacgatgcattaacttataataggcatacaagatacatagcacacatgcccaaaaatatcgcacaatacacatgaaatgcagacatatactcagacccattgccctgcccccagagctatgaattaacaggcacaaacaaaagatcagatgtaatcacctttgcctggcctgtgtctatatcccccaggatctttcaaggaatctctttctctattcttttctctcactaccagatttcactcctgagaagtaactcctaggtttcaagcaggaggatgggccaccacatcaagcagatatctgactaagaccaggaattgcatggggtctctaccaattcaccttcctcccaccagaaacctgggtgcagggtgtgaaagtacctgggacagctggtagcctaatataggcctccttgccatgacccttccttccttccagcaaatccgcacagacaacccaatagcccaggctccccttctcccagcacctgggatctccagattcagccctattctcttaaaagcagtaatggctcaagaaactgcaggatcttgagcccaggaccagggtaaagatgtccccaacattctctaagcccacagattttattgcccttccatcctttgcagctttgttgggggcacggtcaggaagttgagaccctatagagacctgtctcttaaaatgagccacctttacttgcttgtggcatttcacttgctcttgtgcataagcccaaaggggccaactcctgattcccctctgggtgtgttcaatcccgggcacgctcttccttttcctcttgttgggctcccctggatgccctgcc

SEQ ID NO: 10364 - DNA, 1524 bp, Homo sapiens
  source 1..1524: mol_type = unassigned DNA
cggctttgctgcagagagggctttccccttcgctggggccgtgggctgccgccgagcccccgcgcttaaaaggaagctgagatctggggcggcagcctggcgcaggctactccccacccccagagatcaggttccgggattttgggttggacactgagcctcggcggtccctcggctggacgccgggggcttaagagctgaactgcgcttgggcccgcagcaggagccgaccgcgcgggcaggagggggttaaggtggcgctagcggccgcggccagcgggagggtctggtcctctgcgcggaggcgagcgctgagtgcgccgaacggaatcccggccggagcccggggcgatggggagagggcccagacccctccccgccctggggccggcgggattgggtcggcagggggccagtccggaagccggcttcctccaggctccccctctcgctgctgccaagccgcctcgcagctaggcaggcggagcgtttattctgtgctccctgccgaggagatgtgagggattttctcttgggggagaaatcagtggtcgagcgcctgcccagctcaaatgccacccggctcagagggaggcctgcggcccagggatcccggagggagagcaacgtcacacctcctgaggacagccaggactccagcttttgctgagctttgcatcttgcctccttccttcaaaaggctccaggcccatgctcggctgtcttcaagtcccgcatgcccctggccaggcacctcaccgcccctccagcccagcccaatcctagagctcacctccaggacccagagtctgcccttctgcccagaatgactcaccattatttctagctcgagtgagaagacgtgatgaggagttgggctgcctgttggtgcatctcagattcctgcagcatctgatcagctctgcaaggaagagagcttcacgtctctggtcagagacactctgcatcatctggttctcctttgaattcttggtgaggttctttgcctgtcccagcaaagccggcttcttcaccaacatcatgaacatcattgacattgtggccatcatcccctacttcatcaccctggggacagagttggctgagaagccagaggacgctcagcaaggccagcaggccatgtcactggccatcctccgtgtcatccggaacgcagacctctgcaaagccagaagagtaagcggggaaggcagcatctgaacacctcacatgactgcaccttaggaattaacctagtcgcgggcatgactgtacagtggaccagggcatctggtcctgatgacaggcaggtctgtggatccagtgtatataaatatatatcgagtatctctctttcacgcgttcctctacctagctagtgatagaaaagaaattgcatttgaacattgtacaagcttatgcaatatttttgacaaagggcaatttatgcatgtgtttgactatgtgcactagggtgtatatatatacatacatatgtgtgtatatgtatacacacacacacac

SEQ ID NO: 10365 - DNA, 3279 bp, Homo sapiens
  source 1..3279: mol_type = unassigned DNA
agtccttcctgagagcagctggggactagcaacctggatcaacccagggaggcccctggagaaggcaggcccagccaagcctgagtcttgctccctgggagaaaatgcttcaagctgatgggaagcctgcccagaagaggcaaggaggctgagggatagtcctcaggcctggcatcagaatagaggatgggcatgggggcctgttacctcccatgagggaagctgccagaccctcctaaatcttggcaccagctggttcaaatgccctggttccaccttgctgctgtttttttccaggcaacgtcacacctcctgaggacagccaggactccagcttttgctgagctttgcatcttgcctccttccttcaaaaggctccaggcccatgctcggctgtcttcaagtcccgcatgcccctggccaggcacctcaccgcccctccagcccagcccaatcctagagctcacctccaggacccagagtctgcccttctgcccagaatgactcaccattatttctagctcgagtgagaagacgtgatgaggagttgggctgcctgttggtgcatctcagattcctgcagcatctgatcagctctgcaaggaagagagcttcacgtctctggtcagccaagcgaggctgtctctccagctctcagagagctctcggggctctcctgcaggagaccaggccaatgctcctgtgcttcctggggccagtagcagcaccctgagctccctgccaccaggcagctgaaaggcatagcgtgaggtgcttctctcagtcccaattatgacagtggccaccggagacccagcagacgaggctgctgccctccctgggcacccacaggacacctatgacccagaggcagaccacgagtgctgtgagagggtggtgatcaacatctcagggctgcggtttgagacccagctaaagaccttagcccagtttccagagaccctcttaggggacccaaagaaacgaatgaggtactttgaccccctccgaaatgagtactttttcgatcggaaccgccctagctttgatgccattttgtactactaccagtcagggggccgattgaggcgacctgtgaatgtgcccttagatatattctctgaagaaattcggttttatgagctgggagaagaagcgatggagatgtttcgggaagatgaaggctacatcaaggaggaagagcgtcctctgcctgaaaatgagtttcagagacaagtgtggcttctctttgaatacccagagagctcagggcctgccaggattatagctattgtgtctgtcatggtgattctgatctcaattgtcagcttctgtctggaaacattgcccatcttccgggatgagaatgaagacatgcatggtagtggggtgaccttccacacctattccaacagcaccatcgggtaccagcagtccacttccttcacagaccctttcttcattgtagagacactctgcatcatctggttctcctttgaattcttggtgaggttctttgcctgtcccagcaaagccggcttcttcaccaacatcatgaacatcattgacattgtggccatcatcccctacttcatcaccctggggacagagttggctgagaagccagaggacgctcagcaaggccagcaggccatgtcactggccatcctccgtgtcatccggttggtaagagtctttaggattttcaagttgtccagacactccaaaggtctccagattctaggtcagaccctcaaagccagcatgagagaattgggcctcctgatattctttctcttcataggggtcatccttttctctagtgctgtgtattttgcagaggccgatgagcgagagtcccagttccccagcatcccagatgccttctggtgggcagtcgtctccatgacaactgtaggctatggagacatggttccgactaccattgggggaaagatagtgggttccctatgtgcgattgcaggtgtgttaactattgccttaccggtccctgtcattgtgtccaatttcaactacttctaccaccgggagacagagggagaggaacaggcccaatacttgcaagtgacaagctgtccaaagatcccatcctcccctgacctaaagaaaagtagaagtgcctctaccattagtaagtctgattacatggagatccaggagggtgtaaataacagtaatgaggactttagagaggaaaacttgaaaacagccaactgtaccttggctaacacaaactatgtgaatattaccaaaatgttaactgatgtctgattgaaacctattaccgtactcacagctcaatggaactaatgcagatgttgcataatagcctgcattgtagtcagtgtgttctacagtgtgtatctggttctgcatggaaagcaatagttgtgcaagtgacttttgatcttttgacttttgatttagaacacagaatatctatcatggctttcatgcacatcctcatcaccggcttatgaacttccaaagacgggagtcacctatcaagctaggatttcagatagacacgttgaggccacctcatatcccatacacagtgcaccatatcagtgccatcattccttcctaatgaaatgcacacaacatccaagagatgcactcccctccccaccatcccaccaccttatttgagcccacctgccctttcacagaggaacacaatcatggcttagctttaaatagctggtgtttgttcaaaaggtcatactcatttttgcattgaaaagaacacacagtcctgtgtgttggaattactttctgtgtcacaggctggagtttgtgaattgcagttgccaagtagatgctctggaggcttgtgtttcataacggaaaatgctgcattctgctttttctctgcagtgtcgatgtgagggaagcccgggggagggacagttagtatgaccgaatatgagttgtcaagtttcacatttgttcccttaggcctatggggagaagctaacaaaccaacagacctctaagcctctgatttcaccatttttgcaggctccagggtcacaaaaacatgtctggtttcttactggagtttgcagacatctgctttcccactgatgtggcccagctacactgacactgcagtgaaatttaccagtgatgcaatagagctgcatgggtgtttgttgcatgaatctcaatatttaaaacacaggagataacctattttcctagtagcctacacagtgttaatatttagagtattaataggcttggaatggtctt

SEQ ID NO: 10366 - DNA, 2827 bp, Homo sapiens
  source 1..2827: mol_type = unassigned DNA
tgagcctcggcggtccctcggctggacgccgggggcttaagagctgaactgcgcttgggcccgcagcaggagccgaccgcgcgggcaggagggggttaaggtggcgctagcggccgcggccagcgggagggtctggtcctctgcgcggaggcgagcgctgagtgcgccgaacggaatcccggccggagcccggggcgatggggagagggcccagacccctccccgccctggggccggcgggattgggtcggcagggggccagtccggaagccggcttcctccaggctccccctctcgctgctgccaagccgcctcgcagctaggcaggcggagcgtttattctgtgctccctgccgaggagatgtgagggattttctcttgggggagaaatcagtggtcgagcgcctgcccagctcaaatgccacccggctcagagggaggcctgcggcccagggatcccggagggagagcaacgtcacacctcctgaggacagccaggactccagcttttgctgagctttgcatcttgcctccttccttcaaaaggctccaggcccatgctcggctgtcttcaagtcccgcatgcccctggccaggcacctcaccgcccctccagcccagcccaatcctagagctcacctccaggacccagagtctgcccttctgcccagaatgactcaccattatttctagctcgagtgagaagacgtgatgaggagttgggctgcctgttggtgcatctcagattcctgcagcatctgatcagctctgcaaggaagagagcttcacgtctctggtcagccaagcgaggctgtctctccagctctcagagagctctcggggctctcctgcaggagaccaggccaatgctcctgtgcttcctggggccagtagcagcaccctgagctccctgccaccaggcagctgaaaggcatagcgtgaggtgcttctctcagtcccaattatgacagtggccaccggagacccagcagacgaggctgctgccctccctgggcacccacaggacacctatgacccagaggcagaccacgagtgctgtgagagggtggtgatcaacatctcagggctgcggtttgagacccagctaaagaccttagcccagtttccagagaccctcttaggggacccaaagaaacgaatgaggtactttgaccccctccgaaatgagtactttttcgatcggaaccgccctagctttgatgccattttgtactactaccagtcagggggccgattgaggcgacctgtgaatgtgcccttagatatattctctgaagaaattcggttttatgagctgggagaagaagcgatggagatgtttcgggaagatgaaggctacatcaaggaggaagagcgtcctctgcctgaaaatgagtttcagagacaagtgtggcttctctttgaatacccagagagctcagggcctgccaggattatagctattgtgtctgtcatggtgattctgatctcaattgtcagcttctgtctggaaacattgcccatcttccgggatgagaatgaagacatgcatggtagtggggtgaccttccacacctattccaacagcaccatcgggtaccagcagtccacttccttcacagaccctttcttcattgtagagacactctgcatcatctggttctcctttgaattcttggtgaggttctttgcctgtcccagcaaagccggcttcttcaccaacatcatgaacatcattgacattgtggccatcatcccctacttcatcaccctggggacagagttggctgagaagccagaggacgctcagcaaggccagcaggccatgtcactggccatcctccgtgtcatccggttggtaagagtctttaggattttcaagttgtccagacactccaaaggtctccagattctaggtcagaccctcaaagccagcatgagagaattgggcctcctgatattctttctcttcataggggtcatccttttctctagtgctgtgtattttgcagaggccgatgagcgagagtcccagttccccagcatcccagatgccttctggtgggcagtcgtctccatgacaactgtaggctatggagacatggttccgactaccattgggggaaagatagtgggttccctatgtgcgattgcaggtgtgttaactattgccttaccggtccctgtcattgtgtccaatttcaactacttctaccaccgggagacagagggagaggaacaggcccaatacttgcaagtgacaagctgtccaaagatcccatcctcccctgacctaaagaaaagtagaagtgcctctaccattagtaagtctgattacatggagatccaggagggtgtaaataacagtaatgaggactttagagaggaaaacttgaaaacagccaactgtaccttggctaacacaaactatgtgaatattaccaaaatgttaactgatgtctgattgaaacctattaccgtactcacagctcaatggaactaatgcagatgttgcataatagcctgcattgtagtcagtgtgttctacagtgtgtatctggttctgcatggaaagcaatagttgtgcaagtgacttttgatcttttgacttttgatttagaacacagaatatctatcatggctttcatgcacatcctcatcaccggcttatgaacttccaaagacgggagtcacctatcaagctaggatttcagatagacacgttgaggccacctcatatcccatacacagtgcaccatatcagtgccatcattccttcctaatgaaatgcacacaacatccaagagatgcactcccctccccacca

SEQ ID NO: 10367 - DNA, 2426 bp, Homo sapiens
  source 1..2426: mol_type = unassigned DNA
gggagtcggggagtggagagggccagccctgcagtgctgcctgttcctgcggctcctctcggtgggggcgaacacagcagaagagtttctgccacactgcggaccgcacctgctgcatttccctgcgaagccaaatctttgctgggcaacgtcacacctcctgaggacagccaggactccagcttttgctgagctttgcatcttgcctccttccttcaaaaggctccaggcccatgctcggctgtcttcaagtcccgcatgcccctggccaggcacctcaccgcccctccagcccagcccaatcctagagctcacctccaggacccagagtctgcccttctgcccagaatgactcaccattatttctagctcgagtgagaagacgtgatgaggagttgggctgcctgttggtgcatctcagattcctgcagcatctgatcagctctgcaaggaagagagcttcacgtctctggtcagccaagcgaggctgtctctccagctctcagagagctctcggggctctcctgcaggagaccaggccaatgctcctgtgcttcctggggccagtagcagcaccctgagctccctgccaccaggcagctgaaaggcatagcgtgaggtgcttctctcagtcccaattatgacagtggccaccggagacccagcagacgaggctgctgccctccctgggcacccacaggacacctatgacccagaggcagaccacgagtgctgtgagagggtggtgatcaacatctcagggctgcggtttgagacccagctaaagaccttagcccagtttccagagaccctcttaggggacccaaagaaacgaatgaggtactttgaccccctccgaaatgagtactttttcgatcggaaccgccctagctttgatgccattttgtactactaccagtcagggggccgattgaggcgacctgtgaatgtgcccttagatatattctctgaagaaattcggttttatgagctgggagaagaagcgatggagatgtttcgggaagatgaaggctacatcaaggaggaagagcgtcctctgcctgaaaatgagtttcagagacaagtgtggcttctctttgaatacccagagagctcagggcctgccaggattatagctattgtgtctgtcatggtgattctgatctcaattgtcagcttctgtctggaaacattgcccatcttccgggatgagaatgaagacatgcatggtagtggggtgaccttccacacctattccaacagcaccatcgggtaccagcagtccacttccttcacagaccctttcttcattgtagagacactctgcatcatctggttctcctttgaattcttggtgaggttctttgcctgtcccagcaaagccggcttcttcaccaacatcatgaacatcattgacattgtggccatcatcccctacttcatcaccctggggacagagttggctgagaagccagaggacgctcagcaaggccagcaggccatgtcactggccatcctccgtgtcatccggttggtaagagtctttaggattttcaagttgtccagacactccaaaggtctccagattctaggtcagaccctcaaagccagcatgagagaattgggcctcctgatattctttctcttcataggggtcatccttttctctagtgctgtgtattttgcagaggccgatgagcgagagtcccagttccccagcatcccagatgccttctggtgggcagtcgtctccatgacaactgtaggctatggagacatggttccgactaccattgggggaaagatagtgggttccctatgtgcgattgcaggtgtgttaactattgccttaccggtccctgtcattgtgtccaatttcaactacttctaccaccgggagacagagggagaggaacaggcccaatacttgcaagtgacaagctgtccaaagatcccatcctcccctgacctaaagaaaagtagaagtgcctctaccattagtaagtctgattacatggagatccaggagggtgtaaataacagtaatgaggactttagagaggaaaacttgaaaacagccaactgtaccttggctaacacaaactatgtgaatattaccaaaatgttaactgatgtctgattgaaacctattaccgtactcacagctcaatggaactaatgcagatgttgcataatagcctgcattgtagtcagtgtgttctacagtgtgtatctggttctgcatggaaagcaatagttgtgcaagtgacttttgatcttttgacttttgatttagaacacagaatatctatcatggctttcatgcacatcctcatcaccggcttatgaacttccaaagacgggagtcacctatcaagctaggatttcagatagacacgttgaggccacctcatatcccatacaca

SEQ ID NO: 10368 - DNA, 2496 bp, Homo sapiens
  source 1..2496: mol_type = unassigned DNA
ggggtctgcagatcctgtctggaggcaccacaataatagcaacacgtctctcccggggctggatcccgctgtgggcctggggtagctgctattgattatctcctccttgcctacttcattacgttggcaggagcctctcaccagtgcccctcaacttctgccctcccccatctccccggcccggcagcacccagctgagctctcctggaggttctggcaacgtcacacctcctgaggacagccaggactccagcttttgctgagctttgcatcttgcctccttccttcaaaaggctccaggcccatgctcggctgtcttcaagtcccgcatgcccctggccaggcacctcaccgcccctccagcccagcccaatcctagagctcacctccaggacccagagtctgcccttctgcccagaatgactcaccattatttctagctcgagtgagaagacgtgatgaggagttgggctgcctgttggtgcatctcagattcctgcagcatctgatcagctctgcaaggaagagagcttcacgtctctggtcagccaagcgaggctgtctctccagctctcagagagctctcggggctctcctgcaggagaccaggccaatgctcctgtgcttcctggggccagtagcagcaccctgagctccctgccaccaggcagctgaaaggcatagcgtgaggtgcttctctcagtcccaattatgacagtggccaccggagacccagcagacgaggctgctgccctccctgggcacccacaggacacctatgacccagaggcagaccacgagtgctgtgagagggtggtgatcaacatctcagggctgcggtttgagacccagctaaagaccttagcccagtttccagagaccctcttaggggacccaaagaaacgaatgaggtactttgaccccctccgaaatgagtactttttcgatcggaaccgccctagctttgatgccattttgtactactaccagtcagggggccgattgaggcgacctgtgaatgtgcccttagatatattctctgaagaaattcggttttatgagctgggagaagaagcgatggagatgtttcgggaagatgaaggctacatcaaggaggaagagcgtcctctgcctgaaaatgagtttcagagacaagtgtggcttctctttgaatacccagagagctcagggcctgccaggattatagctattgtgtctgtcatggtgattctgatctcaattgtcagcttctgtctggaaacattgcccatcttccgggatgagaatgaagacatgcatggtagtggggtgaccttccacacctattccaacagcaccatcgggtaccagcagtccacttccttcacagaccctttcttcattgtagagacactctgcatcatctggttctcctttgaattcttggtgaggttctttgcctgtcccagcaaagccggcttcttcaccaacatcatgaacatcattgacattgtggccatcatcccctacttcatcaccctggggacagagttggctgagaagccagaggacgctcagcaaggccagcaggccatgtcactggccatcctccgtgtcatccggttggtaagagtctttaggattttcaagttgtccagacactccaaaggtctccagattctaggtcagaccctcaaagccagcatgagagaattgggcctcctgatattctttctcttcataggggtcatccttttctctagtgctgtgtattttgcagaggccgatgagcgagagtcccagttccccagcatcccagatgccttctggtgggcagtcgtctccatgacaactgtaggctatggagacatggttccgactaccattgggggaaagatagtgggttccctatgtgcgattgcaggtgtgttaactattgccttaccggtccctgtcattgtgtccaatttcaactacttctaccaccgggagacagagggagaggaacaggcccaatacttgcaagtgacaagctgtccaaagatcccatcctcccctgacctaaagaaaagtagaagtgcctctaccattagtaagtctgattacatggagatccaggagggtgtaaataacagtaatgaggactttagagaggaaaacttgaaaacagccaactgtaccttggctaacacaaactatgtgaatattaccaaaatgttaactgatgtctgattgaaacctattaccgtactcacagctcaatggaactaatgcagatgttgcataatagcctgcattgtagtcagtgtgttctacagtgtgtatctggttctgcatggaaagcaatagttgtgcaagtgacttttgatcttttgacttttgatttagaacacagaatatctatcatggctttcatgcacatcctcatcaccggcttatgaacttccaaagacgggagtcacctatcaagctaggatttcagatagacacgttgaggccacctcatatcccatacac

SEQ ID NO: 10369 - DNA, 1584 bp, Homo sapiens
  source 1..1584: mol_type = unassigned DNA
gcccaatcctagagctcacctccaggacccagagtctgcccttctgcccagaatgactcaccattatttctagctcgagtgagaagacgtgatgaggagttgggctgcctgttggtgcatctcagattcctgcagcatctgatcagctctgcaaggaagagagcttcacgtctctggtcagatatattctctgaagaaattcggttttatgagctgggagaagaagcgatggagatgtttcgggaagatgaaggctacatcaaggaggaagagcgtcctctgcctgaaaatgagtttcagagacaagtgtggcttctctttgaatacccagagagctcagggcctgccaggattatagctattgtgtctgtcatggtgattctgatctcaattgtcagcttctgtctggaaacattgcccatcttccgggatgagaatgaagacatgcatggtagtggggtgaccttccacacctattccaacagcaccatcgggtaccagcagtccacttccttcacagaccctttcttcattgtagagacactctgcatcatctggttctcctttgaattcttggtgaggttctttgcctgtcccagcaaagccggcttcttcaccaacatcatgaacatcattgacattgtggccatcatcccctacttcatcaccctggggacagagttggctgagaagccagaggacgctcagcaaggccagcaggccatgtcactggccatcctccgtgtcatccggttggtaagagtctttaggattttcaagttgtccagacactccaaaggtctccagattctaggtcagaccctcaaagccagcatgagagaattgggcctcctgatattctttctcttcataggggtcatccttttctctagtgctgtgtattttgcagaggccgatgagcgagagtcccagttccccagcatcccagatgccttctggtgggcagtcgtctccatgacaactgtaggctatggagacatggttccgactaccattgggggaaagatagtgggttccctatgtgcgattgcaggtgtgttaactattgccttaccggtccctgtcattgtgtccaatttcaactacttctaccaccgggagacagagggagaggaacaggcccaatacttgcaagtgacaagctgtccaaagatcccatcctcccctgacctaaagaaaagtagaagtgcctctaccattagtaagtctgattacatggagatccaggagggtgtaaataacagtaatgaggactttagagaggaaaacttgaaaacagccaactgtaccttggctaacacaaactatgtgaatattaccaaaatgttaactgatgtctgattgaaacctattaccgtactcacagctcaatggaactaatgcagatgttgcataatagcctgcattgtagtcagtgtgttctacagtgtgtatctggttctgcatggaaagcaatagttgtgcaagtgacttttgatcttttgacttttgatttagaacacagaatatctatcatggctttcatgcacatcctcatcaccggcttatgaacttccaaagacg

SEQ ID NO: 10370 - DNA, 2569 bp, Homo sapiens
  source 1..2569: mol_type = unassigned DNA
gcggaggcgggcgcgcgccccgcaggggagggggcggagagcgcgagaaggagggaggaggcgtccccgtgcgggagcccggctgaccgcgccagacccagacagagcatcgcggctttggctgcaacaggcggtgggctcggctcgggggcggaggcggcgaaagggcggggagcgcgaggaggagcgacctggcctcaccgctgccgcctcttccccgccgcatggacgagcgcctcagccttctgcgctcgccgccgccgccctcagcccgccaccgcgcccaccctcctcagcgcccagcgagcagcggcggtgcccacacgctggtgaaccacggctacgcggagcccgccgcaggccgcgagctgccgcccgacatgaccgtggtgcccggggaccacctgctggagccggaggtggccgatggtggaggggccccgcctcaaggcggctgtggcggcggcggctgcgaccgctacgagccgctgccgccctcactgccggccgcgggcgagcaggactgctgcggggagcgcgtggtcatcaacatctccgggctgcgcttcgagacgcagctgaagaccctttgccagttccccgagacgctgctgggcgaccccaagcggcgcatgaggtacttcgacccgctccgcaacgagtacttcttcgaccgcaaccggcccagcttcgacgccatcctctactactatcagtccgggggccgcatccgccggccggtcaacgtgcccatcgacattttctccgaggagatccgcttctaccagctgggcgaggaggccatggagaagttccgcgaggacgagggcttcctgcgggaggaggagcggcccttgccccgccgcgacttccagcgccaggtgtggctgctcttcgagtaccccgagagctccgggccggcccggggcatcgccatcgtgtccgtgctggtcatcctcatctccattgtcatcttctgcctggagacgctgccggagttccgcgacgagaaggactaccccgcctcgacgtcgcaggactcattcgaagcagccggcaacagcacgtcggggtcccgcgcaggagcctccagcttctccgatcccttcttcgtggtggagacgctgtgcatcatctggttctccttcgaactgctggtgcggttcttcgcttgtcctagcaaagccaccttctcgcgaaacatcatgaacctgatcgacattgtggccatcattccttattttatcactctgggtaccgagctggccgaacgacagggcaatggacagcaggccatgtctctggccatcctgagggtcatccgcctggtaagggtcttccgcatcttcaagctgtcgcgccactccaaggggctgcagatcctcgggcaaacgctgaaggcgtccatgcgggagctgggattgctcatcttcttcctctttattggggtcatccttttctccagcgcggtctactttgccgaggcagacgaccccacttcaggtttcagcagcatcccggatgccttctggtgggcagtggtaaccatgacaacagtgggttacggcgatatgcacccagtgaccatagggggcaagattgtgggatctctctgtgccatcgccggtgtcttgaccatcgcattgccagttcccgtgattgtttccaacttcaattacttctaccaccgggagacagaaggggaagagcaatcccagtacatgcacgtgggaagttgccagcacctctcctcttcagccgaggagctccgaaaagcaaggagtaactcgactctgagtaagtcggagtatatggtgatcgaagaggggggtatgaaccatagcgctttcccccagacccctttcaaaacgggcaattccactgccacctgcaccacgaacaataatcccaactcttgtgtcaacatcaaaaagatattcaccgatgtttaatatgtgatacaagtgacatgctgtgctcagtattgtgtggaacgtgcccccttggtctgcctatgcccttgttttatacatttccagaccattcatcaaggaaaggacctgaagaagtggaaagcacacttcattctccctctccctgctgcttcatactgaaacaggtgcctgttttgcaagtgggctgcattctctcagctctccttttccctcttaccctctctctcttaacattgtaaacaacagacttacgttaaacttcatttctagtacacgccctatttaaaaaagagcagtacatcctgggaggaaatgaaactaaagaacagttagagtaactgtttaacctcagaattttaaaggcagttgtttctttcctaagcacatcaattcgtagtaaatgatgcttcggtttgatggacctttcaacgttatttattgaatatgtatttcggttgcctaccctgtagatatgtggatgaagagtctaactagaataatgacttgtaaacccaccatgagttatttggtttttgacttaaattcctatttgaatcccctttcccggaattttaagtgtctctacaactttgaataaagggaaatgcccaaga

SEQ ID NO: 10371 - DNA, 4172 bp, Homo sapiens
  source 1..4172: mol_type = unassigned DNA
gttcgcggccaggggaggcgtgtgctgctcccgcagccagcgagagcgagagagggatggatgttggaggaggaattcgggcttaacaagtgatcgctgctgtctaggattttgtttcttttcgggggaaccttgacttcctttcccaggcaatccctcctgtgctgaactccagaggaaccaggagtcttggggtcttctctggggcagccccaacccccacccccaggctccagccgcgaggactctgtgcacccctcgggccaggcaacagaacttgttccgtggatatttggagcctccacctgccaaacccgagtgattccttttaccaccccccgccccccacccaggatcattcttcccctcctccagctgttgcagcttgagggggaaaaacaagccagccggtggattttctttatttttatttttcgccccgccggggaacggtgaagtgcttcttctgcatgattttggctgaagaatgctctgcatttccttgatttctatggagacctcagagctggttttgcttctgctgacacctcatctagcaccttctctacctcccagggtctttgcctctatctgtggtttggcattgtacctgggtacaggaagcctttgatgaacttaaaaggagagcctggagaatcatcctgatagactttgagtagaaatggctggacatacttcaaaccacatcttaacatggttcgagccatcactagaaggcaagtgctaacagtaaaggcttatttgcattttatttacatttaatggactgagcattggccaatttccatggcagaaaaatatatttcattttctaggcacaacttctggctgtcagacacttgctgcctttgaatcttgcagcaacatcactaaccacatcccagacatatttccaaatttcaacatctacccccaaaacataggtgtctgagagactccagcattttcggacttcttagtcttgagagtgccaggctatttatctcgaccagccaagctctggagagcaatgttgaatccctgagaagagagagcatggggcgtgctgatttaaaaacagaaaatgcaaagttggactgaaaatatccttagtcttccaagcaatctgcttaagggttccaaacttaccttaatttggtgagaaaagaagctgccctatttttctttcttcttcttctacaactggaaccagccatttccgaaaaccaccaccatggaggttgcaatggtgagtgcggagagctcagggtgcaacagtcacatgccttatggttatgctgcccaggcccgggcccgggagcgggagaggcttgctcactccagggcagctgcagcagctgctgttgcagcggccacagctgctgtcgaaggtagcgggggttctggtgggggctcccaccaccaccaccagtcacgcggggcctgtacctcccatgaccctcagagcagccggggtagtcggaggaggaggcgacagcggtctgagaagaagaaagcccactaccggcagagcagcttccctcattgctctgacctgatgcccagtggctctgaggagaagatcctgagggagctgagtgaggaggaggaagatgaggaggaggaggaagaggaggaagaggagggaaggttttactatagtgaagatgaccatggtgatgagtgttcctacacggatctgctgcctcaggatgagggcggtggcggctacagttcagtccgctacagtgactgttgtgaacgtgtggtgataaatgtgtcaggcctacgctttgagacccaaatgaaaactctggcccagtttccagagactttgttgggagaccctgaaaagaggactcagtactttgaccctttgcgcaatgagtatttttttgacaggaaccgccccagctttgatgccatcttgtattattatcaatcaggaggccgcctgaagaggccagtcaatgtcccctttgatatcttcactgaggaggtgaagttctatcagttgggggaggaggccctgttgaagtttcgggaggacgagggctttgtgagagaagaggaagacagggccctccccgagaatgaatttaaaaagcagatttggctcctctttgaatatccagagagctccagtcctgcaaggggcatagccattgtgtccgtcctggtcatcttaatctccattgtcatcttttgcctggaaaccttgcctgagtttagggacgacagggatctcgtcatggcactgagtgctggcgggcatggtgggttgttgaatgatacttcagcaccccatctggagaactcagggcacacaatattcaatgaccccttcttcatcgtggaaacagtctgtattgtatggttttcctttgagtttgtggttcgctgctttgcttgtcccagccaagcactcttcttcaaaaacatcatgaacatcattgacattgtctccattttgccttacttcatcacactgggcactgacctggcccagcaacaggggggtggcaatggtcagcagcagcaggccatgtcctttgccatcctcagaatcattcgtctggtccgagtattccggatcttcaaactctccaggcactccaaaggcctgcagatcctgggccacaccctcagagccagcatgcgggaactgggccttctgatcttcttcctcttcattggggtcatcctcttttctagtgctgtgtattttgcagaggcggatgaacctactacccatttccaaagcatcccagatgcattttggtgggctgtggtgaccatgacaactgtgggctatggggacatgaagcccatcactgtagggggcaagattgtcgggtccctgtgtgccattgcgggtgtcttaaccattgctttgccagtgccagtgattgtctctaactttaactatttctaccacagagagactgaaaatgaggaacagacacagctaacgcagaatgcagtcagttgtccatacctcccctctaatttgctcaagaaatttcggagctctacttcttcttccctgggggacaagtcagagtatctagagatggaagaaggagttaaggaatctctgtgtgcaaaggaggagaagtgtcagggaaagggggatgacagtgagacagataaaaacaactgttctaatgcaaaggctgtggagactgatgtgtgaatctttttccacctgccactgctcccccctcagcatctccaaatatatttatgcatagagagtgcagttatgaaaatgaaatatgcaaatgatccaatgcatacagtagtacactatttaatggttatacatggcataattgttactaaacttgtattacatatcaaataaatgatacatcttggagaagagggaggaataggagcaaatctatctttatatttttattagaatgcaagaattttgcacattaactggaaaagatgttaacagtaaagatggagagagagagtgtgtgcgtgtgtgtgtatatgtgtgtgtgtgtgaagtaaattgtcaatgttagtaattgtgcagtgaagggaaaagttggcattttgaagtatttactatgtaagaactaatgaatctgagcagtcatttatcagtgctttaacagcatatcgtatgtctttggattctgtagttgttttttaaaaattgtaagaaatactgtgtagagaaaaaagaaagtaaattatttaatagactataggtcacaattttatcttggatttaattaaaatttatttttaactggaaattaacttttaaaaaggctgcaagggcctttagaaattgattatattttgttattaattttgggaagacttaacagcaaatgtctaacattatagaataagtgaaattggagaatatgtaataagttttgtttgcaggtaacaggactggatttttttttctttgcactactttatatgctggagattgagagagacttcaaactgtgaatgtttactaatgtaacagttcaatgacaatcattggaagaatgatttctttagtcttattttattgttttcttttcattgtgtgagactaatgatcatgcagataacatcacaggattctctcctcttttaaaatctaaataactgattgacaaaggaattatgaagtaaaatttagcaactga

SEQ ID NO: 10372 - DNA, 545 bp, Homo sapiens
  source 1..545: mol_type = unassigned DNA
attttcccaaacccggggatgcggtgaagtgcttcttctgcatgattttggctgaagaatgctctgcatttccttgatttctatggagacctcagagctggttttgcttctgctgacacctcatctagcaccttctctacctcccagggtctttgcctctatctgtggtttggcattgtacctgggtacaggaagcctttgatgaacttaaaaggagagcctggagaatcatcctgatagactttgagtagaaatggctggacatacttcaaaccacatcttaacatggttcgagccatcactagaaggcaagtgctaacagtaaaggcttatttgcattttatttacatttaatggactgagcattggccaatttccatggcagaaaaatatatttcattttctaggcacaacttctggctgtcagacacttgctgcctttgaatcttgcagcaacatcactaaccacatcccagacatatttccaaatttcaacatctacccccaaaacataggtgtctgagagactccagcattttcggact

SEQ ID NO: 10373 - DNA, 580 bp, Homo sapiens
  source 1..580: mol_type = unassigned DNA
attccctttcaggatgctcctacagcagctgcctaatactctcagttgcagtcagatgttggctgggaccacagtcatctaaggatactgctcaagctggctgttgtctggaaactcagctggggctactgatcagagcacctgcatgtggctgtccagcaaggcaatgttaaggaatcttggaaaatcaggactcagagtttcttgcttgggtcttggaacatgggtgacatttggaggtcaaatttcagatgaggtaagttacctttggcctctattatgctaatgaaagaaaatgcagagagagctgtattgcaggagtcctcttcctgggaccctgacactctacagggataaggtttaattcacaggaaatggtaaaattgactcagagattattgttgattttatttttcctgttgtattttttacatttagactattaatagcccttgaagctgtacattatatatgcaggttgaacagtcagagaatgaaacaatttggaattaacattagtcactttatgaaaagattgtattgctgtgatgttgttttgctttatttgtttgtttacttt

SEQ ID NO: 10374 - DNA, 567 bp, Homo sapiens
  source 1..567: mol_type = unassigned DNA
attccctttcaggatgctcctacagcagctgcctaatactctcagttgcagtcagatgttggctgggaccacagtcatctaaggatactgctcaagctggctgttgtctggaaactcagctggggctactgatcagagcacctgcatgtggctgtccagcaaggcaatgttaaggtcccatccagatctactgaatcataatctccagaagtgagatccagaacctgcattttcaggctgggaatcttggaaaatcaggactcagagtttcttgcttgggtcttggaacatgggtgacatttggaggtcaaatttcagatgaggttgctgaacggctgatgaccatcgcctatgaaagtggtgttaacctctttgatactgccgaagtctatgctgctggaaaggctgaagtgattctggggagcatcatcaagaagaaaggctggaggaggtccagtctggtcataacaaccaaactctactggggtggaaaagctgaaacagaaagagggctgtcaagaaagcatattattgaaggattgaagggctccctccagaggctgcagc

SEQ ID NO: 10375 - DNA, 531 bp, Homo sapiens
  source 1..531: mol_type = unassigned DNA
attccctttcaggatgctcctacagcagctgcctaatactctcagttgcagtcagatgttggctgggaccacagtcatctaaggatactgctcaagctggctgttgtctggaaactcagctggggctactgatcagagcacctgcatgtggctgtccagcaaggcaatgttaaggaatcttggaaaatcaggactcagagtttcttgcttgggtcttggaacatgggtgacatttggaggtcaaatttcagatgaggttgctgaacggctgatgaccatcgcctatgaaagtggtgttaacctctttgatactgccgaagtctatgctgctggaaaggctgaagtgattctggggagcatcatcaagaagaaaggctggaggaggtccagtctggtcataacaaccaaactctactggggtggaaaagctgaaacagaaagagggctgtcaagaaagcatattattgaagaaattgtccgagccatgacacatgtgataaaccaaggcatggcgatgtactggggcacctc

SEQ ID NO: 10376 - DNA, 3122 bp, Homo sapiens
  source 1..3122: mol_type = unassigned DNA
agaaaaatcaattcagattactttgatgacagtgacttccagtcttctctgaaagatctccacgatgctggcagcccggacaggggcagcggggagtcagatctcagaggagaacaccaagttaaggagacagtctgggttttctgtagcagggaaagacaaatctcccaagaaagcctcagaaaacgctaaagacagcagccttagtccctcaggggaaagccagctcagggcgcgtcaactggctctgctgcgcgaagtggagatgaactggtacctaaagctctgcgacctgtccagcgagcacaccaccgtctgcaccacaggcatgccgcacaggaatcttggaaaatcaggactcagagtttcttgcttgggtcttggaacatgggtgacatttggaggtcaaatttcagatgaggttgctgaacggctgatgaccatcgcctatgaaagtggtgttaacctctttgatactgccgaagtctatgctgctggaaaggctgaagtgattctggggagcatcatcaagaagaaaggctggaggaggtccagtctggtcataacaaccaaactctactggggtggaaaagctgaaacagaaagagggctgtcaagaaagcatattattgaaggattgaagggctccctccagaggctgcagctcgagtatgtggatgtggtctttgcaaatcgaccggacagtaacactcccatggaagaaattgtccgagccatgacacatgtgataaaccaaggcatggcgatgtactggggcacctcgagatggagtgctatggagatcatggaagcctattctgtagcaagacagttcaatatgatcccaccggtctgtgaacaagctgagtaccatcttttccagagagagaaagtggaggtccagctgccagagctctaccacaaaataggtgttggcgcaatgacatggtctccacttgcctgtggaatcatctcaggaaaatacggaaacggggtgcctgaaagttccagggcttcactgaagtgctaccagtggttgaaagaaagaattgtaagtgaagaagggagaaaacagcaaaacaagctaaaagacctttccccaattgcggagcgtctgggatgcacactacctcagctagctgttgcgtggtgcctgagaaatgaaggtgtgagttctgtgctcctgggatcatccactcctgaacaactcattgaaaaccttggtgccattcaggttctcccaaagatgacatcacatgtggtaaatgagattgataacatactgcgcaacaagccctacagcaagaaggactatagatcataaggcaatgcatgaaccacagaagctgcatggttaaaatagcggcctgtgcccagtacagaaaggtgttactaaccagtcttttgaatcacttagcagcttgctgctcaacctctagtgtccctccctggattctttgaggtgtctgctgtcgctaccactgtgcacatctgaaaactcacaaccaagaaaatccattctattttcttatcttggactggagtcacctattcttgcattgctgtatacacctcatgcttatgcaatgggaagaatatgggggccagggggtgtggtactaccttcaggcatttggtaactcaaagaaggctgtacagatatattttttcaaaagaacaaaatccacagatgcaatgtgagttgcgtaagaaacagagtagatagactaaattcagtgaaggaaaggaattgagagatttttcttagtaaatagattattgttaagtaaatagttattaaaaatatatctcactgcaaaaaaaaaaaagcagtatcttcactcaaaagtcttgcttggaagaataagcagaaataattttatatattttttttctattttcacattcatactaacaagttttgttccatttgttattcaataaaacaaaaatttctaggtatttgctttattacctttcaaatatttactgttgcttggccccaagaatggccttgtacaacttatccagaatgtctattaggattctaatgttatgtccacttacaagtagagacagtaaaaggatgaatacccaatctttagtgacaatgcagctgatttatgaaagagagggctacactgctatggaaacttagcttcaaagaaaatgcaatgtatctgcaattaggtgttcattttttactacattttattaaaacctgctttatactttcaactgcttgtaggcacaacttctgcaagtttaaatatttgagctttacaaataaacatacacatgctcagttttttaagtaaacctgtaaaatacccaggaaggcaaatgttcattgtttaattagcactgggattttataatataatgtttggtatttttgaggcattgttaacatgaaagtcaaccactggctttgtgaaaaatgctatgtcactattcagaatatgctgggtaaattgacttgcctagtgaaaagcaaaatgttaaagaaagaacttctggttctataatcatattatatgcactaaactatatgcatgaaagttctttgcatggattaatggggcttacccttgttgcactcgaaatctgaggtgtatctagccctgccactattggctacttaccctcattaatatcccacttgagaaaaattgtgagactatactgtgtcaatatctgtaaaaagagagaaaacatgttttgtttttttttgaagggggtggtgtgggagtggccctttaactctatttggctatctgaggatgtacaaaattctcatttaattttctggtcagcaagttccccacacagaaatcactctgaggtttacagaagaactgtaatattattttaaaatgcgatttttctgtcattagttctagatatgtacttcatggttaaattctaaatctgaaaatgctagtgggagatatcaagaaattttctttttgattactagtacctgtattctaacagagagtttgaattttttgcccgtgttatcagaatgatggaaattgatcattttcagttgttcattgtgtattcaatccagcgaactgctgtatgtatagaggagctgaggtgctgtctaatgggaa

SEQ ID NO: 10377 - DNA, 1806 bp, Homo sapiens
  source 1..1806: mol_type = unassigned DNA
agtgacttccagtcttctctgaaagatctccacgatgctggcagcccggacaggggcagcggggagtcagatctcagaggagaacaccaagttaaggagacagtctgggttttctgtagcagggaaagacaaatctcccaagaaagcctcagaaaacgctaaagacagcagccttagtccctcaggggaaagccagctcagggcgcgtcaactggctctgctgcgcgaagtggagatgaactggtacctaaagctctgcgacctgtccagcgagcacaccaccgtctgcaccacaggcatgccgcacaggaatcttggaaaatcaggactcagagtttcttgcttgggtcttggaacatgggtgacatttggaggtcaaatttcagatgaggttgctgaacggctgatgaccatcgcctatgaaagtggtgttaacctctttgatactgccgaagtctatgctgctggaaaggctgaagtgattctggggagcatcatcaagaagaaaggctggaggaggtccagtctggtcataacaaccaaactctactggggtggaaaagctgaaacagaaagagggctgtcaagaaagcatattattgaagaaattgtccgagccatgacacatgtgataaaccaaggcatggcgatgtactggggcacctcgagatggagtgctatggagatcatggaagcctattctgtagcaagacagttcaatatgatcccaccggtctgtgaacaagctgagtaccatcttttccagagagagaaagtggaggtccagctgccagagctctaccacaaaataggtgttggcgcaatgacatggtctccacttgcctgtggaatcatctcaggaaaatacggaaacggggtgcctgaaagttccagggcttcactgaagtgctaccagtggttgaaagaaagaattgtaagtgaagaagggagaaaacagcaaaacaagctaaaagacctttccccaattgcggagcgtctgggatgcacactacctcagctagctgttgcgtggtgcctgagaaatgaaggtgtgagttctgtgctcctgggatcatccactcctgaacaactcattgaaaaccttggtgccattcaggttctcccaaagatgacatcacatgtggtaaatgagattgataacatactgcgcaacaagccctacagcaagaaggactatagatcataaggcaatgcatgaaccacagaagctgcatggttaaaatagcggcctgtgcccagtacagaaaggtgttactaaccagtcttttgaatcacttagcagcttgctgctcaacctctagtgtccctccctggattctttgaggtgtctgctgtcgctaccactgtgcacatctgaaaactcacaaccaagaaaatccattctattttcttatcttggactggagtcacctattcttgcattgctgtatacacctcatgcttatgcaatgggaagaatatgggggccagggggtgtggtactaccttcaggcatttggtaactcaaagaaggctgtacagatatattttttcaaaagaacaaaatccacagatgcaatgtgagttgcgtaagaaacagagtagatagactaaattcagtgaaggaaaggaattgagagatttttcttagtaaatagattattgttaagtaaatagttattaaaaatatatctcactgcaaaaaaaaaaaagcagtatcttcactcaaaagtcttgcttggaagaataagcagaaataattttatatattttttttctattttcacattcatactaacaagtttt

SEQ ID NO: 10378 - DNA, 3301 bp, Homo sapiens
  source 1..3301: mol_type = unassigned DNA
atgcacaggcctgggcagggacacacaaccaacagctctgtcgggaacttaggagcctgctcgcctacaaaaatgataagagagatctaaagaaaacaagctaaaccttttgagggacatactgaagccagataacccaaggtattcacagcaagatacagtgagtcttaaagttaagcaccgtgcaattagctttgcttccttgggtttttgaaacatgcatctgtataaacctgcctgtgcagacatcccgagccccaagctgggtctgccaaaatccagtgaatcggctctaaaatgtagatggcacctagcagtgaccaagactcagcctcaggcggcctgcaaacctgtgaggcccagtggagcagccgaacagaaatatgtggaaaagtttctacgtgttcatggaatttcgttgcaggaaaccaccagagcagagacgggcatggcatacaggaatcttggaaaatcaggactcagagtttcttgcttgggtcttggaacatgggtgacatttggaggtcaaatttcagatgaggttgctgaacggctgatgaccatcgcctatgaaagtggtgttaacctctttgatactgccgaagtctatgctgctggaaaggctgaagtgattctggggagcatcatcaagaagaaaggctggaggaggtccagtctggtcataacaaccaaactctactggggtggaaaagctgaaacagaaagagggctgtcaagaaagcatattattgaaggattgaagggctccctccagaggctgcagctcgagtatgtggatgtggtctttgcaaatcgaccggacagtaacactcccatggaagaaattgtccgagccatgacacatgtgataaaccaaggcatggcgatgtactggggcacctcgagatggagtgctatggagatcatggaagcctattctgtagcaagacagttcaatatgatcccaccggtctgtgaacaagctgagtaccatcttttccagagagagaaagtggaggtccagctgccagagctctaccacaaaataggtgttggcgcaatgacatggtctccacttgcctgtggaatcatctcaggaaaatacggaaacggggtgcctgaaagttccagggcttcactgaagtgctaccagtggttgaaagaaagaattgtaagtgaagaagggagaaaacagcaaaacaagctaaaagacctttccccaattgcggagcgtctgggatgcacactacctcagctagctgttgcgtggtgcctgagaaatgaaggtgtgagttctgtgctcctgggatcatccactcctgaacaactcattgaaaaccttggtgccattcaggttctcccaaagatgacatcacatgtggtaaatgagattgataacatactgcgcaacaagccctacagcaagaaggactatagatcataaggcaatgcatgaaccacagaagctgcatggttaaaatagcggcctgtgcccagtacagaaaggtgttactaaccagtcttttgaatcacttagcagcttgctgctcaacctctagtgtccctccctggattctttgaggtgtctgctgtcgctaccactgtgcacatctgaaaactcacaaccaagaaaatccattctattttcttatcttggactggagtcacctattcttgcattgctgtatacacctcatgcttatgcaatgggaagaatatgggggccagggggtgtggtactaccttcaggcatttggtaactcaaagaaggctgtacagatatattttttcaaaagaacaaaatccacagatgcaatgtgagttgcgtaagaaacagagtagatagactaaattcagtgaaggaaaggaattgagagatttttcttagtaaatagattattgttaagtaaatagttattaaaaatatatctcactgcaaaaaaaaaaaagcagtatcttcactcaaaagtcttgcttggaagaataagcagaaataattttatatattttttttctattttcacattcatactaacaagttttgttccatttgttattcaataaaacaaaaatttctaggtatttgctttattacctttcaaatatttactgttgcttggccccaagaatggccttgtacaacttatccagaatgtctattaggattctaatgttatgtccacttacaagtagagacagtaaaaggatgaatacccaatctttagtgacaatgcagctgatttatgaaagagagggctacactgctatggaaacttagcttcaaagaaaatgcaatgtatctgcaattaggtgttcattttttactacattttattaaaacctgctttatactttcaactgcttgtaggcacaacttctgcaagtttaaatatttgagctttacaaataaacatacacatgctcagttttttaagtaaacctgtaaaatacccaggaaggcaaatgttcattgtttaattagcactgggattttataatataatgtttggtatttttgaggcattgttaacatgaaagtcaaccactggctttgtgaaaaatgctatgtcactattcagaatatgctgggtaaattgacttgcctagtgaaaagcaaaatgttaaagaaagaacttctggttctataatcatattatatgcactaaactatatgcatgaaagttctttgcatggattaatggggcttacccttgttgcactcgaaatctgaggtgtatctagccctgccactattggctacttaccctcattaatatcccacttgagaaaaattgtgagactatactgtgtcaatatctgtaaaaagagagaaaacatgttttgtttttttttgaagggggtggtgtgggagtggccctttaactctatttggctatctgaggatgtacaaaattctcatttaattttctggtcagcaagttccccacacagaaatcactctgaggtttacagaagaactgtaatattattttaaaatgcgatttttctgtcattagttctagatatgtacttcatggttaaattctaaatctgaaaatgctagtgggagatatcaagaaattttctttttgattactagtacctgtattctaacagagagtttgaattttttgcccgtgttatcagaatgatggaaattgatcattttcagttgttcattgtgtattcaatccagcgaactgctgtatgtatagaggagctgaggtgctgtctaatgggaaatgtgatttgattgatttatttgcttagagtaataaaagcattttgtgcattcaatctt

SEQ ID NO: 10379 - DNA, 552 bp, Homo sapiens
  source 1..552: mol_type = unassigned DNA
acagatgctctttccatgccatgcagctgctgctgtggggtgggagaagggtggcatcggcaattcaccgctgtctttcctactctcttcactgcctttttcagcgatatgaagttaaaaccaggaatcttggaaaatcaggactcagagtttcttgcttgggtcttggaacatgggtgacatttggaggtcaaatttcagatgaggttgctgaacggctgatgaccatcgcctatgaaagtggtgttaacctctttgatactgccgaagtctatgctgctggaaaggctgaagtgattctggggagcatcatcaagaagaaaggctggaggaggtccagtctggtcataacaaccaaactctactggggtggaaaagctgaaacagaaagagggctgtcaagaaagcatattattgaaggattgaagggctccctccagaggctgcagctcgagtatgtggatgtggtctttgcaaatcgaccggacagtaacactcccatggaagaaattgtccgagccatgacacatgtgataaaccaaggcatggcga

SEQ ID NO: 10380 - DNA, 4086 bp, Homo sapiens
  source 1..4086: mol_type = unassigned DNA
agttccaactgttgtgctgcagcagatttggtctgagtctgggcagagcccctttttatggagcaaccctcccgatttgttacagcaagagcctggtgcaagtgatctttgccttcccatcgcacacaaaggcaaagagctccttaaagggacctgcctgctcctccgtgcagctgcaaacccgtgtcggtgcaggctcagcaacccaggctttcgctcgagaatgagtggggaggggtcttgaggagcccccacgtcctcccggagcggaggcgggagggagctgacagccggagtggatggagaccaccagtccgaggggacccgcttgcgattagctgcttcttgggatgctccgcgcgccagttgagcatcctgcctgtggtccaggggatgctggcggcgcatcttgcggtaagcctgcgctgatttgagccatcgcccagaagcgagcccgcattcagacaccgcggaccggctccgcgaagggctgcgtgcagtcaccatgaatgctcagctctaggcttctgtaaaaacctcccccactgcatggatttggctgtttaatcagccgagattacagcccgggaagatttgcaaacctgattctccctccagctgctgtgacaacttcggggccgtctgtttacttctctgggtccccggggactctttcctgcatcgcagccccttgtgccactttgtgggcttggctcgaaagtcagccgccaggactcctctgacggcatccccaggaagggggagcaaggagggcttaaaagaaaagcagaaatccccgcaactgctcaacctctcgtgactgcctgtgttctggggttctgagagggaccgtgcgctgcctggggaagcaatgcaagtctccatagcctgcacagagcacaatttgaagagtcggaatggtgaggaccgacttctgagcaagcagagctccaccgcccccaatgtggtgaacgcagcccgggccaaattccgcacggtcgctatcatcgcgcgcagcctggggacgttcacgcctcagcatcacatttctctcaaagagtccaccgcaaagcagactggcatgaaatataggaatcttggaaaatcaggactcagagtttcttgcttgggtcttggaacatgggtgacatttggaggtcaaatttcagatgaggttgctgaacggctgatgaccatcgcctatgaaagtggtgttaacctctttgatactgccgaagtctatgctgctggaaaggctgaagtgattctggggagcatcatcaagaagaaaggctggaggaggtccagtctggtcataacaaccaaactctactggggtggaaaagctgaaacagaaagagggctgtcaagaaagcatattattgaaggattgaagggctccctccagaggctgcagctcgagtatgtggatgtggtctttgcaaatcgaccggacagtaacactcccatggaagaaattgtccgagccatgacacatgtgataaaccaaggcatggcgatgtactggggcacctcgagatggagtgctatggagatcatggaagcctattctgtagcaagacagttcaatatgatcccaccggtctgtgaacaagctgagtaccatcttttccagagagagaaagtggaggtccagctgccagagctctaccacaaaataggtgttggcgcaatgacatggtctccacttgcctgtggaatcatctcaggaaaatacggaaacggggtgcctgaaagttccagggcttcactgaagtgctaccagtggttgaaagaaagaattgtaagtgaagaagggagaaaacagcaaaacaagctaaaagacctttccccaattgcggagcgtctgggatgcacactacctcagctagctgttgcgtggtgcctgagaaatgaaggtgtgagttctgtgctcctgggatcatccactcctgaacaactcattgaaaaccttggtgccattcaggttctcccaaagatgacatcacatgtggtaaatgagattgataacatactgcgcaacaagccctacagcaagaaggactatagatcataaggcaatgcatgaaccacagaagctgcatggttaaaatagcggcctgtgcccagtacagaaaggtgttactaaccagtcttttgaatcacttagcagcttgctgctcaacctctagtgtccctccctggattctttgaggtgtctgctgtcgctaccactgtgcacatctgaaaactcacaaccaagaaaatccattctattttcttatcttggactggagtcacctattcttgcattgctgtatacacctcatgcttatgcaatgggaagaatatgggggccagggggtgtggtactaccttcaggcatttggtaactcaaagaaggctgtacagatatattttttcaaaagaacaaaatccacagatgcaatgtgagttgcgtaagaaacagagtagatagactaaattcagtgaaggaaaggaattgagagatttttcttagtaaatagattattgttaagtaaatagttattaaaaatatatctcactgcaaaaaaaaaaaagcagtatcttcactcaaaagtcttgcttggaagaataagcagaaataattttatatattttttttctattttcacattcatactaacaagttttgttccatttgttattcaataaaacaaaaatttctaggtatttgctttattacctttcaaatatttactgttgcttggccccaagaatggccttgtacaacttatccagaatgtctattaggattctaatgttatgtccacttacaagtagagacagtaaaaggatgaatacccaatctttagtgacaatgcagctgatttatgaaagagagggctacactgctatggaaacttagcttcaaagaaaatgcaatgtatctgcaattaggtgttcattttttactacattttattaaaacctgctttatactttcaactgcttgtaggcacaacttctgcaagtttaaatatttgagctttacaaataaacatacacatgctcagttttttaagtaaacctgtaaaatacccaggaaggcaaatgttcattgtttaattagcactgggattttataatataatgtttggtatttttgaggcattgttaacatgaaagtcaaccactggctttgtgaaaaatgctatgtcactattcagaatatgctgggtaaattgacttgcctagtgaaaagcaaaatgttaaagaaagaacttctggttctataatcatattatatgcactaaactatatgcatgaaagttctttgcatggattaatggggcttacccttgttgcactcgaaatctgaggtgtatctagccctgccactattggctacttaccctcattaatatcccacttgagaaaaattgtgagactatactgtgtcaatatctgtaaaaagagagaaaacatgttttgtttttttttgaagggggtggtgtgggagtggccctttaactctatttggctatctgaggatgtacaaaattctcatttaattttctggtcagcaagttccccacacagaaatcactctgaggtttacagaagaactgtaatattattttaaaatgcgatttttctgtcattagttctagatatgtacttcatggttaaattctaaatctgaaaatgctagtgggagatatcaagaaattttctttttgattactagtacctgtattctaacagagagtttgaattttttgcccgtgttatcagaatgatggaaattgatcattttcagttgttcattgtgtattcaatccagcgaactgctgtatgtatagaggagctgaggtgctgtctaatgggaaatgtgatttgattgatttatttgcttagagtaataaaagcattttgtgcattcaatcttacaatagattttatctgatctttcactgtaaggcttatgtgtattttccatatatgtaaaacatacacatgtaaaatatatgtggccataaattaggcaataatcatctaaataaaaattatattggcagctaagctgcactgaatactcaa

SEQ ID NO: 10381 - DNA, 1119 bp, Homo sapiens
  source 1..1119: mol_type = unassigned DNA
atgcaagtctccatagcctgcacagagcacaatttgaagagtcggaatggtgaggaccgacttctgagcaagcagagctccaccgcccccaatgtggtgaacgcagcccgggccaaattccgcacggtcgctatcatcgcgcgcagcctggggacgttcacgcctcagcatcacatttctctcaaagagtccaccgcaaagcagactggcatgaaatataggaatcttggaaaatcaggactcagagtttcttgcttgggtcttggaacatgggtgacatttggaggtcaaatttcagatgaggttgctgaacggctgatgaccatcgcctatgaaagtggtgttaacctctttgatactgccgaagtctatgctgctggaaaggctgaagtgattctggggagcatcatcaagaagaaaggctggaggaggtccagtctggtcataacaaccaaactctactggggtggaaaagctgaaacagaaagagggctgtcaagaaagcatattattgaagaaattgtccgagccatgacacatgtgataaaccaaggcatggcgatgtactggggcacctcgagatggagtgctatggagatcatggaagcctattctgtagcaagacagttcaatatgatcccaccggtctgtgaacaagctgagtaccatcttttccagagagagaaagtggaggtccagctgccagagctctaccacaaaataggtgttggcgcaatgacatggtctccacttgcctgtggaatcatctcaggaaaatacggaaacggggtgcctgaaagttccagggcttcactgaagtgctaccagtggttgaaagaaagaattgtaagtgaagaagggagaaaacagcaaaacaagctaaaagacctttccccaattgcggagcgtctgggatgcacactacctcagctagctgttgcgtggtgcctgagaaatgaaggtgtgagttctgtgctcctgggatcatccactcctgaacaactcattgaaaaccttggtgccattcaggttctcccaaagatgacatcacatgtggtaaatgagattgataacatactgcgcaacaagccctacagcaagaaggactatagatcataa

SEQ ID NO: 10382 - DNA, 576 bp, Homo sapiens
  source 1..576: mol_type = unassigned DNA
atagcctgcacagagcacaatttgaagagtcggaatggtgaggaccgacttctgagcaagcagagctccaccgcccccaatgtggtgaacgcagcccgggccaaattccgcacggtcgctatcatcgcgcgcagcctggggacgttcacgcctcagcatcacatttctctcaaagagtccaccgcaaagcagactggcatgaaatataggaacatgggtgacatttggaggtcaaatttcagatgaggttgctgaacggctgatgaccatcgcctatgaaagtggtgttaacctctttgatactgccgaagtctatgctgctggaaaggctgaagtgattctggggagcatcatcaagaagaaaggctggaggaggtccagtctggtcataacaaccaaactctactggggtggaaaagctgaaacagaaagagggctgtcaagaaagcatattattgaaggattgaagggctccctccagaggctgcagctcgagtatgtggatgtggtctttgcaaatcgaccggacagtaacactcccatggaagaaattgtccgagccatgacacatgtgat

SEQ ID NO: 10383 - DNA, 555 bp, Homo sapiens
  source 1..555: mol_type = unassigned DNA
agctttgcctgaggcctctgggcttcatgcaggaggaggagatcccagaacaaaatcaaccccattttgcaaaccaggaagctaaatttacagagaggtcagatgatttgcctacgtttatttttctagttgctgaacggctgatgaccatcgcctatgaaagtggtgttaacctctttgatactgccgaagtctatgctgctggaaaggctgaagtgattctggggagcatcatcaagaagaaaggctggaggaggtccagtctggtcataacaaccaaactctactggggtggaaaagctgaaacagaaagagggctgtcaagaaagcatattattgaagcaaattcttgaaagaaaccaaacttcaactctgaatagtgctcatatttagattttggggtttgtttcctgcttctgctcccaggattgaagggctccctccagaggctgcagctcgagtatgtggatgtggtctttgcaaatcgaccggacagtaacactcccatggaagaaattgtccgagccatgacacatgtgataaaccaaggcatgg

SEQ ID NO: 10384 - DNA, 555 bp, Homo sapiens
  source 1..555: mol_type = unassigned DNA
gtgttgattcaatggctgctctacaatggcgcctgagattttgctgagctgtgggtggcaggagttttacaacagtcacagctctgtctcagcctcaaggaaaaagtcacaagctttcaggttgctgaacggctgatgaccatcgcctatgaaagtggtgttaacctctttgatactgccgaagtctatgctgctggaaaggctgaagtgattctggggagcatcatcaagaagaaaggctggaggaggtccagtctggtcataacaaccaaactctactggggtggaaaagctgaaacagaaagagggctgtcaagaaagcatattattgaaggattgaagggctccctccagaggctgcagctcgagtatgtggatgtggtctttgcaaatcgaccggacagtaacactcccatggaagaaattgtccgagccatgacacatgtgataaaccaaggcatggcgatgtactggggcacctcgagatggagtgctatggagatcatggaagcctattctgtagcaagacagttcaatatgatcccaccggtctgt

SEQ ID NO: 10385 - DNA, 1546 bp, Homo sapiens
  source 1..1546: mol_type = unassigned DNA
ctttgggcaggctaaatcccagccttcaagtaacccctcagtgccctatgtctgaaggaaagaatacttctgtcctatggatactggctgagacttctttctttccctctccactaaaactaagaaaaataaggagtggttagtgagaggttgctgaacggctgatgaccatcgcctatgaaagtggtgttaacctctttgatactgccgaagtctatgctgctggaaaggctgaagtgattctggggagcatcatcaagaagaaaggctggaggaggtccagtctggtcataacaaccaaactctactggggtggaaaagctgaaacagaaagagggctgtcaagaaagcatattattgaaggattgaagggctccctccagaggctgcagctcgagtatgtggatgtggtctttgcaaatcgaccggacagtaacactcccatggaagaaattgtccgagccatgacacatgtgataaaccaaggcatggcgatgtactggggcacctcgagatggagtgctatggagatcatggaagcctattctgtagcaagacagttcaatatgatcccaccggtctgtgaacaagctgagtaccatcttttccagagagagaaagtggaggtccagctgccagagctctaccacaaaataggtgttggcgcaatgacatggtctccacttgcctgtggaatcatctcaggaaaatacggaaacggggtgcctgaaagttccagggcttcactgaagtgctaccagtggttgaaagaaagaattgtaagtgaagaagggagaaaacagcaaaacaagctaaaagacctttccccaattgcggagcgtctgggatgcacactacctcagctagctgttgcgtggtgcctgagaaatgaaggtgtgagttctgtgctcctgggatcatccactcctgaacaactcattgaaaaccttggtgccattcaggttctcccaaagatgacatcacatgtggtaaatgagattgataacatactgcgcaacaagccctacagcaagaaggactatagatcataaggcaatgcatgaaccacagaagctgcatggttaaaatagcggcctgtgcccagtacagaaaggtgttactaaccagtcttttgaatcacttagcagcttgctgctcaacctctagtgtccctccctggattctttgaggtgtctgctgtcgctaccactgtgcacatctgaaaactcacaaccaagaaaatccattctattttcttatcttggactggagtcacctattcttgcattgctgtatacacctcatgcttatgcaatgggaagaatatgggggccagggggtgtggtactaccttcaggcatttggtaactcaaagaaggctgtacagatatattttttcaaaagaacaaaatccacagatgcaatgtgagttgcgtaagaaacagagtagatagactaaattcagtgaaggaaaggaattgagagatttttcttagtaaatagattattgttaagtaaatagttattaaaaatatatctcactgca

SEQ ID NO: 10386 - DNA, 460 bp, Homo sapiens
  source 1..460: mol_type = unassigned DNA
cctatgaaagtggtgttaacctctttgatactgccgaagtctatgctgctggaaaggctgaagtgattctggggagcatcatcaagaagaaaggctggaggaagtaacttgacaagaagctgattatccccccacacacatgcatttatgtttgctgtttattttattaactctggatgcaaaggaatgatgaaacaagaagactttgggataaataccccaaagctttcttatctgaacacatttagtcagcatctctcctgtgtgcccaggaaccctattatctggctattcagaacaatgcttcatctgctatccttgagaaacatgaggggctgtgcttacacgtccctttccaacacctcctgtagccaaagatagtggtaataagggaagctataacatctatgggcagtggggaggtaatacttccccatttcactatagatttcagccccaa

SEQ ID NO: 10387 - DNA, 4437 bp, Homo sapiens
  source 1..4437: mol_type = unassigned DNA
aattcactggcgtgttccgcggcataagcaccccctctctgccttcccccagttccaactgttgtgctgcagcagatttggtctgagtctgggcagagcccctttttatggagcaaccctcccgatttgttacagcaagagcctggtgcaagtgatctttgccttcccatcgcacacaaaggcaaagagctccttaaagggacctgcctgctcctccgtgcagctgcaaacccgtgtcggtgcaggctcagcaacccaggctttcgctcgagaatgagtggggaggggtcttgaggagcccccacgtcctcccggagcggaggcgggagggagctgacagccggagtggatggagaccaccagtccgaggggacccgcttgcgattagctgcttcttgggatgctccgcgcgccagttgagcatcctgcctgtggtccaggggatgctggcggcgcatcttgcggtaagcctgcgctgatttgagccatcgcccagaagcgagcccgcattcagacaccgcggaccggctccgcgaagggctgcgtgcagtcaccatgaatgctcagctctaggcttctgtaaaaacctcccccactgcatggatttggctgtttaatcagccgagattacagcccgggaagatttgcaaacctgattctccctccagctgctgtgacaacttcggggccgtctgtttacttctctgggtccccggggactctttcctgcatcgcagccccttgtgccactttgtgggcttggctcgaaagtcagccgccaggactcctctgacggcatccccaggaagggggagcaaggagggcttaaaagaaaagcagaaatccccgcaactgctcaacctctcgtgactgcctgtgttctggggttctgagagggaccgtgcgctgcctggggaagcaatgcaagtctccatagcctgcacagagcacaatttgaagagtcggaatggtgaggaccgacttctgagcaagcagagctccaccgcccccaatgtggtgaacgcagcccgggccaaattccgcacggtcgctatcatcgcgcgcagcctggggacgttcacgcctcagcatcacatttctctcaaagagtccaccgcaaagcagactggcatgaaatataggaatcttggaaaatcaggactcagagtttcttgcttgggtcttggaacatgggtgacatttggaggtcaaatttcagatgaggttgctgaacggctgatgaccatcgcctatgaaagtggtgttaacctctttgatactgccgaagtctatgctgctggaaaggctgaagtgattctggggagcatcatcaagaagaaaggctggaggaggtccagtctggtcataacaaccaaactctactggggtggaaaagctgaaacagaaagagggctgtcaagaaagcatattattgaagaaattgtccgagccatgacacatgtgataaaccaaggcatggcgatgtactggggcacctcgagatggagtgctatggagatcatggaagcctattctgtagcaagacagttcaatatgatcccaccggtctgtgaacaagctgagtaccatcttttccagagagagaaagtggaggtccagctgccagagctctaccacaaaataggtgttggcgcaatgacatggtctccacttgcctgtggaatcatctcaggaaaatacggaaacggggtgcctgaaagttccagggcttcactgaagtgctaccagtggttgaaagaaagaattgtaagtgaagaagggagaaaacagcaaaacaagctaaaagacctttccccaattgcggagcgtctgggatgcacactacctcagctagctgttgcgtggtgcctgagaaatgaaggtgtgagttctgtgctcctgggatcatccactcctgaacaactcattgaaaaccttggtgccattcaggcaactgttctcccaaagatgacatcacatgtggtaaatgagattgataacatactgcgcaacaagccctacagcaagaaggactatagatcataaggcaatgcatgaaccacagaagctgcatggttaaaatagcggcctgtgcccagtacagaaaggtgttactaaccagtcttttgaatcacttagcagcttgctgctcaacctctagtgtccctccctggattctttgaggtgtctgctgtcgctaccactgtgcacatctgaaaactcacaaccaagaaaatccattctattttcttatcttggactggagtcacctattcttgcattgctgtatacacctcatgcttatgcaatgggaagaatatgggggccagggggtgtggtactaccttcaggcatttggtaactcaaagaaggctgtacagatatattttttcaaaagaacaaaatccacagatgcaatgtgagttgcgtaagaaacagagtagatagactaaattcagtgaaggaaaggaattgagagatttttcttagtaaatagattattgttaagtaaatagttattaaaaatatatctcactgcaaaaaaaaaaaagcagtatcttcactcaaaagtcttgcttggaagaataagcagaaataattttatatattttttttctattttcacattcatactaacaagttttgttccatttgttattcaataaaacaaaaatttctaggtatttgctttattacctttcaaatatttactgttgcttggccccaagaatggccttgtacaacttatccagaatgtctattaggattctaatgttatgtccacttacaagtagagacagtaaaaggatgaatacccaatctttagtgacaatgcagctgatttatgaaagagagggctacactgctatggaaacttagcttcaaagaaaatgcaatgtatctgcaattaggtgttcattttttactacattttattaaaacctgctttatactttcaactgcttgtaggcacaacttctgcaagtttaaatatttgagctttacaaataaacatacacatgctcagttttttaagtaaacctgtaaaatacccaggaaggcaaatgttcattgtttaattagcactgggattttataatataatgtttggtatttttgaggcattgttaacatgaaagtcaaccactggctttgtgaaaaatgctatgtcactattcagaatatgctgggtaaattgacttgcctagtgaaaagcaaaatgttaaagaaagaacttctggttctataatcatattatatgcactaaactatatgcatgaaagttctttgcatggattaatggggcttacccttgttgcactcgaaatctgaggtgtatctagccctgccactattggctacttaccctcattaatatcccacttgagaaaaattgtgagactatactgtgtcaatatctgtaaaaagagagaaaacatgttttgtttttttttgaagggggtggtgtgggagtggccctttaactctatttggctatctgaggatgtacaaaattctcatttaattttctggtcagcaagttccccacacagaaatcactctgaggtttacagaagaactgtaatattattttaaaatgcgatttttctgtcattagttctagatatgtacttcatggttaaattctaaatctgaaaatgctagtgggagatatcaagaaattttctttttgattactagtacctgtattctaacagagagtttgaattttttgcccgtgttatcagaatgatggaaattgatcattttcagttgttcattgtgtattcaatccagcgaactgctgtatgtatagaggagctgaggtgctgtctaatgggaaatgtgatttgattgatttatttgcttagagtaataaaagcattttgtgcattcaatcttacaatagattttatctgatctttcactgtaaggcttatgtgtattttccatatatgtaaaacatacacatgtaaaatatatgtggccataaattaggcaataatcatctaaataaaaattatattggcagctaagctgcactgaatactcaacagaaatagtagtgatcaaaagtctgagatttaaattgcaatccaaacatattctatcatcaatcaatcaatggagattaactactgaagataccatttctcactgggttttagaacactccgcactaaggttaaggcttcacaaattcacttttaaaaacttacttgcaaatcaaaaccaaatataaatattatggcttagctgtgggaacagccagttttttatatgcgaatctgtcatggtaaatatactaatgtatttcacagttagttagttagttagttatgtccttaagaaaaaattccacgcactcttattattttcttttctcttccaaaaagaattccctggcagagaatctatcattccaaaaggtaacct

SEQ ID NO: 10388 - DNA, 822 bp, Homo sapiens
  source 1..822: mol_type = unassigned DNA
agacgtccaccaaagccacacatcgcgacacacggaggcagaaagcagcggtctcctaagaagttagacacgaggaatctcgggcagcgagaattttcccactgtaaaaaaccgagcaagtctggataagtgaggctggctccatgtatccagaatcaacgacgggctccccggctcggctctcgctgcggcagacgggctcccccgggatgatctacagtactcggtatgggagtcccaaaagacagctccagttttacaggaacctgggcaagtctggcctgcgggtctcctgcctgggacttggaacatgggtgaccttcggaggccagatcaccgatgagatggcagagcagctcatgaccttggcctatgataatggcatcaacctcttcgatacagcagaagtctacgcagccggcaaggctgaagtggtactgggaaacatcattaagaagaaaggatggaggcagaggggagagagggcaggacaggccagagtgacgcccccgtgcagcttgggccggagggcaagggatgccagtaagtctgcaggtgcggggtgccacctacaggcccaggcctgtgtcccaagcagtacccaggctttgcagaccacgcggggcagggctccactgaagccacccccacccctcgccagctagctccatagggaagcctgtgtctcctgcccccagggcgcaccctcagtgcaggcacctctgttcccgctttgcccctggaggagccactattccagaaggctccaccctgccgtcctgcgggagcctgctgtccagtcctggccgggccaaggcctgg

SEQ ID NO: 10389 - DNA, 4201 bp, Homo sapiens
  source 1..4201: mol_type = unassigned DNA
ggaccgaggactggccgaggggcgcgccccgtccgctgccacccgcgggaggagcctcggaaggcggcgcaccgcgccgcacactcagtccaagaacccgcctcgcgtcactgtcgccgtcagggccgcggagccaatcagagcccaagtcgagggctgcgctttgcgagcgccagccaatcggtgcggcggcgggcccatcctgatttgcatgtccgacgacccctcaaccaatggtaatgtgactggcgtgaacaatagccaatcagaagctggaagaggcgtggccccgggcgtcccacgaggtgaagatgctgctggcggaacctgcaggagctagcgggattcgggggcgctaaagtcgcaggggcagggcgggaaggaagatccggcgcggggcacaggatccggagctggagcccccagaattttcccactgtaaaaaaccgagcaagtctggataagtgaggctggctccatgtatccagaatcaacgacgggctccccggctcggctctcgctgcggcagacgggctcccccgggatgatctacagtactcggtatgggagtcccaaaagacagctccagttttacaggaacctgggcaagtctggcctgcgggtctcctgcctgggacttggaacatgggtgaccttcggaggccagatcaccgatgagatggcagagcagctcatgaccttggcctatgataatggcatcaacctcttcgatacagcagaagtctacgcagccggcaaggctgaagtggtactgggaaacatcattaagaagaaaggatggaggcggtccagcctcgtcatcaccaccaagatcttctggggcggaaaggcggagacggagcggggcctgtccaggaagcacataatcgaaggtctgaaagcttccctggagcgactgcagctggagtacgtggatgtggtgtttgccaaccgcccggaccccaacaccccgatggaagagaccgtccgcgccatgacccacgtcatcaaccaggggatggccatgtactggggcacgtcacgctggagctccatggagatcatggaggcctactccgtggcccggcagttcaacctgaccccgcccatctgcgagcaggctgagtaccacatgttccagcgtgagaaagtggaggtgcagctgccggagctgttccacaagataggagtgggcgccatgacctggtcccctctggcctgtggcattgtttctggcaagtacgacagtggcatcccaccctactcaagagcctccttgaagggctaccagtggctgaaggacaagatcctcagtgaggagggccggcgccagcaagccaagctgaaggagctgcaggccatcgccgagcgcctgggctgcaccctgccccagctggccatagcctggtgcctgaggaatgagggagtcagctccgtgctcctgggggcctccaatgcggaccagctcatggagaacattggggcaatacaggtccttccgaaactgtcatcttccattatccacgagattgatagtattttgggcaataaaccctacagcaaaaaggactacagatcctaagccgcccccgcccgcctgctcggacagtttccgttccctcctagtctctgttcgctcgcttaagctgttttgaagccaagtgaagagtgtggtttgcatccaagagaaaacaccacactgtgatgtcatcgggaaatgatctcccaagtcgctgccagacaccacccactgcttcgccggacaatgtcgaagtccagtctgtgccggggaaggcactggttaggaaggatgttcaaacggtcccacccaagcctgtcacctctgctcatcctccaagaccacccagctttctcccagccacagccaagattcccaaagtcaaggcccaaagatttccaaggttcccaaagtcaaggccaggccaaggcctggttgggtccttggggcgggcagggccagcctctcctctgctgagaatccccacttggtgtagggggagaggggaaaggggtctggcccatcgaggggccccttctgccagggccttggttgctggggcagggcctccccactgggggtcttcctccacctcccactttccaagggctccaggaatctggggcctgaccacagattcctctcccatccttttctgctccaacctgccccactgggtcccggcaggggccatgcctaccaagctcgagctggcccttgacccccacccacccccacccttgctggcaggggcagggaccccagggggattgactctgcagtttgggagccacaaaaagcgtagcggtgtgatttctagctcagcctcccaccgtcttcctcctacacaccaatgatgagcctcatgccagtgaggcccggagcgcttgggaggggtcccagtggggcaggcccctctgtctggccacccctctgtcctggccccggaaggccctgtggtcatgtgctcctagctgcacggtggctgctggccacaccacggcaagtggcagcaggggccggccctgtgcacaaggatgcactcctctcggcccctgtagactttctctaaagccgcccgccagcccaggccgctgctctgcaccgagctggtgggcttgggttttgtggagcgcatgcttggaccctttcagtaaggaagggtctttggggttttctgtgcccatgacttgggggctgcacccccacagcacccccacaatgtaggaaaagacctcagggaacctctccctggaaagacgggcagggctggttagcccctcccactgcctgacacctgggacaggctgggcagaggggagagagggcaggacaggccagagtgacgcccccgtgcagcttgggccggagggcaagggatgccagtaagtctgcaggtgcggggtgccacctacaggcccaggcctgtgtcccaagcagtacccaggctttgcagaccacgcggggcagggctccactgaagccacccccacccctcgccagctagctccatagggaagcctgtgtctcctgcccccagggcgcaccctcagtgcaggcacctctgttcccgctttgcccctggaggagccactattccagaaggctccaccctgccgtcctgcgggagcctgctgtccagtcctggccgggccaaggcctgggaaactgtgaaagtcagaaaggccagcggggagaggctggggcgaggggaggagggggatcagcttctgctattaccgaccccccttcatgctgcccctggcgcctagaacccttgcccctcctcatagaccaagtcccgggggtctccactcagtcctgctgcctgcttcaccagaagcagccctgtgagtgtggggtggggaagtcccttcccaacggaggtcccagcctatggccctgggcccaggtgggggtcgcctgcttccttcccggacagggtcctgcagtggccaatggtgccagagggcaggtggcccaccctcgccatcagggagggtggctggccccatccccactgccacccagccccacccactgttggaagagggaccagcgcgaggtggtgcccagggtgggcactgctgcttaatgcgaggcacacctggggcagctgagcccccaaaggctgcgggtttgccaaacacagagaggccaggccccagtgtcaggatgcagtcagcctctggcgcagctctttccacgacctggttcctggatgtcctgcttgctccacacccatctacagggaggatgtgagggggctctgcctcctagggccaggtcccccctctcgggaggaggtattgggtaggaccatccaagaaagggcagaagaccaagggcagtcggggtctagaaaggagggcgctggccctgctggacgcttcggagcccccactgtttcccactcagctttgtgctcagatcccaggtcccaaggagtgacaggggcttcctcccaccttctgtccttgtccagtcatgtaaataatgtgctttttctctccccgagtctttttttttaaacctaccgtggttcctcagctaactgcattccctacccaggcagagactgtcctatgcctcgagcttccaaacgagactcagaccgcgacacagccaccgtatttatggaatgacaaaataaataaagcccaaacccatcggtctctgtga

SEQ ID NO: 10390 - DNA, 560 bp, Homo sapiens
  source 1..560: mol_type = unassigned DNA
gatgctgctggcggaacctgcaggagctagcgggattcgggggcgctaaagtcgcaggggcagggcgggaaggaagatccggcgcggggcacaggatccggagctggagcccccagaactctgtgagaggtgccccctccgccatcacctgagctccatcgaatgcctgaaatcctcacctctgcaggagtgagtctcccaagaggccctggaggcccaggcccagaccctgggggatatggaagcactcctttgtcgtggcgtgggaagccccacactgctctttccttggtgacgggtgacccgccatgttcaggcccctcctggtctatcttcgggaagccgaggcagcagcttggagccagagccggaggcagagcggctccatccgtggggagccgcgccacctctgcgcctcctccgcgcctcctctgcgccccgcgccgtgctgagtcaggctctgaaacgcagtcatcatccggaagtggttcttgctgtggccccatccccctgtgtgattttcctaccttggctcacttaaaatttcaatctggctctga

SEQ ID NO: 10391 - DNA, 1202 bp, Homo sapiens
  source 1..1202: mol_type = unassigned DNA
agcgggattcgggggcgctaaagtcgcaggggcagggcgggaaggaagatccggcgcggggcacaggatccggagctggagcccccagaattttcccactgtaaaaaaccgagcaagtctggataagtgaggctggctccatgtatccagaatcaacgacgggctccccggctcggctctcgctgcggcagacgggctcccccgggatgatctacaggaacctgggcaagtctggcctgcgggtctcctgcctgggacttggaacatgggtgaccttcggaggccagatcaccgatgagatggcagagcagctcatgaccttggcctatgataatggcatcaacctcttcgatacagcagaagtctacgcagccggcaaggctgaagtggtactgggaaacatcattaagaagaaaggatggaggcggtccagcctcgtcatcaccaccaagatcttctggggcggaaaggcggagacggagcggggcctgtccaggaagcacataatcgaaggtctgaaagcttccctggagcgactgcagctggagtacgtggatgtggtgtttgccaaccgcccggaccccaacaccccgatggaagagaccgtccgcgccatgacccacgtcatcaaccaggggatggccatgtactggggcacgtcacgctggagctccatggagatcatggaggcctactccgtggcccggcagttcaacctgaccccgcccatctgcgagcaggctgagtaccacatgttccagcgtgagaaagtggaggtgcagctgccggagctgttccacaagataggagtgggcgccatgacctggtcccctctggcctgtggcattgtttctggcaagtacgacagtggcatcccaccctactcaagagcctccttgaagggctaccagtggctgaaggacaagatcctcagtgaggagggccggcgccagcaagccaagctgaaggagctgcaggccatcgccgagcgcctgggctgcaccctgccccagctggccatagcctggtgcctgaggaatgagggagtcagctccgtgctcctgggggcctccaatgcggaccagctcatggagaacattggggcaatacaggtccttccgaaactgtcatcttccattatccacgagattgatagtattttgggcaataaaccctacagcaaaaaggactacagatcctaa

SEQ ID NO: 10392 - DNA, 413 bp, Homo sapiens
  source 1..413: mol_type = unassigned DNA
gattcgggggcgctaaagtcgcaggggcagggcgggaaggaagatccggcgcggggcacaggatccggagctggagcccccagaattttcccactgtaaaaaaccgagcaagtctggataagtgaggctggctccatgtatccagaatcaacgacgggctccccggctcggctctcgctgcggcagacgggctcccccgggatgatctacagtactcggtatgggagtcccaaaagacagctccagttttacaggaacctgggcaagtctggcctgcgggtctcctgcctgggacttggaacatgggtgaccttcggaggccagatcaccgatgaggtaagatggggctctcccagcaccccagaacccagcacgggctcgccagagcacatggttaagtctgccgcgtggac

SEQ ID NO: 10393 - DNA, 486 bp, Homo sapiens
  source 1..486: mol_type = unassigned DNA
gggggcgctaaagtcgcaggggcagggcgggaaggaagatccggcgcggggcacaggatccggagctggagcccccagaggcctcacgacaggactagtgccttggtaagaagaggaaaaggccagagctccctccctaccctgtgtggacccagcaggaaggaattctgtctgcaagagagagccctcacctggaaccaaatcagccaggaccctgatgttggatttaccagcctccagcaccgtgagacagaaacgtctgctgtttcagccacccagaattttcccactgtaaaaaaccgagcaagtctggataagtgaggctggctccatgtatccagaatcaacgacgggctccccggctcggctctcgctgcggcagacgggctcccccgggatgatctacagtactcggtatgggagtcccaaaagacagctccagttttacaggaacctgggcaagtctggcctgcgggtctcctgcct

SEQ ID NO: 10394 - DNA, 959 bp, Homo sapiens
  source 1..959: mol_type = unassigned DNA
agtgcatagctctggcacgcgctgcaccaacttcctgttgggtgctgtggtcccaaggcgcgtgctttgcagcagatgtgtgacctggcgttcccctgagtgctcggaaaatggccttgtctccggtcgttcccgttcaggagcagaattttcccactgtaaaaaaccgagcaagtctggataagtgaggctggctccatgtatccagaatcaacgacgggctccccggctcggctctcgctgcggcagacgggctcccccgggatgatctacagtactcggtatgggagtcccaaaagacagctccagttttacaggaacctgggcaagtctggcctgcgggtctcctgcctgggacttggaacatgggtgaccttcggaggccagatcaccgatgagatggcagagcagctcatgaccttggcctatgataatggcatcaacctcttcgatacagcagaagtctacgcagccggcaaggctgaagtggtactgggaaacatcattaagaagaaaggatggaggcggtccagcctcgtcatcaccaccaagatcttctggggcggaaaggcggagacggagcggggcctgtccaggaagcacataatcgaaggtctgaaagcttccctggagcgactgcagctggagtacgtggatgtggtgtttgccaaccgcccggaccccaacaccccgatggaagagaccgtccgcgccatgacccacgtcatcaaccaggggatggccatgtactggggcacgtcacgctggagctccatggagatcatggaggcctactccgtggcccggcagttcaacctgaccccgcccatctgcgagcaggctgagtaccacatgttccagcgtgagaaagtggaggtgcagctgccggagctgttccacaagataggagtgggcgccatgacctggtcccctctggcctgtggcattgtttctggcaa

SEQ ID NO: 10395 - DNA, 961 bp, Homo sapiens
  source 1..961: mol_type = unassigned DNA
agtgcatagctctggcacgcgctgcaccaacttcctgttgggtgctgtggtcccaaggcgcgtgctttgcagcagatgtgtgacctggcgttcccctgagtgctcggaaaatggccttgtctccggtcgttcccgttcaggagcagaattttcccactgtaaaaaaccgagcaagtctggataagtgaggctggctccatgtatccagaatcaacgacgggctccccggctcggctctcgctgcggcagacgggctcccccgggatgatctacaggaacctgggcaagtctggcctgcgggtctcctgcctgggacttggaacatgggtgaccttcggaggccagatcaccgatgagatggcagagcagctcatgaccttggcctatgataatggcatcaacctcttcgatacagcagaagtctacgcagccggcaaggctgaagtggtactgggaaacatcattaagaagaaaggatggaggcggtccagcctcgtcatcaccaccaagatcttctggggcggaaaggcggagacggagcggggcctgtccaggaagcacataatcgaaggtctgaaagcttccctggagcgactgcagctggagtacgtggatgtggtgtttgccaaccgcccggaccccaacaccccgatggaagagaccgtccgcgccatgacccacgtcatcaaccaggggatggccatgtactggggcacgtcacgctggagctccatggagatcatggaggcctactccgtggcccggcagttcaacctgaccccgcccatctgcgagcaggctgagtaccacatgttccagcgtgagaaagtggaggtgcagctgccggagctgttccacaagataggagtgggcgccatgacctggtcccctctggcctgtggcattgtttctggcaagtacgacagtggcatcccaccctactcaagagcctccttgaagg

SEQ ID NO: 10396 - DNA, 2396 bp, Homo sapiens
  source 1..2396: mol_type = unassigned DNA
gctgcaccaacttcctgttgggtgctgtggtcccaaggcgcgtgctttgcagcagatgtgtgacctggcgttcccctgagtgctcggaaaatggccttgtctccggtcgttcccgttcaggagcagaattttcccactgtaaaaaaccgagcaagtctggataagtgaggctggctccatgtatccagaatcaacgacgggctccccggctcggctctcgctgcggcagacgggctcccccgggatgatctacagtactcggtatgggagtcccaaaagacagctccagttttacaggaacctgggcaagtctggcctgcgggtctcctgcctgggacttggaacatgggtgaccttcggaggccagatcaccgatgagatggcagagcagctcatgaccttggcctatgataatggcatcaacctcttcgatacagcagaagtctacgcagccggcaaggctgaagtggtactgggaaacatcattaagaagaaaggatggaggcggtccagcctcgtcatcaccaccaagatcttctggggcggaaaggcggagacggagcggggcctgtccaggaagcacataatcgaaggtctgaaagcttccctggagcgactgcagctggagtacgtggatgtggtgtttgccaaccgcccggaccccaacaccccgatggaagagaccgtccgcgccatgacccacgtcatcaaccaggggatggccatgtactggggcacgtcacgctggagctccatggagatcatggaggcctactccgtggcccggcagttcaacctgaccccgcccatctgcgagcaggctgagtaccacatgttccagcgtgagaaagtggaggtgcagctgccggagctgttccacaagataggagtgggcgccatgacctggtcccctctggcctgtggcattgtttctggcaagtacgacagtggcatcccaccctactcaagagcctccttgaagggctaccagtggctgaaggacaagatcctcagtgaggagggccggcgccagcaagccaagctgaaggagctgcaggccatcgccgagcgcctgggctgcaccctgccccagctggccatagcctggtgcctgaggaatgagggagtcagctccgtgctcctgggggcctccaatgcggaccagctcatggagaacattggggcaatacaggtaagagtgagaggccctgctgggcagagggcccatcccagcccgagccccgtccagtgcatcctcccaggctcgtcctgcgtgccaggctctgttctaggcactcaggatgcgcccgtgaaccatcagagttgtgctcctggagagcttgctttccagcaggaacagacatgaacactaactgcacgaaacaaggaggttagaatgtgtgtcagggtggacgagcgctgtaggagagaagccagagataaagggagggagctggggccagggacggtggcgctgcagactcaggttcaagggggcctgtcaggtgggcttgttgagaaggtggtgcttgagcagtcttgagagatgcggagtaagtcacgcaaatgcctgcgggaagaaccttccaccagcaggaagagttgatgcaaaggcccaaaaaggcctggagcagaggggcagatcctgagaggcacgaaacacctccagggacttctgagtgagacgggagccgtggcaaaattgtgggcagaggagggcgagctgcagctcagcctggaaagggaggctgctctccggctgctccatcggggaggctttgggaagcaaaagtcgaagcagagagccctggtgggaagtggcagctgcgggtccgagacgggagtggtggttggatcctggatgtttgggaaggtggggcccccgggactggctgacaaactggatgtgggggtgagaaggcgaggtggaagtcggtccccgggtgtgtcacccggaagggtggcggtgctgtatgctgaggcaggcgcagctggaaaaagcagtcacggacatggaagtccagcatttggcctggagtttccattttatgtcactgctgccaccacccttcaggaaggttctagggcaccttgacatttgagagggagtgcacagacccaggcatgcttcctctctgccccaaaccttctgaaacacaaaagcagcgtggcctccatctgcctcagatggagcccagatgtgatggggcaacccgggcctggccagccgaccatctggaagagcctggccccacctcctccccaggccaggcccgtcttgttggtgggattctgatttgttgttgttcttgcacgcaggtccttccgaaactgtcatcttccattatccacgagattgatagtattttgggcaataaaccctacagcaaaaagga

SEQ ID NO: 10397 - DNA, 500 bp, Homo sapiens
  source 1..500: mol_type = unassigned DNA
ggggcctgggtgtgcggctatggggactgaactgtcgagggctcctgctgcctctgcaggggacaggccctgccagctactgagtgagcagcctgcggcagccctgactcactgcgggtcgtgccgtctgtgcagcactggggtacccaccacccagtgccagaattttcccactgtaaaaaaccgagcaagtctggataagtgaggctggctccatgtatccagaatcaacgacgggctccccggctcggctctcgctgcggcagacgggctcccccgggatgatctacaggaacctgggcaagtctggcctgcgggtctcctgcctgggacttggaacatgggtgaccttcggaggccagatcaccgatgagatggcagagcagctcatgaccttggcctatgataatggcatcaacctcttcgatacagcagaagtctacgcagccggcaaggctgaagtggtactgggaaacatcattaagaagaaaggatggagg

SEQ ID NO: 10398 - DNA, 4273 bp, Homo sapiens
  source 1..4273: mol_type = unassigned DNA
gaaatgcaaagcaggggctgtggggaaatctcaccaacccctcctcccctgggaggtggcaaaggtggtggactgggctgctgggaccctggggaggaatgaaacagaggctgtgttgatggcctgcagttccttgtaatgtggtcatcaaacggtgtacagttcccgtctgtggctgcaggctggagagctgactgctggcacagatacagcctgacctcgggtcaacacttctcggagtccagaggggttgggagtgggacaggtggcctcccagggacgcctccctgagtggccagtggtgccgcttgtccctgcacctgtagctgccctgagcacccccactggacacagtgggcattgcaccctccggagaaagctgcccttgttccacgtgcgagccctgtccccagcgccatgggctgtgctacctgcagtaacgcagactgcgagccccggctgcctctccagtgctctctctcctctggccttcagcaggctgggtcacagagaattttcccactgtaaaaaaccgagcaagtctggataagtgaggctggctccatgtatccagaatcaacgacgggctccccggctcggctctcgctgcggcagacgggctcccccgggatgatctacagtactcggtatgggagtcccaaaagacagctccagttttacaggaacctgggcaagtctggcctgcgggtctcctgcctgggacttggaacatgggtgaccttcggaggccagatcaccgatgagatggcagagcagctcatgaccttggcctatgataatggcatcaacctcttcgatacagcagaagtctacgcagccggcaaggctgaagtggtactgggaaacatcattaagaagaaaggatggaggcggtccagcctcgtcatcaccaccaagatcttctggggcggaaaggcggagacggagcggggcctgtccaggaagcacataatcgaaggtctgaaagcttccctggagcgactgcagctggagtacgtggatgtggtgtttgccaaccgcccggaccccaacaccccgatggaagagaccgtccgcgccatgacccacgtcatcaaccaggggatggccatgtactggggcacgtcacgctggagctccatggagatcatggaggcctactccgtggcccggcagttcaacctgaccccgcccatctgcgagcaggctgagtaccacatgttccagcgtgagaaagtggaggtgcagctgccggagctgttccacaagataggagtgggcgccatgacctggtcccctctggcctgtggcattgtttctggcaagtacgacagtggcatcccaccctactcaagagcctccttgaagggctaccagtggctgaaggacaagatcctcagtgaggagggccggcgccagcaagccaagctgaaggagctgcaggccatcgccgagcgcctgggctgcaccctgccccagctggccatagcctggtgcctgaggaatgagggagtcagctccgtgctcctgggggcctccaatgcggaccagctcatggagaacattggggcaatacaggtccttccgaaactgtcatcttccattatccacgagattgatagtattttgggcaataaaccctacagcaaaaaggactacagatcctaagccgcccccgcccgcctgctcggacagtttccgttccctcctagtctctgttcgctcgcttaagctgttttgaagccaagtgaagagtgtggtttgcatccaagagaaaacaccacactgtgatgtcatcgggaaatgatctcccaagtcgctgccagacaccacccactgcttcgccggacaatgtcgaagtccagtctgtgccggggaaggcactggttaggaaggatgttcaaacggtcccacccaagcctgtcacctctgctcatcctccaagaccacccagctttctcccagccacagccaagattcccaaagtcaaggcccaaagatttccaaggttcccaaagtcaaggccaggccaaggcctggttgggtccttggggcgggcagggccagcctctcctctgctgagaatccccacttggtgtagggggagaggggaaaggggtctggcccatcgaggggccccttctgccagggccttggttgctggggcagggcctccccactgggggtcttcctccacctcccactttccaagggctccaggaatctggggcctgaccacagattcctctcccatccttttctgctccaacctgccccactgggtcccggcaggggccatgcctaccaagctcgagctggcccttgacccccacccacccccacccttgctggcaggggcagggaccccagggggattgactctgcagtttgggagccacaaaaagcgtagcggtgtgatttctagctcagcctcccaccgtcttcctcctacacaccaatgatgagcctcatgccagtgaggcccggagcgcttgggaggggtcccagtggggcaggcccctctgtctggccacccctctgtcctggccccggaaggccctgtggtcatgtgctcctagctgcacggtggctgctggccacaccacggcaagtggcagcaggggccggccctgtgcacaaggatgcactcctctcggcccctgtagactttctctaaagccgcccgccagcccaggccgctgctctgcaccgagctggtgggcttgggttttgtggagcgcatgcttggaccctttcagtaaggaagggtctttggggttttctgtgcccatgacttgggggctgcacccccacagcacccccacaatgtaggaaaagacctcagggaacctctccctggaaagacgggcagggctggttagcccctcccactgcctgacacctgggacaggctgggcagaggggagagagggcaggacaggccagagtgacgcccccgtgcagcttgggccggagggcaagggatgccagtaagtctgcaggtgcggggtgccacctacaggcccaggcctgtgtcccaagcagtacccaggctttgcagaccacgcggggcagggctccactgaagccacccccacccctcgccagctagctccatagggaagcctgtgtctcctgcccccagggcgcaccctcagtgcaggcacctctgttcccgctttgcccctggaggagccactattccagaaggctccaccctgccgtcctgcgggagcctgctgtccagtcctggccgggccaaggcctgggaaactgtgaaagtcagaaaggccagcggggagaggctggggcgaggggaggagggggatcagcttctgctattaccgaccccccttcatgctgcccctggcgcctagaacccttgcccctcctcatagaccaagtcccgggggtctccactcagtcctgctgcctgcttcaccagaagcagccctgtgagtgtggggtggggaagtcccttcccaacggaggtcccagcctatggccctgggcccaggtgggggtcgcctgcttccttcccggacagggtcctgcagtggccaatggtgccagagggcaggtggcccaccctcgccatcagggagggtggctggccccatccccactgccacccagccccacccactgttggaagagggaccagcgcgaggtggtgcccagggtgggcactgctgcttaatgcgaggcacacctggggcagctgagcccccaaaggctgcgggtttgccaaacacagagaggccaggccccagtgtcaggatgcagtcagcctctggcgcagctctttccacgacctggttcctggatgtcctgcttgctccacacccatctacagggaggatgtgagggggctctgcctcctagggccaggtcccccctctcgggaggaggtattgggtaggaccatccaagaaagggcagaagaccaagggcagtcggggtctagaaaggagggcgctggccctgctggacgcttcggagcccccactgtttcccactcagctttgtgctcagatcccaggtcccaaggagtgacaggggcttcctcccaccttctgtccttgtccagtcatgtaaataatgtgctttttctctccccgagtctttttttttaaacctaccgtggttcctcagctaactgcattccctacccaggcagagactgtcctatgcctcgagcttccaaacgagactcagaccgcgacacagccaccgtatttatggaatgacaaaataaataaagcccaaaccc

SEQ ID NO: 10399 - DNA, 856 bp, Homo sapiens
  source 1..856: mol_type = unassigned DNA
agaaggagtggctggagggatgagaggggagcgtggagtcctgggagctggggaagccgcaggcagcacctctgtcaccccgatacgatgggcaccgctggacctagcaacgaagaggtcaccgcaaccttgaattttcccactgtaaaaaaccgagcaagtctggataagtgaggctggctccatgtatccagaatcaacgacgggctccccggctcggctctcgctgcggcagacgggctcccccgggatgatctacagccctgggtgtttctgtctgcaccataaacagcgctgaacatcagcgacagctgcggagggcgttcagtgagagctgagcctctggggacagagcatagaacccacgaaagacgcaggcacaggcagtaccccagcagcccatcagtcttgggaagccagacctttccggataatcactggggcctgagccagagcccgtgtctgtgacagccacagggaaaggcagtgtctgtcctaagaagagccaggcgggcaggtgcgggtttgccagcacgcgggtgctctgcacgtctgggttggagggttttcagccattgcccacaagcatattgcaaagcaagtcctgaagcacattcaatccaaaccaaccctcactcggaggttcaccacggaaaacagggcctggcatggaaggagcccttggtgtccaggaaactggctccgggtctctgccccgtggccaccgggtggcgctgctgcagagcacttggcaccggctgcgcttcctcagagactgccctgagcaggcgactggtgggggcccgggggcatgggacattggtggttctttctgacctgcacctgctggggttga

SEQ ID NO: 10400 - DNA, 536 bp, Homo sapiens
  source 1..536: mol_type = unassigned DNA
agacgggctcccccgggatgatctacagtactcggtatgggagtcccaaaagacagctccagttttacaggaacctgggcaagtctggcctgcgggtctcctgcctgggacttggaacatgggtgaccttcggaggccagatcaccgatgagatggcagagcagctcatgaccttggcctatgataatggcatcaacctcttcgatacagcagaagtctacgcagccggcaaggctgaagtggtactgggaaacatcattaagaagaaaggatggaggatcttcgcggcgtctcagcctctccggagctcactgttcccatctgtaagaggaaacatcagaagcagttataaagttgggcctccctcctccctcccctcgaaatgccactcagaatcccagtgccaaggggagcccccgccccctcccccatggattcctgacaccccttcctcttgtcccatcaaatttgttttttggcaactctgatcccaaaacaaattcctcctcaccctgtaattaaacgaaattgcacgt

SEQ ID NO: 10401 - DNA, 4142 bp, Homo sapiens
  source 1..4142: mol_type = unassigned DNA
acttcccgagcttttaggggaagaggcactcgtgaataattcagcctctttcactgagatgaaaacgccctaatagaactaatggactcgctgcctcaaaactcgactctggtgggactcatctcattcaccaattgcttctgacgtcctgcagtgacactccctaatgaaaaagccgctgtgccagatccttagagtgtctggtgatccctaataaaccagactgtggcctttttaacgagcagacgcccccacgaaggcagtggcagctcccaagccaggcggcaccatgctgtccatgacgtacagcgagagtctgcggagcgtgagcagcaggtgccactctgaatgggccctgcaccccgtccgccagacggacacgctggaactgcagcggctgcgggaggtgcgggcggctgcccaggccaggaacatggagagcttcctccgcatgcacggcctttccctggacggctgcaccgcccagcgcacaggcatgaagtatcggaacctgggcaagtctggcctgcgggtctcctgcctgggacttggaacatgggtgaccttcggaggccagatcaccgatgagatggcagagcagctcatgaccttggcctatgataatggcatcaacctcttcgatacagcagaagtctacgcagccggcaaggctgaagtggtactgggaaacatcattaagaagaaaggatggaggcggtccagcctcgtcatcaccaccaagatcttctggggcggaaaggcggagacggagcggggcctgtccaggaagcacataatcgaaggtctgaaagcttccctggagcgactgcagctggagtacgtggatgtggtgtttgccaaccgcccggaccccaacaccccgatggaaggggacccatttagttcctccaagtcaaggacattcatcatagaagagaccgtccgcgccatgacccacgtcatcaaccaggggatggccatgtactggggcacgtcacgctggagctccatggagatcatggaggcctactccgtggcccggcagttcaacctgaccccgcccatctgcgagcaggctgagtaccacatgttccagcgtgagaaagtggaggtgcagctgccggagctgttccacaagataggagtgggcgccatgacctggtcccctctggcctgtggcattgtttctggcaagtacgacagtggcatcccaccctactcaagagcctccttgaagggctaccagtggctgaaggacaagatcctcagtgaggagggccggcgccagcaagccaagctgaaggagctgcaggccatcgccgagcgcctgggctgcaccctgccccagctggccatagcctggtgcctgaggaatgagggagtcagctccgtgctcctgggggcctccaatgcggaccagctcatggagaacattggggcaatacaggtccttccgaaactgtcatcttccattatccacgagattgatagtattttgggcaataaaccctacagcaaaaaggactacagatcctaagccgcccccgcccgcctgctcggacagtttccgttccctcctagtctctgttcgctcgcttaagctgttttgaagccaagtgaagagtgtggtttgcatccaagagaaaacaccacactgtgatgtcatcgggaaatgatctcccaagtcgctgccagacaccacccactgcttcgccggacaatgtcgaagtccagtctgtgccggggaaggcactggttaggaaggatgttcaaacggtcccacccaagcctgtcacctctgctcatcctccaagaccacccagctttctcccagccacagccaagattcccaaagtcaaggcccaaagatttccaaggttcccaaagtcaaggccaggccaaggcctggttgggtccttggggcgggcagggccagcctctcctctgctgagaatccccacttggtgtagggggagaggggaaaggggtctggcccatcgaggggccccttctgccagggccttggttgctggggcagggcctccccactgggggtcttcctccacctcccactttccaagggctccaggaatctggggcctgaccacagattcctctcccatccttttctgctccaacctgccccactgggtcccggcaggggccatgcctaccaagctcgagctggcccttgacccccacccacccccacccttgctggcaggggcagggaccccagggggattgactctgcagtttgggagccacaaaaagcgtagcggtgtgatttctagctcagcctcccaccgtcttcctcctacacaccaatgatgagcctcatgccagtgaggcccggagcgcttgggaggggtcccagtggggcaggcccctctgtctggccacccctctgtcctggccccggaaggccctgtggtcatgtgctcctagctgcacggtggctgctggccacaccacggcaagtggcagcaggggccggccctgtgcacaaggatgcactcctctcggcccctgtagactttctctaaagccgcccgccagcccaggccgctgctctgcaccgagctggtgggcttgggttttgtggagcgcatgcttggaccctttcagtaaggaagggtctttggggttttctgtgcccatgacttgggggctgcacccccacagcacccccacaatgtaggaaaagacctcagggaacctctccctggaaagacgggcagggctggttagcccctcccactgcctgacacctgggacaggctgggcagaggggagagagggcaggacaggccagagtgacgcccccgtgcagcttgggccggagggcaagggatgccagtaagtctgcaggtgcggggtgccacctacaggcccaggcctgtgtcccaagcagtacccaggctttgcagaccacgcggggcagggctccactgaagccacccccacccctcgccagctagctccatagggaagcctgtgtctcctgcccccagggcgcaccctcagtgcaggcacctctgttcccgctttgcccctggaggagccactattccagaaggctccaccctgccgtcctgcgggagcctgctgtccagtcctggccgggccaaggcctgggaaactgtgaaagtcagaaaggccagcggggagaggctggggcgaggggaggagggggatcagcttctgctattaccgaccccccttcatgctgcccctggcgcctagaacccttgcccctcctcatagaccaagtcccgggggtctccactcagtcctgctgcctgcttcaccagaagcagccctgtgagtgtggggtggggaagtcccttcccaacggaggtcccagcctatggccctgggcccaggtgggggtcgcctgcttccttcccggacagggtcctgcagtggccaatggtgccagagggcaggtggcccaccctcgccatcagggagggtggctggccccatccccactgccacccagccccacccactgttggaagagggaccagcgcgaggtggtgcccagggtgggcactgctgcttaatgcgaggcacacctggggcagctgagcccccaaaggctgcgggtttgccaaacacagagaggccaggccccagtgtcaggatgcagtcagcctctggcgcagctctttccacgacctggttcctggatgtcctgcttgctccacacccatctacagggaggatgtgagggggctctgcctcctagggccaggtcccccctctcgggaggaggtattgggtaggaccatccaagaaagggcagaagaccaagggcagtcggggtctagaaaggagggcgctggccctgctggacgcttcggagcccccactgtttcccactcagctttgtgctcagatcccaggtcccaaggagtgacaggggcttcctcccaccttctgtccttgtccagtcatgtaaataatgtgctttttctctccccgagtctttttttttaaacctaccgtggttcctcagctaactgcattccctacccaggcagagactgtcctatgcctcgagcttccaaacgagactcagaccgcgacacagccaccgtatttatggaatgacaaaataaataaagcccaaaccc

SEQ ID NO: 10402 - DNA, 1336 bp, Homo sapiens
  source 1..1336: mol_type = unassigned DNA
agagtgtctggtgatccctaataaaccagactgtggcctttttaacgagcagacgcccccacgaaggcaggaacctgggcaagtctggcctgcgggtctcctgcctgggacttggaacatgggtgaccttcggaggccagatcaccgatgagatggcagagcagctcatgaccttggcctatgataatggcatcaacctcttcgatacagcagaagtctacgcagccggcaaggctgaagtggtactgggaaacatcattaagaagaaaggatggaggcggtccagcctcgtcatcaccaccaagatcttctggggcggaaaggcggagacggagcggggcctgtccaggaagcacataatcgaaggtctgaaagcttccctggagcgactgcagctggagtacgtggatgtggtgtttgccaaccgcccggaccccaacaccccgatggaagagaccgtccgcgccatgacccacgtcatcaaccaggggatggccatgtactggggcacgtcacgctggagctccatggagatcatggaggcctactccgtggcccggcagttcaacctgaccccgcccatctgcgagcaggctgagtaccacatgttccagcgtgagaaagtggaggtgcagctgccggagctgttccacaagataggagtgggcgccatgacctggtcccctctggcctgtggcattgtttctggcaagtacgacagtggcatcccaccctactcaagagcctccttgaagggctaccagtggctgaaggacaagatcctcagtgaggagggccggcgccagcaagccaagctgaaggagctgcaggccatcgccgagcgcctgggctgcaccctgccccagctggccatagcctggtgcctgaggaatgagggagtcagctccgtgctcctgggggcctccaatgcggaccagctcatggagaacattggggcaatacaggtccttccgaaactgtcatcttccattatccacgagattgatagtattttgggcaataaaccctacagcaaaaaggactacagatcctaagccgcccccgcccgcctgctcggacagtttccgttccctcctagtctctgttcgctcgcttaagctgttttgaagccaagtgaagagtgtggtttgcatccaagagaaaacaccacactgtgatgtcatcgggaaatgatctcccaagtcgctgccagacaccacccactgcttcgccggacaatgtcgaagtccagtctgtgccggggaaggcactggttaggaaggatgttcaaacggtcccacccaagcctgtcacctctgctcatcctccaagacca

SEQ ID NO: 10403 - DNA, 683 bp, Homo sapiens
  source 1..683: mol_type = unassigned DNA
tacgcagccggcaaggctgaagtggtactgggaaacatcattaagaagaaaggatggaggatcttcgcggcgtctcagcctctccggagctcactgttcccatctgtaagagggtgtgtgtgggaccgttccggcagggctatcctgagggtcagtggccccaagtctgtaaatcacccacccagctcagggcgggacgtgtcacactcctctgggaagtggtcccctccagcacagaccggggagcggtccccgggtgtgatggagcccaaaggtcgcagatcgggggccatccacccttctctcccaggagcctatgggcccttcccaggccaaggtcctcacccaccttgggaccaactgggctgagcacttgcctacattttgaggctccccagacccctggacacagctttatctcaaggtgctgacaagccccggggccctgttccttaataaatgcgtctttattttcagaaacatcagaagcagttataaagttgggcctccctcctccctcccctcgaaatgccactcagaatcccagtgccaaggggagcccccgccccctcccccatggattcctgacaccccttcctcttgtcccatcaaatttgttttttggcaactctgatcccaaaacaaattcctcctcaccctgtaattaaacgaaattgcacgta

SEQ ID NO: 10404 - DNA, 916 bp, Homo sapiens
  source 1..916: mol_type = unassigned DNA
gggagagagcactcccctagggccaggaggttcttctgggccacgggtggcagccgagaccccaggctgccaagtttcctaagagaaggaaggccagcacctcgcctccttgtcctgacttggggttgggccagcaccacagtctttgcacttcagagcctggacaggccccgctcatccaccagcccgtgcccggcccactgcccactctcccctacttgagaggcctggggcaggggcactgccctggcttcaagatgagaagagcccctatgagggagaagggtccagaaggaatgagcccatcggccccctgcacgtgggggtccaggtgacctgctctcatctgtagctgtgctgctcccctcccccgcaaccagggctaccagtggctgaaggacaagatcctcagtgaggagggccggcgccagcaagccaagctgaaggagctgcaggccatcgccgagcgcctgggctgcaccctgccccagctggccatagcctggtgcctgaggaatgagggagtcagctccgtgctcctgggggcctccaatgcggaccagctcatggagaacattggggcaatacaggtccttccgaaactgtcatcttccattatccacgagattgatagtattttgggcaataaaccctacagcaaaaaggactacagatcctaagccgcccccgcccgcctgctcggacagtttccgttccctcctagtctctgttcgctcgcttaagctgttttgaagccaagtgaagagtgtggtttgcatccaagagaaaacaccacactgtgatgtcatcgggaaatgatctcccaagtcgctgccagacaccacccactgcttcgccggacaatgtcgaagtccagtctgtgccggggaaggcactggttaggaaggatgttcaa

SEQ ID NO: 10405 - DNA, 4165 bp, Homo sapiens
  source 1..4165: mol_type = unassigned DNA
atcaccagaaccctctgccctgagaaaggggctcctgggccgacagggaaggtctgcctcctactctggaggggccgcttggggacaggcccgggctgtctcctcacagccacctgcttcctgtcctctgcctgtctcctgccccatctggccgctgctcatccaggaaggtcggagatgtcgggccctcccacctgggtcacgcgctaggcatgcctgagagcaaaggccacgccccgacaccccacggggccctggcgcgccaggcttctcagccctgcggcggcagtgcatagctctggcacgcgctgcaccaacttcctgttgggtgctgtggtcccaaggcgcgtgctttgcagcagatgtgtgacctggcgttcccctgagtgctcggaaaatggccttgtctccggtcgttcccgttcaggagcagaattttcccactgtaaaaaaccgagcaagtctggataagtgaggctggctccatgtatccagaatcaacgacgggctccccggctcggctctcgctgcggcagacgggctcccccgggatgatctacaggaacctgggcaagtctggcctgcgggtctcctgcctgggacttggaacatgggtgaccttcggaggccagatcaccgatgagatggcagagcagctcatgaccttggcctatgataatggcatcaacctcttcgatacagcagaagtctacgcagccggcaaggctgaagtggtactgggaaacatcattaagaagaaaggatggaggcggtccagcctcgtcatcaccaccaagatcttctggggcggaaaggcggagacggagcggggcctgtccaggaagcacataatcgaaggtctgaaagcttccctggagcgactgcagctggagtacgtggatgtggtgtttgccaaccgcccggaccccaacaccccgatggaagagaccgtccgcgccatgacccacgtcatcaaccaggggatggccatgtactggggcacgtcacgctggagctccatggagatcatggaggcctactccgtggcccggcagttcaacctgaccccgcccatctgcgagcaggctgagtaccacatgttccagcgtgagaaagtggaggtgcagctgccggagctgttccacaagataggagtgggcgccatgacctggtcccctctggcctgtggcattgtttctggcaagtacgacagtggcatcccaccctactcaagagcctccttgaagggctaccagtggctgaaggacaagatcctcagtgaggagggccggcgccagcaagccaagctgaaggagctgcaggccatcgccgagcgcctgggctgcaccctgccccagctggccatagcctggtgcctgaggaatgagggagtcagctccgtgctcctgggggcctccaatgcggaccagctcatggagaacattggggcaatacaggtccttccgaaactgtcatcttccattatccacgagattgatagtattttgggcaataaaccctacagcaaaaaggactacagatcctaagccgcccccgcccgcctgctcggacagtttccgttccctcctagtctctgttcgctcgcttaagctgttttgaagccaagtgaagagtgtggtttgcatccaagagaaaacaccacactgtgatgtcatcgggaaatgatctcccaagtcgctgccagacaccacccactgcttcgccggacaatgtcgaagtccagtctgtgccggggaaggcactggttaggaaggatgttcaaacggtcccacccaagcctgtcacctctgctcatcctccaagaccacccagctttctcccagccacagccaagattcccaaagtcaaggcccaaagatttccaaggttcccaaagtcaaggccaggccaaggcctggttgggtccttggggcgggcagggccagcctctcctctgctgagaatccccacttggtgtagggggagaggggaaaggggtctggcccatcgaggggccccttctgccagggccttggttgctggggcagggcctccccactgggggtcttcctccacctcccactttccaagggctccaggaatctggggcctgaccacagattcctctcccatccttttctgctccaacctgccccactgggtcccggcaggggccatgcctaccaagctcgagctggcccttgacccccacccacccccacccttgctggcaggggcagggaccccagggggattgactctgcagtttgggagccacaaaaagcgtagcggtgtgatttctagctcagcctcccaccgtcttcctcctacacaccaatgatgagcctcatgccagtgaggcccggagcgcttgggaggggtcccagtggggcaggcccctctgtctggccacccctctgtcctggccccggaaggccctgtggtcatgtgctcctagctgcacggtggctgctggccacaccacggcaagtggcagcaggggccggccctgtgcacaaggatgcactcctctcggcccctgtagactttctctaaagccgcccgccagcccaggccgctgctctgcaccgagctggtgggcttgggttttgtggagcgcatgcttggaccctttcagtaaggaagggtctttggggttttctgtgcccatgacttgggggctgcacccccacagcacccccacaatgtaggaaaagacctcagggaacctctccctggaaagacgggcagggctggttagcccctcccactgcctgacacctgggacaggctgggcagaggggagagagggcaggacaggccagagtgacgcccccgtgcagcttgggccggagggcaagggatgccagtaagtctgcaggtgcggggtgccacctacaggcccaggcctgtgtcccaagcagtacccaggctttgcagaccacgcggggcagggctccactgaagccacccccacccctcgccagctagctccatagggaagcctgtgtctcctgcccccagggcgcaccctcagtgcaggcacctctgttcccgctttgcccctggaggagccactattccagaaggctccaccctgccgtcctgcgggagcctgctgtccagtcctggccgggccaaggcctgggaaactgtgaaagtcagaaaggccagcggggagaggctggggcgaggggaggagggggatcagcttctgctattaccgaccccccttcatgctgcccctggcgcctagaacccttgcccctcctcatagaccaagtcccgggggtctccactcagtcctgctgcctgcttcaccagaagcagccctgtgagtgtggggtggggaagtcccttcccaacggaggtcccagcctatggccctgggcccaggtgggggtcgcctgcttccttcccggacagggtcctgcagtggccaatggtgccagagggcaggtggcccaccctcgccatcagggagggtggctggccccatccccactgccacccagccccacccactgttggaagagggaccagcgcgaggtggtgcccagggtgggcactgctgcttaatgcgaggcacacctggggcagctgagcccccaaaggctgcgggtttgccaaacacagagaggccaggccccagtgtcaggatgcagtcagcctctggcgcagctctttccacgacctggttcctggatgtcctgcttgctccacacccatctacagggaggatgtgagggggctctgcctcctagggccaggtcccccctctcgggaggaggtattgggtaggaccatccaagaaagggcagaagaccaagggcagtcggggtctagaaaggagggcgctggccctgctggacgcttcggagcccccactgtttcccactcagctttgtgctcagatcccaggtcccaaggagtgacaggggcttcctcccaccttctgtccttgtccagtcatgtaaataatgtgctttttctctccccgagtctttttttttaaacctaccgtggttcctcagctaactgcattccctacccaggcagagactgtcctatgcctcgagcttccaaacgagactcagaccgcgacacagccaccgtatttatggaatgacaaaataaataaagcccaaacccatcggtctctgtg

SEQ ID NO: 10406 - DNA, 4207 bp, Homo sapiens
  source 1..4207: mol_type = unassigned DNA
atcaccagaaccctctgccctgagaaaggggctcctgggccgacagggaaggtctgcctcctactctggaggggccgcttggggacaggcccgggctgtctcctcacagccacctgcttcctgtcctctgcctgtctcctgccccatctggccgctgctcatccaggaaggtcggagatgtcgggccctcccacctgggtcacgcgctaggcatgcctgagagcaaaggccacgccccgacaccccacggggccctggcgcgccaggcttctcagccctgcggcggcagtgcatagctctggcacgcgctgcaccaacttcctgttgggtgctgtggtcccaaggcgcgtgctttgcagcagatgtgtgacctggcgttcccctgagtgctcggaaaatggccttgtctccggtcgttcccgttcaggagcagaattttcccactgtaaaaaaccgagcaagtctggataagtgaggctggctccatgtatccagaatcaacgacgggctccccggctcggctctcgctgcggcagacgggctcccccgggatgatctacagtactcggtatgggagtcccaaaagacagctccagttttacaggaacctgggcaagtctggcctgcgggtctcctgcctgggacttggaacatgggtgaccttcggaggccagatcaccgatgagatggcagagcagctcatgaccttggcctatgataatggcatcaacctcttcgatacagcagaagtctacgcagccggcaaggctgaagtggtactgggaaacatcattaagaagaaaggatggaggcggtccagcctcgtcatcaccaccaagatcttctggggcggaaaggcggagacggagcggggcctgtccaggaagcacataatcgaaggtctgaaagcttccctggagcgactgcagctggagtacgtggatgtggtgtttgccaaccgcccggaccccaacaccccgatggaagagaccgtccgcgccatgacccacgtcatcaaccaggggatggccatgtactggggcacgtcacgctggagctccatggagatcatggaggcctactccgtggcccggcagttcaacctgaccccgcccatctgcgagcaggctgagtaccacatgttccagcgtgagaaagtggaggtgcagctgccggagctgttccacaagataggagtgggcgccatgacctggtcccctctggcctgtggcattgtttctggcaagtacgacagtggcatcccaccctactcaagagcctccttgaagggctaccagtggctgaaggacaagatcctcagtgaggagggccggcgccagcaagccaagctgaaggagctgcaggccatcgccgagcgcctgggctgcaccctgccccagctggccatagcctggtgcctgaggaatgagggagtcagctccgtgctcctgggggcctccaatgcggaccagctcatggagaacattggggcaatacaggtccttccgaaactgtcatcttccattatccacgagattgatagtattttgggcaataaaccctacagcaaaaaggactacagatcctaagccgcccccgcccgcctgctcggacagtttccgttccctcctagtctctgttcgctcgcttaagctgttttgaagccaagtgaagagtgtggtttgcatccaagagaaaacaccacactgtgatgtcatcgggaaatgatctcccaagtcgctgccagacaccacccactgcttcgccggacaatgtcgaagtccagtctgtgccggggaaggcactggttaggaaggatgttcaaacggtcccacccaagcctgtcacctctgctcatcctccaagaccacccagctttctcccagccacagccaagattcccaaagtcaaggcccaaagatttccaaggttcccaaagtcaaggccaggccaaggcctggttgggtccttggggcgggcagggccagcctctcctctgctgagaatccccacttggtgtagggggagaggggaaaggggtctggcccatcgaggggccccttctgccagggccttggttgctggggcagggcctccccactgggggtcttcctccacctcccactttccaagggctccaggaatctggggcctgaccacagattcctctcccatccttttctgctccaacctgccccactgggtcccggcaggggccatgcctaccaagctcgagctggcccttgacccccacccacccccacccttgctggcaggggcagggaccccagggggattgactctgcagtttgggagccacaaaaagcgtagcggtgtgatttctagctcagcctcccaccgtcttcctcctacacaccaatgatgagcctcatgccagtgaggcccggagcgcttgggaggggtcccagtggggcaggcccctctgtctggccacccctctgtcctggccccggaaggccctgtggtcatgtgctcctagctgcacggtggctgctggccacaccacggcaagtggcagcaggggccggccctgtgcacaaggatgcactcctctcggcccctgtagactttctctaaagccgcccgccagcccaggccgctgctctgcaccgagctggtgggcttgggttttgtggagcgcatgcttggaccctttcagtaaggaagggtctttggggttttctgtgcccatgacttgggggctgcacccccacagcacccccacaatgtaggaaaagacctcagggaacctctccctggaaagacgggcagggctggttagcccctcccactgcctgacacctgggacaggctgggcagaggggagagagggcaggacaggccagagtgacgcccccgtgcagcttgggccggagggcaagggatgccagtaagtctgcaggtgcggggtgccacctacaggcccaggcctgtgtcccaagcagtacccaggctttgcagaccacgcggggcagggctccactgaagccacccccacccctcgccagctagctccatagggaagcctgtgtctcctgcccccagggcgcaccctcagtgcaggcacctctgttcccgctttgcccctggaggagccactattccagaaggctccaccctgccgtcctgcgggagcctgctgtccagtcctggccgggccaaggcctgggaaactgtgaaagtcagaaaggccagcggggagaggctggggcgaggggaggagggggatcagcttctgctattaccgaccccccttcatgctgcccctggcgcctagaacccttgcccctcctcatagaccaagtcccgggggtctccactcagtcctgctgcctgcttcaccagaagcagccctgtgagtgtggggtggggaagtcccttcccaacggaggtcccagcctatggccctgggcccaggtgggggtcgcctgcttccttcccggacagggtcctgcagtggccaatggtgccagagggcaggtggcccaccctcgccatcagggagggtggctggccccatccccactgccacccagccccacccactgttggaagagggaccagcgcgaggtggtgcccagggtgggcactgctgcttaatgcgaggcacacctggggcagctgagcccccaaaggctgcgggtttgccaaacacagagaggccaggccccagtgtcaggatgcagtcagcctctggcgcagctctttccacgacctggttcctggatgtcctgcttgctccacacccatctacagggaggatgtgagggggctctgcctcctagggccaggtcccccctctcgggaggaggtattgggtaggaccatccaagaaagggcagaagaccaagggcagtcggggtctagaaaggagggcgctggccctgctggacgcttcggagcccccactgtttcccactcagctttgtgctcagatcccaggtcccaaggagtgacaggggcttcctcccaccttctgtccttgtccagtcatgtaaataatgtgctttttctctccccgagtctttttttttaaacctaccgtggttcctcagctaactgcattccctacccaggcagagactgtcctatgcctcgagcttccaaacgagactcagaccgcgacacagccaccgtatttatggaatgacaaaataaataaagcccaaacccatcggtctctgtg

SEQ ID NO: 10407 - DNA, 2458 bp, Homo sapiens
  source 1..2458: mol_type = unassigned DNA
atgcaggtgtctatcgcgtgtaccgagcagaaccttcgcagccggagcagtgaggaccgtctgtgtggaccccggccgggccccgggggcggtaatggtgggccggccggcggggggcacgggaatcctccggggggtggagggtctggccccaaggcccgagctgcactggttccccgacccccagcgcccgctggggccctccgagagagcaccggccgaggcactggcatgaaatacaggaacctagggaagtctggtcttcgggtatcctgtcttggcctaggtacctgggtcacatttggttctcagatctcagatgagacagcagaggatgtgctgactgtagcctatgagcatggtgtaaacctgtttgacaccgccgaagtgtacgcagcaggaaaggctgaaagaaccctagggaacatcctcaagagcaaaggttggaggagatcaagctatgtcatcactaccaagattttttggggaggacaggcagaaaccgagcgaggtttaagccgaaagcacatcattgagggcttgcgaggatccctggaacgcctccagctgggatacgtggacattgtctttgccaatcgctcagaccccaactgtcctatggaggagattgtgcgagccatgacctatgtcatcaaccagggcctggccctatactgggggacatcccgatggggggctgcagaaatcatggaggcctactccatggccagacagttcaatctgattcctccagtgtgtgaacaagcggagcaccatctgtttcagagggagaaggtggagatgcagctgccagagctctaccacaagattggagttggatcagtcacttggtaccctctagcctgtggtctcattactagcaagtatgatgggcgagtcccagatacttgcagggcctccatcaagggctaccagtggctcaaggacaaagtgcagagtgaagatggcaagaagcaacaagccaaagtcatggaccttcttcctgtcgctcaccagctgggctgcaccgtggcccagcttgctattgcgtggtgtctccgcagtgagggtgtcagctctgtcttgctgggggtgtcgagtgcggagcagttgatagaacacctgggcgcgctacaggtgctgagccagctgaccccgcagacagtgatggaaatagacgggctcctgggaaacaagccgcattccaagaagtagtctgtcgcgggcgcagggacccaacccggtgtcgctgcacccgcccgagccccgctcctcgcagccgcctctcccgctccggatccctccacgcagcggccggagccagactagccccgcccaccaacgagtcccggcttcgagtagtgatacgcatgaacaaagccatatccttttgcagtggggtcgagagagaaagtagcacgcccgccccctgctgcgtctttctaggcccttcttgcaaatcccgggcatgagctactcgccgtcggctctctgccacttcgtctcgctccctactctcctccccttattcccgaggcccagaaaagaaaacaaaaacaaaaacccagcacatacaagaaacatacagtgtacctcaaaaggggcccttgaaatgtcatcaaagggtaataacctagtgagtgagttgtgatgtcatctggaacataggaaatggggctcttagcgtattcggtacgaaggaagccaggctggtcctggcaggaagtaaatgataatctttgggaaaccaggaccctgcctcccagcccagaggtggaggagggcggtcagggtggggtctacagtggcacagcactgacaaaggtagagggaaatgtaatagcacatctacgctgcagtctggtgaaagtggccggggtggtccttggaaaacagttgggctgttcttggcaggaattagtgacagcctttccgtcacgggcagggacgccttgatttaaaaaaaataaataaataaaacgtctgggtatagacttttgagccttgagcagggcctcctacctggcagtggggaactgcagtcttcctcctggcaataaacctaaagcaataatgatggccccttctctgtaagacttcccaggtaactgtaaataaacctcagcttgatcctcacagtgtctaaagttgcaggggcttgggaggttagggtcacagtctcacttgtctggccctctcgccccctaacattagaaatctgctagcattagctttctctccattgctcattcaccttggtgacccaggcatcgggctcctagtcactgttctcatcaaggaccaagacaccagataccccaggccccagttttcttccttcagctaccacattccttagaacccagaaatctggcttcataattttgttcctcctctttctatgaaagacttagctatctgcctttatttgtttgtatttaaagtaatattagccata

SEQ ID NO: 10408 - DNA, 859 bp, Homo sapiens
  source 1..859: mol_type = unassigned DNA
ttggcctccagggctaccagtggctcaaggacaaagtgcagagtgaagatggcaagaagcaacaagccaaagtcatggaccttcttcctgtcgctcaccagctgggctgcaccgtggcccagcttgctattggtgagacattgcaccctgcaggggccctgtctcctcctgacatgctcccaagcccatcctaaaactggtttgtccctagggaggacgcttgtcttcagagacacttctgaaatctatgtggtcactgttccccatcagtcctctttttttcctcctctggccccagcgtggtgtctccgcagtgagggtgtcagctctgtcttgctgggggtgtcgagtgcggagcagttgatagaacacctgggcgcgctacaggtgctgagccagctgaccccgcagacagtgatggaaatagacgggctcctgggaaacaagccgcattccaagaagtagtctgtcgcgggcgcagggacccaacccggtgtcgctgcacccgcccgagccccgctcctcgcagccgcctctcccgctccggatccctccacgcagcggccggagccagactagccccgcccaccaacgagtcccggcttcgagtagtgatacgcatgaacaaagccatatccttttgcagtggggtcgagagagaaagtagcacgcccgccccctgctgcgtctttctaggcccttcttgcaaatcccgggcatgagctactcgccgtcggctctctgccacttcgtctcgctccctactctcctccccttattcccgaggcccagaaaagaaaacaaaaacaaaaacccagcacatacaagaaacatacagtgtacctcaaaaggggccctt

SEQ ID NO: 10409 - DNA, 2406 bp, Homo sapiens
  source 1..2406: mol_type = unassigned DNA
atgcaggtgtctatcgcgtgtaccgagcagaaccttcgcagccggagcagtgaggaccgtctgtgtggaccccggccgggccccgggggcggtcctcaatctgcctttcctccaggcccatctgcctagcctagccagggacccctgtctgtctgaatgcctgaacttgacttggtttacctcttccaacctgccatctaccatttggcacagcactctgcctgagggcctggtctcacaaactcaccacaatcaaacaaaattcctcccagcccctcactgcacacaacccacagatgactcaaacacagacaagaccccagaagaaggacaaaccagactgcacgtcttcaatgtgataagagggaatggagactctggacagtggctccagaggaacagtcacatatggttcacttgtccttttgagaaaattcctaggacctctgctctggagatagcacttgcccaatcttataggcccactgggtctaatttctttggactgagacacctgagggcttctcagtctggaaggagaggagctgggggctgataatctaagtccataatggaggctccaccccttcccgctgcttctgtatcttgcaggaacctagggaagtctggtcttcgggtatcctgtcttggcctaggtacctgggtcacatttggttctcagatctcagatgagacagcagaggatgtgctgactgtagcctatgagcatggtgtaaacctgtttgacaccgccgaagtgtacgcagcaggaaaggctgaaagaaccctagggaacatcctcaagagcaaaggttggaggagatcaagctatgtcatcactaccaagattttttggggaggacaggcagaaaccgagcgaggtttaagccgaaagcacatcattgagggctggagtgtaatggcacgatctcggctcactgcaacctcctcctcccgggttcaagggattctcctacctcagcgtctcgagtaactgggattacaggcacacgccaccacgcctggctaattttttgtatttttagtagaaatggggtttcaccacgttagccaggctggtctcaaactcctgacctcaggcttgcgaggatccctggaacgcctccagctgggatacgtggacattgtctttgccaatcgctcagaccccaactgtcctatggagggtaaaagcagcacccccaaaccttacagtccttcaaaactgagcacttccttgctgggtgcggtggctcattcctgtaatcccaggacgttgggaggccaaggcaggaggatcacttggggcctggagttcgagaacagtctgggcaacatagcaagaccctgtctctacaaaaaatgttttaaaattagctggctgtggtggtgtgtgccttgtactcccagctgttcaggaggctgaggcaggaggatcattcaagcccaggagtttgaggccacagtgagctatgattgcaccactgaactacatcctgagtgacagagtgagaccctgtctcaaaaaatctaaaatacaaaaattgagcacttcctcaaaccctcagcaggaagccagcccctgctcagaaggcctccaaaactccacagtggaggctgagactccaggatgtggacaggaagagaggcaaagaattgtgcgagccatgacctatgtcatcaaccagggcctggccctatactgggggacatcccgatggggggctgcagaaatcatggaggcctactccatggccagacagttcaatctgattcctccagtgtgtgaacaagcggagcaccatctgtttcagagggagaaggtggagatgcagctgccagagctctaccacaagattggagttggatcagtcacttggtaccctctagcctgtggtctcattactagcaagtatgatgggcgagtcccagatacttgcagggcctccatcaagggctaccagtggctcaaggacaaagtgcagagtgaagatggcaagaagcaacaagccaaagtcatggaccttcttcctgtcgctcaccagctgggctgcaccgtggcccagcttgctattgcgtggtgtctccgcagtgagggtgtcagctctgtcttgctgggggtgtcgagtgcggagcagttgatagaacacctgggcgcgctacaggtgctgagccagctgaccccgcagacagtgatggaaatagacgggctcctgggaaacaagccgcattccaagaagtagtctgtcgcgggcgcagggacccaacccggtgtcgctgcacccgcccgagccccgctcctcgcagccgcctctcccgctccggatccctccacgcagcggccggagccagactagccccgcccaccaacgagtcccggcttcgagtagtgatacgcatgaacaa

SEQ ID NO: 10410 - DNA, 683 bp, Homo sapiens
  source 1..683: mol_type = unassigned DNA
gagatcaagctatgtcatcactaccaagattttttggggaggacaggcagaaaccgagcgaggtttaagccgaaagcacatcattgaggagattgtgcgagccatgacctatgtcatcaaccagggcctggccctatactgggggacatcccgatggggggctgcagaaatcatggaggcctactccatggccagacagttcaatctgattcctccagtgtgtgaacaagcggagcaccatctgtttcagagggagaaggtggagatgcagctgccagagctctaccacaagattggtttgcagccctcatccctgcctttaccttagcctcatccatggctaggtccttttcctgacacccagtgttcttcccttaggagttggatcagtcacttggtaccctctagcctgtggtctcattactagcaagtatgatgggcgagtcccagatacttgcagggcctccatcaagggctaccagtggctcaaggacaaagtgcagagtgaagatggcaagaagcaacaagccaaagtcatggaccttcttcctgtcgctcaccagctgggctgcaccgtggcccagcttgctattgcgtggtgtctccgcagtgagggtgtcagctctgtcttgctgggggtgtcgagtgcggagcagttgatagaacacctgggcgcgctacag

SEQ ID NO: 10411 - DNA, 572 bp, Homo sapiens
  source 1..572: mol_type = unassigned DNA
gtccttttgagaaaattcctaggacctctgctctggagatagcacttgcccaatcttataggcccactgggtctaatttctttggactgagacacctgagggcttctcagtctggaaggagaggagctgggggctgataatctaagtccataatggaggctccaccccttcccgctgcttctgtatcttgcaggaacctagggaagtctggtcttcgggtatcctgtcttggcctaggtacctgggtcacatttggttctcagatctcagatgagacagcagaggatgtgctgactgtagcctatgagcatggtgtaaacctgtttgacaccgccgaagtgtacgcagcaggaaagtaaggactggggtgaaagagctaagctccatttggaaggctgagaggaccccagggattatcttctcgttttccctctaaagaaccctgggacttctgagaacgtgaagttccaaccttttggcggagggacccgaaagcactgtaggagctacagtcccaacattagtccctctctggcttagaagtcaatgggcgtactgtgcagctacattaa

SEQ ID NO: 10412 - DNA, 1315 bp, Homo sapiens
  source 1..1315: mol_type = unassigned DNA
cgcgctgaagtggcatctctctcccgccccgcttccccctgggtccttatcctccgagacctttacctcatcctcgacctttaccctcatccatttccccctcctaatccttgctcctgtgtcccccgtaactgaatatctccactcctggcgccccccacgtttcttccctcccgccgcaaacctcgcgacctccagcagcccgcccccgcgggcccgatcctgcctggcggctcccgccgcagcctcctcagccttcccgctctgccggggttcgccccactacgcccccggtcgtcagccctcgggcttccctgctcccccctcccgtcccctcggagccccctcccccgcctcggccagccagcatgcaggtgtctatcgcgtgtaccgagcagaaccttcgcagccggagcagtgaggaccgtctgtgtggaccccggccgggccccgggggcggtaatggtgggccggccggcggggggcacgggaatcctccggggggtggagggtctggccccaaggcccgagctgcactggttccccgacccccagcgcccgctggggccctccgagagagcaccggccgaggcactggcatgaaatacaggtatgggggtggccgggcagcccaccccttccgctttcctttcgggacccctgagactgcttgagatggccgccaagaccccttcaaacttcactaagtcctcaatctgcctttcctccaggcccatctgcctagcctagccagggacccctgtctgtctgaatgcctgaacttgacttggtttacctcttccaacctgccatctaccatttggcacagcactctgcctgagggcctggtctcacaaactcaccacaatcaaacaaaattcctcccagcccctcactgcacacaacccacagatgactcaaacacagacaagaccccagaagaaggacaaaccagactgcacgtcttcaatgtgataagagggaatggagactctggacagtggctccagaggaacagtcacatatggttcacttgtccttttgagaaaattcctaggacctctgctctggagatagcacttgcccaatcttataggcccactgggtctaatttctttggactgagacacctgagggcttctcagtctggaaggagaggagctgggggctgataatctaagtccataatggaggctccaccccttcccgctgcttctgtatcttgcaggaacctagggaagtctggtcttcgggtatcctgtcttggcctaggtacctgggtcacatttggttctcagatctcagatgagacagc

SEQ ID NO: 10413 - DNA, 7965 bp, Homo sapiens
  source 1..7965: mol_type = unassigned DNA
ggacgcggaccgcgcgaacgagcaggcgacgggcgagcagcaagcggagcagcagcccgggcggcagcagcgtcgcggcggcggcggcagcggccgctccgcgcctcgcctcaccggcctcgctggcctcacctcgccgcgcccggacccgccacccccgcctccccgcccgacctccgcagcccccgtctcggccggcagcgcccaccgcctgcccgaagcgaggagcggagtgcggggcgcagaggcaccggagccagtgcccgccggccccgcaaatcaaacccagccaggagaacccccgcctggccccgtgcagctccgcgaccgccgggagctgtcccttcagcaccgccgcgggagcccaagtccgagcgcagcccagcggaaccccagctcgagcccgggctcacggagagcagcgctcggcgttagccgcacgagcaacaccccgggtgcccctgcccagggggcccgccatctcctccaggaggcggggagaaggaacgaggagggcgggcgggcaggcgggcccgccgccggggggagcaggcagccaagcaaggagagagggagggggccggagcccgccctgcgtcccgagctgcagcccggccacgcagggaggaaggcaggcggcatccatctcccccgcgccgagagcgcgccgcggcgaccacctcacagaggagcgcgaatttcccggccctgtctcctcccctccccctcctgggggctggcctctagtccggccccgggagcggctgacctttcccccaaaagctttgtgccgatttctccattttcccgcggagatggggacgggagcccggccccccaacccattttccccacctcccggggctcgctgctgagcccgcccccctccctctttccccctcactccctccctccctccctttctccctccctttctccctcccttctttcctcctctgcctcctccgctgccggaccagctccctcccacatctggctcctagagacccctgggatcccgcgcacattcccctggaccggcacccgacaaagcgcccggagaggcttggctcgctcgttggggtggccagagccgcaggcctctgttccccccgacggctggggggaggggggaagagggcgcgcgcccccctccccggcgccaactccccctggcggccgctcccatgggtgtcgctgggccgcgccatgcctaagggggcgccgcgatgggccaaggggacgagagcgagcgcatcgtgatcaacgtgggcggcacgcgccaccagacgtaccgctcgaccctgcgcacgctgcccggcacgcggctcgcctggctggcggagcccgacgcccacagccacttcgactatgacccgcgtgctgacgagttcttcttcgaccgccaccccggcgtcttcgcgcacatcctgaactactaccgcacgggcaagctgcactgcccagccgacgtgtgcgggccgctctacgaggaggagctggccttctggggcatcgacgagaccgacgtggagccctgctgctggatgacgtaccgccagcaccgcgacgccgaggaggctctggacagcttcggcggcgctcctctggacaacagcgccgacgacgcggacgccgacggccctggcgactcgggcgacggcgaggacgagctggagatgaccaagcgcctggcgctcagtgactccccggatggccggcctggcggcttttggcgccgctggcagccgcgcatctgggcgctcttcgaggacccgtactcgtcccgctacgcgcggtatgtggccttcgcttccctcttcttcatcctggtctccatcaccaccttctgcctggagacccacgagcgcttcaaccccatcgtgaacaagacggagatcgagaacgttcgcaatggcacgcaagtgcgctactaccgggaggccgagacggaggccttccttacctacatcgagggcgtctgtgtggtctggttcaccttcgagttcctcatgcgtgtcatcttctgccccaacaaggtagagttcatcaagaactcgctcaacatcattgactttgtggccatcctgcccttctacctggaggtggggctgagcggcctgtcctccaaggcagccaaggacgtgctgggcttcctgcgcgtcgtccgcttcgtgcgcatcttgcgcatctttaagctgacccgccactttgtgggcctgcgggtcctgggccacacgctccgagccagcaccaacgagttcctgctgctcatcatcttcctggccttgggcgtgctgatcttcgccaccatgatctactacgccgagaggataggggcacagcccaatgaccccagcgccagtgagcacacgcactttaagaacatccccatcggcttctggtgggccgtggtcaccatgacgaccctgggctatggagacatgtacccgcagacgtggtccggcatgctggtgggggctctgtgtgcgctggcgggcgtgctcaccatcgccatgcccgtgcccgtcatcgtgaacaatttcgggatgtattactccttagccatggctaagcagaaactaccaaagaaaaaaaagaagcatattccgcggccaccgcagctgggatctcccaattattgtaaatctgtcgtaaactctccacaccacagtactcagagtgacacatgtccgctggcccaggaagaaattttagaaattaacagagcaggtaggaaacctcttagaggcatgtcgatctgacctttcacctctgccccctgtagcgatgattccagatccagtcagactgcttccttagttccgtgggtgaccccggaccccgcactcagtctggaggtgtggagcctgggggcccagggagatgctgggcggccaaattcagcaggcaagagcctgctagaggaacctcactggtgcccctgggtaaggaggttgacgcggttggtctcgtgatgttctgaagagacaacgcggcccgccaggttgctgaggactaacttagcaggagccaggggggctctgcttggtggggcaggagtccggtgtgagtctctgactcaggctactgacccggtgttgggacagagtgggggcgggtgtgatttggaaacgctagacagcctttgatctggtccttaccatggctcccttcaggctgtgtagatggcagagatggtgcatgggatctgggcaggagggtcccttgcaaaggcaggtgcaagggttctcacccccggcagagcctgtctccatagctgagtagaattcctgccctgatttcgggctgcccagctcgaggtccttcccaggagacgcctgtagccctccgtgacaagcttacttaccccatagcatgctgaaccaactcatcttctaccaccactctagagtttagcctttatctttaggaacctgttgaagtgactctagctttcacgttgtctgtttgggttgatggtcgagtgggagtttccggtgacccgatggaagcggctgccgagcaaaagactagagggggccaccaccctgggcagcttagatgaaagcgctacagaccagcaacagcctcccaccgagggttctccccgtttccagcggtagggactgcagcagcaatatagacatcccaaccagtgtacaaccactttcccgtgaattcactgggggccgggaggggggaggggggcatgaaacaatactagtcaccgtgggatatattctaatattccatggctagtggtttgttatgggactatctcagttttatgagaacctgcacatagcacataaagttgatcatggggctctggtccgaagatataaagcccatagtctacctctacccatggaataccatcgacttattctgtggacacagggatttcaaaggaacagatgacccagagaagaatgacagcactgagtaagaaggagtgccaggtgagcaggaggttgacgtgacaggtggcatttagtctatgaaggacctccccatgcccaggtctggcaggaggctgctggctagctcagccccaggtggggaagtttccccctggtttgggtggcctcccccagtggatgattgattttcttccctgctatcgcgctctctgacccaccaccccatcccaatcctcttctggctttaccccacagctatgctggcccgagcactaccctcaaggcccatttctttgcccatgggggtttcccggtcctttcaccctgccgcatacccttcccttcctgggatttctgtaggtgcctgagaggaacatggccaggggtctccgaggctgaaacagctccgagctctctgctttggattagctagttacttgatttcaggagctaccaacagggctctgggcctctaggaggaacgcgtgggctggcccaggccccagcttccatgtgggcctggcaagaagagctcagcctgagtggcatcactgtggcactacctggcccttcccctgcatcctccccgacactggatctttcaggagtgttgccccaagcacaggtgccctgggccagccagtcaagaatccccagtgctctccaggcaggcccagattcctctgtactcttggacaatgacagtattatcctgtgcggagtccccctgccccccagggagtgcagatgtgtttgttcagacatgcacaccagctaatcccaggacacaaaacctgtaaaacccatgcactcctgtgggattgcccctgagctccacagtctctccccagccctgcttttgagagccactttgccctggtcccaggtttcaggggcccagacagttctggcttggacagtctctgtggctgaggaagtatttggggccctcacaagcttgccctctggagcttggatgcctggatccctcctgcctcccccgtcaccaactgtgctcccaagcccttcccaagcactcacttcccggtggtgttggtgctgtcctgatatcctgacccccgaggctccagcctcatccctcaccagaacacttctccctccaaaagctggcgtgtgagaccccggctatccgccaccaagaggagttgcggtctttaggggcgttgtccccacctctgcaccccagagttcttcccattcaccttttttcctgcttgcagccatgcacctagatgggcatagggttggggtgagtttgtgggagagtgagggggaggccaggggcaaggaaggtaaatgtggtggccccacaggaattgtgagagatgagatgcagccccccaaggcctttccagtctcactgtacccccaaggcagtctagtggcctcgccaaaacctgagcttctccaattccacttttaaaaccagagttaggggctgtgtgtggcacgctgggttctgagggcatccctcccgcccccccaggccagcccccagtggtgccagcagcacctgcccctcacctccacctcttggtctcgtctgaagcctcagtctgtgtgtctgtcccagggacaatctggtctcctcctgtgtgctgtggctggcatggcctcagtgtctgagggcttgtcctgggaggggtatcaagaatccaattctcacctggttgtaggacctcttgggggatgctaggagggcgccctggcacagccagggattgcctagggctgaggggcccaggagaagctacttctctcccagaaaggggctccctcctgcatctgcagtcggatgcccagaccgcccactctggacagcccacaatgcctcctccgtcctgccatgcccattcgcatgtgtcttgtccatctccgctcctgtgatgtgggtcagtcctttgtggtgccgcgtccagggctgcagggtcccacgtcagtgagcagtgggtggccggtggagggggtggtggtggccgggctcccttcctgcccatggcacctagaacagcagtgaggtctcagagaagcccccgcctgggctccctgggagctaaccttgcagcctctgggttatctttggcaaaggggtctaaagtcccctatccccagcccctctacttcccctgctgggcagcagtggctgcccagtgagtggtgctatccatggaggggggagggagctgggcagcgctgactaggcggcgggtggggctaagagagtttctgcagggacccagctgcagggtcagcagcctgtgggccctgagtggggtctttgttgtcctcaggtgggctgtgggggaagtagcggagaaatgaagtgacgccaggggccaggcatgggtgttcttttccgtgttgttcacattttctctctttctctctctctccactaatcatgtttctctctctctcctcgttttgttgcatgacttgtgccggttctcgtgattgttccctgctcgtgtctcacagactgtccccatttagcctgagacttttttcctgagtccccagctgggcagatccctcagggctaaacccaaggaaatgcccagcaacccccaacccaccccagccccgcgtgcgcccctccggtgcccgcagctggtgtgaacagtaagtactttggcggtgcctggagaccagggcagaaaagccagctgtgctgactgagggcccagcctcgggttctccttgctccaaagtttaaaaaaaaatgaccctctcgcagatgctcatctcagcccatttcaagcctggaaaccatctctgagacgctgcccatgctgccatttcatcactgcaggcctgtgggtctagtgggggcctgggggccctgggctgggggaggcagggcccccagcctctggaaagcaggtgggaatggaggctcctagccactatctcatccaaaggatggggcaggggcgggggctcacacctttgaccctattcatgggttccccagatttatacagttggcccctcgttggtttctctttcttcaagccacccctctggagttggggagggagaatgccccagtttctgaaagcatcttaaaccatagatagacgaacagcccaggggcctgggccccttcacagagcaagacttaagcttccccacccaatcattagtccctcctcaaaggttagggttgagagaagcagtaggccctaggggtgtcccgggaatcccccaggagggaaaggtgccaggctatcatccctccagggatccctgatggatgttccttgtcccctgcccaaaaccatcccgaactttgggccctttagtgattgtgagagctgggagcccccagggcctgggggcttgtggacagaaccagtgggcgggggcccagcattcagagccagagaagggtctcaggcggcaccatctccacagaggcagaggcagagagaaggcacccccctctgacccacccctccccaggcaagaactgcaggctgtggacacctcccctggcagaggatggccaacagagactcagcaagtcctcactcccctcccagaaggagacgctgcctgggaggacccactgttctccccttgaggaaaatccatgcagggtgctatgggcctcaacccccacatcgtcatccgcgtcctctccatactgtttccctcccctctcccaacaccctcctccctcagcccggagacccttggatggaagactgggccagccagagtgggaggcaggaccagcgtgtctgcgagcacacgtgtgtgcctgcagacatgccccaagaccccagagacgccccggccccagtcacatggtgtcagagttaccttggcaactggcctttttggttcagagtaaattgggaagtgaagcccctgggatttgtcgagaaacgcactgtacgtgaaatgctttgccatcttgtacgaaagactttttttttaagttccaaaattatgatgggatttttttggatttgctttacgaataaatctgattggtccatttctcttttga

SEQ ID NO: 10414 - DNA, 4295 bp, Homo sapiens
  source 1..4295: mol_type = unassigned DNA
gaacgagcaggcgacgggcgagcagcaagcggagcagcagcccgggcggcagcagcgtcgcggcggcggcggcagcggccgctccgcgcctcgcctcaccggcctcgctggcctcacctcgccgcgcccggacccgccacccccgcctccccgcccgacctccgcagcccccgtctcggccggcagcgcccaccgcctgcccgaagcgaggagcggagtgcggggcgcagaggcaccggagccagtgcccgccggccccgcaaatcaaacccagccaggagaacccccgcctggccccgtgcagctccgcgaccgccgggagctgtcccttcagcaccgccgcgggagcccaagtccgagcgcagcccagcggaaccccagctcgagcccgggctcacggagagcagcgctcggcgttagccgcacgagcaacaccccgggtgcccctgcccagggggcccgccatctcctccaggaggcggggagaaggaacgaggagggcgggcgggcaggcgggcccgccgccggggggagcaggcagccaagcaaggagagagggagggggccggagcccgccctgcgtcccgagctgcagcccggccacgcagggaggaaggcaggcggcatccatctcccccgcgccgagagcgcgccgcggcgaccacctcacagaggagcgcgaatttcccggccctgtctcctcccctccccctcctgggggctggcctctagtccggccccgggagcggctgacctttcccccaaaagctttgtgccgatttctccattttcccgcggagatggggacgggagcccggccccccaacccattttccccacctcccggggctcgctgctgagcccgcccccctccctctttccccctcactccctccctccctccctttctccctccctttctccctcccttctttcctcctctgcctcctccgctgccggaccagctccctcccacatctggctcctagagacccctgggatcccgcgcacattcccctggaccggcacccgacaaagcgcccggagaggcttggctcgctcgttggggtggccagagccgcaggcctctgttccccccgacggctggggggaggggggaagagggcgcgcgcccccctccccggcgccaactccccctggcggccgctcccatgggtgtcgctgggccgcgccatgcctaagggggcgccgcgatgggccaaggggacgagagcgagcgcatcgtgatcaacgtgggcggcacgcgccaccagacgtaccgctcgaccctgcgcacgctgcccggcacgcggctcgcctggctggcggagcccgacgcccacagccacttcgactatgacccgcgtgctgacgagttcttcttcgaccgccaccccggcgtcttcgcgcacatcctgaactactaccgcacgggcaagctgcactgcccagccgacgtgtgcgggccgctctacgaggaggagctggccttctggggcatcgacgagaccgacgtggagccctgctgctggatgacgtaccgccagcaccgcgacgccgaggaggctctggacagcttcggcggcgctcctctggacaacagcgccgacgacgcggacgccgacggccctggcgactcgggcgacggcgaggacgagctggagatgaccaagcgcctggcgctcagtgactccccggatggccggcctggcggcttttggcgccgctggcagccgcgcatctgggcgctcttcgaggacccgtactcgtcccgctacgcgcggtatgtggccttcgcttccctcttcttcatcctggtctccatcaccaccttctgcctggagacccacgagcgcttcaaccccatcgtgaacaagacggagatcgagaacgttcgcaatggcacgcaagtgcgctactaccgggaggccgagacggaggccttccttacctacatcgagggcgtctgtgtggtctggttcaccttcgagttcctcatgcgtgtcatcttctgccccaacaaggtagagttcatcaagaactcgctcaacatcattgactttgtggccatcctgcccttctacctggaggtggggctgagcggcctgtcctccaaggcagccaaggacgtgctgggcttcctgcgcgtcgtccgcttcgtgcgcatcttgcgcatctttaagctgacccgccactttgtgggcctgcgggtcctgggccacacgctccgagccagcaccaacgagttcctgctgctcatcatcttcctggccttgggcgtgctgatcttcgccaccatgatctactacgccgagaggataggggcacagcccaatgaccccagcgccagtgagcacacgcactttaagaacatccccatcggcttctggtgggccgtggtcaccatgacgaccctgggctatggagacatgtacccgcagacgtggtccggcatgctggtgggggctctgtgtgcgctggcgggcgtgctcaccatcgccatgcccgtgcccgtcatcgtgaacaatttcgggatgtattactccttagccatggctaagcagaaactaccaaagaaaaaaaagaagcatattccgcggccaccgcagctgggatctcccaattattgtaaatctgtcgtaaactctccacaccacagtactcagagtgacacatgtccgctggcccaggaagaaattttagaaattaacagagcagattccaaactgaatggggaggtggcgaaggccgcgctggcgaacgaagactgcccccacatagaccaggccctcactcccgatgagggcctgccctttacgcgctcgggcacccgcgagagatacggaccctgcttcctcttatcaaccggggagtacgcgtgcccacctggtggaggaatgagaaaggatctttgcaaagaaagccctgtcattgctaagtatatgccgacagaggctgtgagagtgacttgaccaggcggcttggccgaggacactggtggctattaagcatctgggtggacctgcagcccctcctcaccctcggacagagtaaattcacgccatgcaggtttgccggacgagtccgagtggcccaggcattgtactaggacggacgtagctttttctacggccaaatggtaactgaccgtagaggatttcttttccttcttttcattttttaaaattttattttatttggggagggggggtggaggggctccttagcatgacttgcatgaagttaaacagaaaacccagcaaaccaaacccaccaaccccctgcaactgtatgattaccctgaacaacaataatgaaaagaaaaacatcaaagccctctattttctttcaaagctcttgactttcacacacgttgttggagccaaactgtaacggcgttcagtagaaacctgtacatttctgggggtgaggggcgaggggaggagggacagagatggggaatggattgcttcctttttgtacacaagatcaagaggaaagcttccaaaaagggcagtcggtcagtcatcggtcatattgacctcaccttcatagttcatctctcacgtggaaactgagaactttgctccaaatagaattgtggaaactcgcacggctgccttcttccccgtttggcatgcttgtgacccagcggatgtctccccaagacccctgacagcagctagtctaggttgattctctcatcttatcggtgtgtagatccagtgtgaccaactttcataacaaattgttcatagtaaataatcaccaccgtatggattttccaagtgttccattaaaaccaggatgtagagcaccaaaagatcaggaccacgggaggagcagcctcctccacctttactaaggcacaacctggcattgtatgcaatttagtacttcagagtaaaaacctgcatgcccaatgttatgcaaagcgattctagcatgaaataaattttgtatcatggtttctgtatagtctaaagcagatttgttttcctgaagcagtcggaggtttgcagagacacacttctgcatctcgaataaatatagtattttcccaacagaaacagaggacagtagcttggctttggtctgattctaaaattagtggggtgggggggaaggatgatatttttgaaaaacacatgcttgagttgaaaaaaatgcaacatctcaagctttcactgcagctcacaacatttcctggaaagagagcaatgatgctttagctcaacaacctcccctccctgggccctggcccccaataataaaaaactgacttttgagatgaa

SEQ ID NO: 10415 - DNA, 2736 bp, Homo sapiens
  source 1..2736: mol_type = unassigned DNA
tcggcggcgctcctctggacaacagcgccgacgacgcggacgccgacggccctggcgactcgggcgacggcgaggacgagctggagatgaccaagcgcctggcgctcagtgactccccggatggccggcctggcggcttttggcgccgctggcagccgcgcatctgggcgctcttcgaggacccgtactcgtcccgctacgcgcggtatgtggccttcgcttccctcttcttcatcctggtctccatcaccaccttctgcctggagacccacgagcgcttcaaccccatcgtgaacaagacggagatcgagaacgttcgcaatggcacgcaagtgcgctactaccgggaggccgagacggaggccttccttacctacatcgagggcgtctgtgtggtctggttcaccttcgagttcctcatgcgtgtcatcttctgccccaacaaggtagagttcatcaagaactcgctcaacatcattgactttgtggccatcctgcccttctacctggaggtggggctgagcggcctgtcctccaaggcagccaaggacgtgctgggcttcctgcgcgtcgtccgcttcgtgcgcatcttgcgcatctttaagctgacccgccactttgtgggcctgcgggtcctgggccacacgctccgagccagcaccaacgagttcctgctgctcatcatcttcctggccttgggcgtgctgatcttcgccaccatgatctactacgccgagaggataggggcacagcccaatgaccccagcgccagtgagcacacgcactttaagaacatccccatcggcttctggtgggccgtggtcaccatgacgaccctgggctatggagacatgtacccgcagacgtggtccggcatgctggtgggggctctgtgtgcgctggcgggcgtgctcaccatcgccatgcccgtgcccgtcatcgtgaacaatttcgggatgtattactccttagccatggctaagcagaaactaccaaagaaaaaaaagaagcatattccgcggccaccgcagctgggatctcccaattattgtaaatctgtcgtaaactctccacaccacagtactcagagtgacacatgtccgctggcccaggaagaaattttagaaattaacagagcagattccaaactgaatggggaggtggcgaaggccgcgctggcgaacgaagactgcccccacatagaccaggccctcactcccgatgagggcctgccctttacgcgctcgggcacccgcgagagatacggaccctgcttcctcttatcaaccggggagtacgcgtgcccacctggtggaggaatgagaaagggtcactctgcagaaatggacaactccatctggtttttcctcagggagacagagccttcccatgtatccacgtatggagttcctattgaggactcaacctttgcaatagcttcttggaatctggaaagtctactaagtaacaggcggatagtatatacatcatggacacactggacaaagagatgattcatgttctgggtgggatggagtgacatggcatgagatttcatcacgctactcaaaatgtgaaacttttgcattatttctggaattttccattgagtattttcggactgtggctgactgcaggtaacagaaactgtagaaagtgcaactgcagataaggggaactactgttctccctctgagacacgatttgaagcaaaggggcctgggctgagtggtgggagatctgctttcttagtctgcctgggcaggtcctctggctggctcacaactgaaacatatcactgccccttctaagacttgaatatttcacttacagatgaagattgggaacagttggcttctgagatcctttccagcaccaacccactttaattctataaacccaacattcccaagtataccatggtcatctgtactttgcaggctctctctagaatggacaaaggttattctgcagtgtgggcacagatgtggtcctgtaatgcaagatactgaaaaccacatccccacccctaacccacaaatttcctctctaggcctcttttataggaatgtcttcagactaccccactgcctatcccactgacaatttaaaggcaatataactaacaagctcatcctttaccctctgtcaatatctctgctgcccatggctggctcccctgtgctctggcctccctagtgcaagctgactcagtcaatacccaagacttaccatttctaccactaggccctctcttatattgattcccaattacacattactttgttgacttcttttcatattccaccctttagatcctgaattcatcatcctttgtgtaataaattcccagttttcagaaaaagtgaaatggtccccttctatgccttcatggagacaggctgcagctggagccttttggcagccaaaagagacccctttgcagctcttaacaatctgttactgaataatttgagagaatattgctaattatgaacctgtgtctttagatacccaagtccttaagctgcagagtacccaggacaaggttctcctccttgagcaagttaccctctctgccatagtttccccatctgtgaaacaggtataataatagtacctaccttactgttgatgtaaagaatcaattaataatgtatgtaaaatgtgtaaaaccacacatagatcaataatgtcaactattactgttattatggttcaataaatatttgacag

SEQ ID NO: 10416 - DNA, 889 bp, Homo sapiens
  source 1..889: mol_type = unassigned DNA
cccaggagggactggcctcccagcaggcctggatcctgggtgtggtgggactcagctgctgcaggcatggcgtgtagaagggagataaagtctgacagtatgtggccttcgcttccctcttcttcatcctggtctccatcaccaccttctgcctggagacccacgagcgcttcaaccccatcgtgaacaagacggagatcgagaacgttcgcaatggcacgcaagtgcgctactaccgggaggccgagacggaggccttccttacctacatcgagggcgtctgtgtggtctggttcaccttcgagttcctcatgcgtgtcatcttctgccccaacaaggtagagttcatcaagaactcgctcaacatcattgactttgtggccatcctgcccttctacctggaggtggggctgagcggcctgtcctccaaggcagccaaggacgtgctgggcttcctgcgcgtcgtccgcttcgtgcgcatcttgcgcatctttaagctgacccgccactttgtgggcctgcgggtcctgggccacacgctccgagccagcaccaacgagttcctgctgctcatcatcttcctggccttgggcgtgctgatcttcgccaccatgatctactacgccgagaggataggggcacagcccaatgaccccagcgccagtgagcacacgcactttaagaacatccccatcggcttctggtgggccgtggtcaccatgacgaccctgggctatggagacatgtacccgcagacgtggtccggcatgctggtgggggctctgtgtgcgctggcgggcgtgctcaccatcgccatgcccgtgcccgtcatcgtgaacaatttcgggatgtattactccttagccatggctaagcagaaactaccaaa

SEQ ID NO: 10417 - DNA, 1270 bp, Homo sapiens
  source 1..1270: mol_type = unassigned DNA
gactttgtggccatcctgcccttctacctggaggtggggctgagcggcctgtcctccaaggcagccaaggacgtgctgggcttcctgcgcgtcgtccgcttcgtgcgcatcttgcgcatctttaagctgacccgccactttgtgggcctgcgggtcctgggccacacgctccgagccagcaccaacgagttcctgctgctcatcatcttcctggccttgggcgtgctgatcttcgccaccatgatctactacgccgagaggataggggcacagcccaatgaccccagcgccagtgagcacacgcactttaagaacatccccatcggcttctggtgggccgtggtcaccatgacgaccctgggctatggagacatgtacccgcagacgtggtccggcatgctggtgggggctctgtgtgcgctggcgggcgtgctcaccatcgccatgcccgtgcccgtcatcgtgaacaatttcgggatgtattactccttagccatggctaagcagaaactaccaaagaaaaaaaagaagcatattccgcggccaccgcagctgggatctcccaattattgtaaatctgtcgtaaactctccacaccacagtactcagagtgacacatgtccgctggcccaggaagaaattttagaaattaacagagcagattccaaactgaatggggaggtggcgaaggccgcgctggcgaacgaagactgcccccacatagaccaggccctcactcccgatgagggcctgccctttacgcgctcgggcacccgcgagagatacggaccctgcttcctcttatcaaccggggagtacgcgtgcccacctggtggaggaatgagaaaggatctttgcaaagaaagccctgtcattgctaagtatatgccgacagaggctgtgagagtgacttgaccaggcggcttggccgaggacactggtggctattaagcatctgggtggacctgcagcccctcctcaccctcggacagagtaaattcacgccatgcaggtttgccggacgagtccgagtggcccaggcattgtactaggacggacgtagctttttctacggccaaatggtcactctgcagaaatggacaactccatctggtttttcctcagggagacagagccttcccatgtatccacgtatggagttcctattgaggactcaacctttgcaatagcttcttggaatctggaaagtctactaaggtgagttcgtccctataaaaagggaccaggaggctgggcacggtggctcacg

SEQ ID NO: 10418 - DNA, 2530 bp, Homo sapiens
  source 1..2530: mol_type = unassigned DNA
ccgagaggataggggcacagcccaatgaccccagcgccagtgagcacacgcactttaagaacatccccatcggcttctggtgggccgtggtcaccatgacgaccctgggctatggagacatgtacccgcagacgtggtccggcatgctggtgggggctctgtgtgcgctggcgggcgtgctcaccatcgccatgcccgtgcccgtcatcgtgaacaatttcgggatgtattactccttagccatggctaagcagaaactaccaaagaaaaaaaagaagcatattccgcggccaccgcagctgggatctcccaattattgtaaatctgtcgtaaactctccacaccacagtactcagagtgacacatgtccgctggcccaggaagaaattttagaaattaacagagcaggtcactctgcagaaatggacaactccatctggtttttcctcagggagacagagccttcccatgtatccacgtatggagttcctattgaggactcaacctttgcaatagcttcttggaatctggaaagtctactaaggtaaaaattgataactggatcatgctaagttctggcaaggatgtggagctatagaaatctgcatttactgcttctgtcaagcatcaggcactaagctcagtcctttatatatattatcccgtctaactgtcatagttgctctgagcattttcattctttatctacatagggaaactgaggttcaaggaggttataattcactcaacgttgcattgctaggaaggagcagagctgagtttctttcatggacttagtgtccctctcaaaatcacgtcaacttcatttgaaaattataatgaaactattaaaactataatattcttactttttatacaaaattattatctttcttttccaaccatacttgtacttgttacaacctcagaaggcctatataaagtaaagcgggggagtaggagagccagagtattatctttattttatagatgtgctattggagcccttggagggcgagtaaattacttaaggtaatttaaatttcattttaaaattgaagattaacaaaggtacctggacagtttaaggagccagattaaaaagacatcttcactaggggacagtcagtactggatttggaaactgtcacagttttaaatacagtagtgcccccttatcttcaggggacatgttccaagacccccaagggatgcctgaaatctcagatagtaccaaactatatatatttgctattttttcctatacagtaacaggcggatagtatatacatcatggacacactggacaaagagatgattcatgttctgggtgggatggagtgacatggcatgagatttcatcacgctactcaaaatgtgaaacttttgcattatttctggaattttccattgagtattttcggactgtggctgactgcaggtaacagaaactgtagaaagtgcaactgcagataaggggaactactgttctccctctgagacacgatttgaagcaaaggggcctgggctgagtggtgggagatctgctttcttagtctgcctgggcaggtcctctggctggctcacaactgaaacatatcactgccccttctaagacttgaatatttcacttacagatgaagattgggaacagttggcttctgagatcctttccagcaccaacccactttaattctataaacccaacattcccaagtataccatggtcatctgtactttgcaggctctctctagaatggacaaaggttattctgcagtgtgggcacagatgtggtcctgtaatgcaagatactgaaaaccacatccccacccctaacccacaaatttcctctctaggcctcttttataggaatgtcttcagactaccccactgcctatcccactgacaatttaaaggcaatataactaacaagctcatcctttaccctctgtcaatatctctgctgcccatggctggctcccctgtgctctggcctccctagtgcaagctgactcagtcaatacccaagacttaccatttctaccactaggccctctcttatattgattcccaattacacattactttgttgacttcttttcatattccaccctttagatcctgaattcatcatcctttgtgtaataaattcccagttttcagaaaaagtgaaatggtccccttctatgccttcatggagacaggctgcagctggagccttttggcagccaaaagagacccctttgcagctcttaacaatctgttactgaataatttgagagaatattgctaattatgaacctgtgtctttagatacccaagtccttaagctgcagagtacccaggacaaggttctcctccttgagcaagttaccctctctgccatagtttccccatctgtgaaacaggtataataatagtacctaccttactgttgatgtaaagaatcaattaataatgtatgtaaaatgtgtaaaaccacacatagatcaataatgtcaactattactgttattatggttcaataaa

SEQ ID NO: 10419 - DNA, 660 bp, Homo sapiens
  source 1..660: mol_type = unassigned DNA
aagcagaaactaccaaagaaaaaaaagaagcatattccgcggccaccgcagctgggatctcccaattattgtaaatctgtcgtaaactctccacaccacagtactcagagtgacacatgtccgctggcccaggaagaaattttagaaattaacagagcagggatttcaaaggaacagatgacccagagaagaatgacagcactgagtaagaaggagtgccagattccaaactgaatggggaggtggcgaaggccgcgctggcgaacgaagactgcccccacatagaccaggccctcactcccgatgagggcctgccctttacgcgctcgggcacccgcgagagatacggaccctgcttcctcttatcaaccggggagtacgcgtgcccacctggtggaggaatgagaaaggatctttgcaaagaaagccctgtcattgctaagtatatgccgacagaggctgtgagagtgacttgaccaggcggcttggccgaggacactggtggctattaagcatctgggtggacctgcagcccctcctcaccctcggacagagtaaattcacgccatgcaggtttgccggacgagtccgagtggcccaggcattgtactaggacggacgtagctttttctacggccaaatggtaactgaccgtagagg

SEQ ID NO: 10420 - DNA, 1541 bp, Homo sapiens
  source 1..1541: mol_type = unassigned DNA
attccgcggccaccgcagctgggatctcccaattattgtaaatctgtcgtaaactctccacaccacagtactcagagtgacacatgtccgctggcccaggaagaaattttagaaattaacagagcaggtcactctgcagaaatggacaactccatctggtttttcctcagggagacagagccttcccatgtatccacgtatggagttcctattgaggactcaacctttgcaatagcttcttggaatctggaaagtctactaagtaacaggcggatagtatatacatcatggacacactggacaaagagatgattcatgttctgggtgggatggagtgacatggcatgagatttcatcacgctactcaaaatgtgaaacttttgcattatttctggaattttccattgagtattttcggactgtggctgactgcaggtaacagaaactgtagaaagtgcaactgcagataaggggaactactgttctccctctgagacacgatttgaagcaaaggggcctgggctgagtggtgggagatctgctttcttagtctgcctgggcaggtcctctggctggctcacaactgaaacatatcactgccccttctaagacttgaatatttcacttacagatgaagattgggaacagttggcttctgagatcctttccagcaccaacccactttaattctataaacccaacattcccaagtataccatggtcatctgtactttgcaggctctctctagaatggacaaaggttattctgcagtgtgggcacagatgtggtcctgtaatgcaagatactgaaaaccacatccccacccctaacccacaaatttcctctctaggcctcttttataggaatgtcttcagactaccccactgcctatcccactgacaatttaaaggcaatataactaacaagctcatcctttaccctctgtcaatatctctgctgcccatggctggctcccctgtgctctggcctccctagtgcaagctgactcagtcaatacccaagacttaccatttctaccactaggccctctcttatattgattcccaattacacattactttgttgacttcttttcatattccaccctttagatcctgaattcatcatcctttgtgtaataaattcccagttttcagaaaaagtgaaatggtccccttctatgccttcatggagacaggctgcagctggagccttttggcagccaaaagagacccctttgcagctcttaacaatctgttactgaataatttgagagaatattgctaattatgaacctgtgtctttagatacccaagtccttaagctgcagagtacccaggacaaggttctcctccttgagcaagttaccctctctgccatagtttccccatctgtgaaacaggtataataatagtacctaccttactgttgatgtaaagaatcaattaataatgtatgtaaaatgtgtaaaaccacacatagatcaataatgtcaactattactgttattatggttcaataaatatttgacagttggtca

SEQ ID NO: 10421 - DNA, 537 bp, Homo sapiens
  source 1..537: mol_type = unassigned DNA
ctccacaccacagtactcagagtgacacatgtccgctggcccaggaagaaattttagaaattaacagagcaggtcactctgcagaaatggacaactccatctggtttttcctcagggagacagagccttcccatgtatccacgtatggagttcctattgaggactcaacctttgcaatagcttcttggaatctggaaagtctactaaggtgagttcgtccctataaaaagggaccaggaggctgggcacggtggctcacgcctgtaattccagcactttgtgaggccgaggcgggtggatcacctgaggtcaggagtttgagaagcctggccaacatggcaaaacctgtccctactaaaacaaaaacaaaaaaaacatatatacacacacacaatttagccaggcacagtggcgcacacctgtagtcccagctactcgggaggctgaagctgaggcaggggaaccgcttgaaatcgggaggcagaggttgcagtgagccaagatcacaccactgcactccagcctgggggacagagc

SEQ ID NO: 10422 - DNA, 3102 bp, Homo sapiens
  source 1..3102: mol_type = unassigned DNA
tccgctggcccaggaagaaattttagaaattaacagagcagattccaaactgaatggggaggtggcgaaggccgcgctggcgaacgaagactgcccccacatagaccaggccctcactcccgatgagggcctgccctttacgcgctcgggcacccgcgagagatacggaccctgcttcctcttatcaaccggggagtacgcgtgcccacctggtggaggaatgagaaagggtatgtagaggaagctggagcaccgtgcatcgtccgggccgcctcgcgctcctgcagatgggtgggcagggcggcgggcaagggcgctgaggggcaggcaggcacaccgaggggggcaaggatggagggaatctcccagggtcggcccctggagggctgaggcccttccccccaagtgagatgtcaggctggcagagagaacttgaggccctggcagctgtgggttgctgggagttgagaggggattggacaggttgactttaggccatgaccccaaggcaggggtacccaggaatgcaggaggagccttgactcccccaggctgctcttgcagatggcaggtcaagtcccaaaggcaaagtgatctctcctctcccctgattgaggagggcagtggagtgggccaggaccctgtgaacttagctacacaagatccgtgttcttggcatggaagaggcatccttgaaagataatcaatccacaagccagagggaggagaggcaagaagagagagatgtcttcagggcttgggggtaaggccattgtccttgcagtcagaatattgctagtggcagatcgagaacttgccaagagaaggtggttgagcaggacggtcctgccccttccatccgcagcacccacaggcctctgcccagggtgtggtcagcaccctcttgtggttggcgaaggctgaggctgctggtggcccctgctccaggtctctttgtagtcagcacgctaggctgtccccactggagagagaggcttctcctagagcttcagcaccggccggggagaggcttggggtgggggcccagggcgcccgagctcaaggctccaggcactggcccggacctagaaggcagagggcacctttcttggtgcagcagactggctgggcagctcgtgcatgtcttggagtgcctcacacgtgcacacggatgcatgctgaacggggtgagcaggctgggtcagaagaggagctgggtttttgaaagcaacagttggtgcagcctatggtcattcacaactgctccagtatttgaagtgattaaaccacacgcaggagaaaacagaatgcaaaagcaaaggcaaacctagaagaggagaggcagcccgcacggagacgagggaacgtggttctggtcactggtgcttagttgtgcccacctggtctaggctggtctctgcttctctgccctgcccagaggtcctttgagccggggcacggtgcgcaactccccgcatggtgctgcatggcggagggctgccagccttcgggagggtcccatccttggcaccggccatggatgggcctgatgttcccctttgcgactggctttttcccagttggaggtgctagaatgcccagaagcagaatgcccgaggagtgaggggaaaagcaggtagacggttcccagtgtctgtgccctgcccagtaagctctcgtgggctttctgtctccatcatcttgaatgttagactgattggtgtggccccaaagagcagacaagacagtctctttactgtggtgccagaagcacagaagggagtgtgggacaggaacagcgctgctccctgcagtggctgggagtccagcggtaagcactgtccacaggagatacccattcctcagtcccaccgaggcttaggtgccagagtctttgggaggcgctaagggtgaagtgtccccacctacatccattcggcccgcgctctcatggagccacgacagccgccgaggacttgtttttctcaggctaattctgagccagaaggcatgcaggtgtgtgagtcaatgtgcagagcagaagtagggactcatcccattcccccaggagggagagaaagaggcgtgctaggctggctcagtgcatgggcaaaccaagccagctggagaagaatctgcctgcctctgcatgcggctgttctgtctttcctcctccttcttaaaaactaagtaccaagcgggatgggagagccaagaagagaagctcaagtgttaattgtattctttacatacagatctttgcaaagaaagccctgtcattgctaagtatatgccgacagaggctgtgagagtgacttgaccaggcggcttggccgaggacactggtggctattaagcatctgggtggacctgcagcccctcctcaccctcggacagagtaaattcacgccatgcaggtttgccggacgagtccgagtggcccaggcattgtactaggacggacgtagctttttctacggccaaatggtaactgaccgtagaggatttcttttccttcttttcattttttaaaattttattttatttggggagggggggtggaggggctccttagcatgacttgcatgaagttaaacagaaaacccagcaaaccaaacccaccaaccccctgcaactgtatgattaccctgaacaacaataatgaaaagaaaaacatcaaagccctctattttctttcaaagctcttgactttcacacacgttgttggagccaaactgtaacggcgttcagtagaaacctgtacatttctgggggtgaggggcgaggggaggagggacagagatggggaatggattgcttcctttttgtacacaagatcaagaggaaagcttccaaaaagggcagtcggtcagtcatcggtcatattgacctcaccttcatagttcatctctcacgtggaaactgagaactttgctccaaatagaattgtggaaactcgcacggctgccttcttccccgtttggcatgcttgtgacccagcggatgtctccccaagacccctgacagcagctagtctaggttgattctctcatcttatcggtgtgtagatccagtgtgaccaactttcataacaaattgttc

SEQ ID NO: 10423 - DNA, 525 bp, Homo sapiens
  source 1..525: mol_type = unassigned DNA
ctgggggccgggaggggggaggggggcatgaaacaatactagtcaccgtgggatatattctaatattccatggctagtggtttgttatgggactatctcagttttatgagaacctgcacatagcacataaagttgatcatggggctctggtccgaagatataaagcccatagtctacctctacccatggaataccatcgacttattctgtggacacagggatttcaaaggaacagatgacccagagaagaatgacagcactgagtaagaaggagtgccagattccaaactgaatggggaggtggcgaaggccgcgctggcgaacgaagactgcccccacatagaccaggccctcactcccgatgagggcctgccctttacgcgctcgggcacccgcgagagatacggaccctgcttcctcttatcaaccggggagtacgcgtgcccacctggtggaggaatgagaaagggtatgtagaggaagctggagcaccgtgcatcgtccgggccgcctcgcgctcctgca

SEQ ID NO: 10424 - DNA, 849 bp, Homo sapiens
  source 1..849: mol_type = unassigned DNA
agtggtttgttatgggactatctcagttttatgagaacctgcacatagcacataaagttgatcatggggctctggtccgaagatataaagcccatagtctacctctacccatggaataccatcgacttattctgtggacacagggatttcaaaggaacagatgacccagagaagaatgacagcactgagtaagaaggagtgccagattccaaactgaatggggaggtggcgaaggccgcgctggcgaacgaagactgcccccacatagaccaggccctcactcccgatgagggcctgccctttacgcgctcgggcacccgcgagagatacggaccctgcttcctcttatcaaccggggagtacgcgtgcccacctggtggaggaatgagaaaggatctttgcaaagaaagccctgtcattgctaagtatatgccgacagaggctgtgagagtgacttgaccaggcggcttggccgaggacactggtggctattaagcatctgggtggacctgcagcccctcctcaccctcggacagagtaaattcacgccatgcaggtttgccggacgagtccgagtggcccaggcattgtactaggacggacgtagctttttctacggccaaatggtaactgaccgtagaggatttcttttccttcttttcattttttaaaattttattttatttggggagggggggtggaggggctccttagcatgacttgcatgaagttaaacagaaaacccagcaaaccaaacccaccaaccccctgcaactgtatgattaccctgaacaacaataatgaaaagaaaaacatcaaagccctctattttctttcaaagctcttgac

SEQ ID NO: 10425 - DNA, 1859 bp, Homo sapiens
  source 1..1859: mol_type = unassigned DNA
ccacacctgctggatccatcaccaactcatctttttgcaaactttgagcaaacccaggagtccccactcccagcactgtgggcagcccgaaggctgcctgaatgagctgaaccccccaccaagccccctgccttgtgccctcctcgctccacagcctgcccgcttttccgtcctcagggacgctcaagctgccctctgccaataccccgcttctggcctgtccccccctgccccccactaaacagttttcagtgtctcaatagcttctgcttatatgtttgaagattccaaactgaatggggaggtggcgaaggccgcgctggcgaacgaagactgcccccacatagaccaggccctcactcccgatgagggcctgccctttacgcgctcgggcacccgcgagagatacggaccctgcttcctcttatcaaccggggagtacgcgtgcccacctggtggaggaatgagaaaggatctttgcaaagaaagccctgtcattgctaagtatatgccgacagaggctgtgagagtgacttgaccaggcggcttggccgaggacactggtggctattaagcatctgggtggacctgcagcccctcctcaccctcggacagagtaaattcacgccatgcaggtttgccggacgagtccgagtggcccaggcattgtactaggacggacgtagctttttctacggccaaatggtaactgaccgtagaggatttcttttccttcttttcattttttaaaattttattttatttggggagggggggtggaggggctccttagcatgacttgcatgaagttaaacagaaaacccagcaaaccaaacccaccaaccccctgcaactgtatgattaccctgaacaacaataatgaaaagaaaaacatcaaagccctctattttctttcaaagctcttgactttcacacacgttgttggagccaaactgtaacggcgttcagtagaaacctgtacatttctgggggtgaggggcgaggggaggagggacagagatggggaatggattgcttcctttttgtacacaagatcaagaggaaagcttccaaaaagggcagtcggtcagtcatcggtcatattgacctcaccttcatagttcatctctcacgtggaaactgagaactttgctccaaatagaattgtggaaactcgcacggctgccttcttccccgtttggcatgcttgtgacccagcggatgtctccccaagacccctgacagcagctagtctaggttgattctctcatcttatcggtgtgtagatccagtgtgaccaactttcataacaaattgttcatagtaaataatcaccaccgtatggattttccaagtgttccattaaaaccaggatgtagagcaccaaaagatcaggaccacgggaggagcagcctcctccacctttactaaggcacaacctggcattgtatgcaatttagtacttcagagtaaaaacctgcatgcccaatgttatgcaaagcgattctagcatgaaataaattttgtatcatggtttctgtatagtctaaagcagatttgttttcctgaagcagtcggaggtttgcagagacacacttctgcatctcgaataaatatagtattttcccaacagaaacagaggacagtagcttggctttggtctgattctaaaattagtggggtgggggggaaggatgatatttttgaaaaacacatgcttgagttgaaaaaaatgcaacatctcaagctttcactgcagctcacaacatttcctggaaagagagcaatgatgctttagctcaacaacctcccctccctgggccctggcccccaataataaaaaactgacttttgagatg

SEQ ID NO: 10426 - DNA, 2931 bp, Homo sapiens
  source 1..2931: mol_type = unassigned DNA
agtcatgtctgagtcacagagatgggcaagatcgagaacaacgagagggtgatcctcaatgtcgggggcacccggcacgaaacctaccgcagcaccctcaagaccctgcctggaacacgcctggcccttcttgcctcctccgagcccccaggcgactgcttgaccacggcgggcgacaagctgcagccgtcgccgcctccactgtcgccgccgccgagagcgcccccgctgtcccccgggccaggcggctgcttcgagggcggcgcgggcaactgcagttcccgcggcggcagggccagcgaccatcccggtggcggccgcgagttcttcttcgaccggcacccgggcgtcttcgcctatgtgctcaattactaccgcaccggcaagctgcactgccccgcagacgtgtgcgggccgctcttcgaggaggagctggccttctggggcatcgacgagaccgacgtggagccctgctgctggatgacctaccggcagcaccgcgacgccgaggaggcgctggacatcttcgagacccccgacctcattggcggcgaccccggcgacgacgaggacctggcggccaagaggctgggcatcgaggacgcggcggggctcgggggccccgacggcaaatctggccgctggaggaggctgcagccccgcatgtgggccctcttcgaagacccctactcgtccagagccgccaggtttattgcttttgcttctttattcttcatcctggtttcaattacaactttttgcctggaaacacatgaagctttcaatattgttaaaaacaagacagaaccagtcatcaatggcacaagtgttgttctacagtatgaaattgaaacggatcctgccttgacgtatgtagaaggagtgtgtgtggtgtggtttacttttgaatttttagtccgtattgttttttcacccaataaacttgaattcatcaaaaatctcttgaatatcattgactttgtggccatcctacctttctacttagaggtgggactcagtgggctgtcatccaaagctgctaaagatgtgcttggcttcctcagggtggtaaggtttgtgaggatcctgagaattttcaagctcacccgccattttgtaggtctgagggtgcttggacatactcttcgagctagtactaatgaatttttgctgctgataattttcctggctctaggagttttgatatttgctaccatgatctactatgccgagagagtgggagctcaacctaacgacccttcagctagtgagcacacacagttcaaaaacattcccattgggttctggtgggctgtagtgaccatgactaccctgggttatggggatatgtacccccaaacatggtcaggcatgctggtgggagccctgtgtgctctggctggagtgctgacaatagccatgccagtgcctgtcattgtcaataattttggaatgtactactccttggcaatggcaaagcagaaacttccaaggaaaagaaagaagcacatccctcctgctcctcaggcaagctcacctactttttgcaagacagaattaaatatggcctgcaatagtacacagagtgacacatgtctgggcaaagacaatcgacttctggaacataacagatcagtgttatcaggtgacgacagtacaggaagtgagccgccactatcacccccagaaaggctccccatcagacgctctagtaccagagacaaaaacagaagaggggaaacatgtttcctactgacgacaggtgattacacgtgtgcttctgatggagggatcaggaaagtgttgtacagaatttatcatggattattgactgctgagaaagggacagtggaatttagccataccaaggactatactggaaacagacttctgctgctgaatgtgccctgatgtgaccaggttgcacttggaagagatcctcgcgtcttcatgaggcacttaaagcttataaaagaactgcggctggaactcatctggtgctccccatgagagtgctctgcttgtagactggccagtgtccatgaaacaactgtaaataccaacatgtgtgcatgggtcaacagtcttggccatttctcatcaaaagaagccaaattcatgatcaacatctctgaagtttcaagtaaggcccacacttctttgaattactcttcatgggcccacattaggttgtgctgtgaattacttaaggcagtgatactgatgtagtatagttttgtcttaatttcccttatttctacttctttggttgaatctatgaacttgattgtataattttcttataaattactgatgtaatcagcttgtcaattatgttgtgaaattgttagtattcatttatcaaaaatgacctatgtttagtcacatatttgtttagttctgggaaattgttatagcttaaatggaactcaccaacattattcatagtttaagtcttttatcattattacctcaattataaatattacaaaaacataattctggcaatgagagtatttttttattcaatgatcaaggagcaatgtcagtatatagtagaatatcaattaaattatatcctaaaatgtatattttgcataaaagagatattctttaatcaattacttttttgtgagttttgtggcaaatgaagcttgtacgtgtctttaaaactgttgtagatgaaactgtataagatttttacatcttgcttaatcaatattttcagagtctattagttcccctgggattctgaatataacatatagcctattataaatccctgtatcgtggaccttttgtgaacatttcaaggcgcatgcacaaccttgatgataaccagtggaaatgtaactaactgaaatgaagaataaaaggcaaatgagctggggataaacttgaatgttatctgattaaattactcaaattatt

SEQ ID NO: 10427 - DNA, 3026 bp, Homo sapiens
  source 1..3026: mol_type = unassigned DNA
agtcatgtctgagtcacagagatgggcaagatcgagaacaacgagagggtgatcctcaatgtcgggggcacccggcacgaaacctaccgcagcaccctcaagaccctgcctggaacacgcctggcccttcttgcctcctccgagcccccaggcgactgcttgaccacggcgggcgacaagctgcagccgtcgccgcctccactgtcgccgccgccgagagcgcccccgctgtcccccgggccaggcggctgcttcgagggcggcgcgggcaactgcagttcccgcggcggcagggccagcgaccatcccggtggcggccgcgagttcttcttcgaccggcacccgggcgtcttcgcctatgtgctcaattactaccgcaccggcaagctgcactgccccgcagacgtgtgcgggccgctcttcgaggaggagctggccttctggggcatcgacgagaccgacgtggagccctgctgctggatgacctaccggcagcaccgcgacgccgaggaggcgctggacatcttcgagacccccgacctcattggcggcgaccccggcgacgacgaggacctggcggccaagaggctgggcatcgaggacgcggcggggctcgggggccccgacggcaaatctggccgctggaggaggctgcagccccgcatgtgggccctcttcgaagacccctactcgtccagagccgccaggtttattgcttttgcttctttattcttcatcctggtttcaattacaactttttgcctggaaacacatgaagctttcaatattgttaaaaacaagacagaaccagtcatcaatggcacaagtgttgttctacagtatgaaattgaaacggatcctgccttgacgtatgtagaaggagtgtgtgtggtgtggtttacttttgaatttttagtccgtattgttttttcacccaataaacttgaattcatcaaaaatctcttgaatatcattgactttgtggccatcctacctttctacttagaggtgggactcagtgggctgtcatccaaagctgctaaagatgtgcttggcttcctcagggtggtaaggtttgtgaggatcctgagaattttcaagctcacccgccattttgtaggtctgagggtgcttggacatactcttcgagctagtactaatgaatttttgctgctgataattttcctggctctaggagttttgatatttgctaccatgatctactatgccgagagagtgggagctcaacctaacgacccttcagctagtgagcacacacagttcaaaaacattcccattgggttctggtgggctgtagtgaccatgactaccctgggttatggggatatgtacccccaaacatggtcaggcatgctggtgggagccctgtgtgctctggctggagtgctgacaatagccatgccagtgcctgtcattgtcaataattttggaatgtactactccttggcaatggcaaagcagaaacttccaaggaaaagaaagaagcacatccctcctgctcctcaggcaagctcacctactttttgcaagacagaattaaatatggcctgcaatagtacacagagtgacacatgtctgggcaaagacaatcgacttctggaacataacagatcagtgttatcaggtgacgacagtacaggaagtgagccgccactatcacccccagaaaggctccccatcagacgctctagtaccagagacaaaaacagaagaggggaaacatgtttcctactgacgacaggtgattacacgtgtgcttctgatggagggatcaggaaagataactgcaaagaggttgtcattactggttacacgcaagccgaggccagatctcttacttaatgacttggggaaggcacaaaacatgagagaaagtgttgtacagaatttatcatggattattgactgctgagaaagggacagtggaatttagccataccaaggactatactggaaacagacttctgctgctgaatgtgccctgatgtgaccaggttgcacttggaagagatcctcgcgtcttcatgaggcacttaaagcttataaaagaactgcggctggaactcatctggtgctccccatgagagtgctctgcttgtagactggccagtgtccatgaaacaactgtaaataccaacatgtgtgcatgggtcaacagtcttggccatttctcatcaaaagaagccaaattcatgatcaacatctctgaagtttcaagtaaggcccacacttctttgaattactcttcatgggcccacattaggttgtgctgtgaattacttaaggcagtgatactgatgtagtatagttttgtcttaatttcccttatttctacttctttggttgaatctatgaacttgattgtataattttcttataaattactgatgtaatcagcttgtcaattatgttgtgaaattgttagtattcatttatcaaaaatgacctatgtttagtcacatatttgtttagttctgggaaattgttatagcttaaatggaactcaccaacattattcatagtttaagtcttttatcattattacctcaattataaatattacaaaaacataattctggcaatgagagtatttttttattcaatgatcaaggagcaatgtcagtatatagtagaatatcaattaaattatatcctaaaatgtatattttgcataaaagagatattctttaatcaattacttttttgtgagttttgtggcaaatgaagcttgtacgtgtctttaaaactgttgtagatgaaactgtataagatttttacatcttgcttaatcaatattttcagagtctattagttcccctgggattctgaatataacatatagcctattataaatccctgtatcgtggaccttttgtgaacatttcaaggcgcatgcacaaccttgatgataaccagtggaaatgtaactaactgaaatgaagaataaaaggcaaatgagctggggataaacttgaatgttatctgattaaattactcaaattatt

SEQ ID NO: 10428 - DNA, 5625 bp, Homo sapiens
  source 1..5625: mol_type = unassigned DNA
gtggagagtggggtgtaaataaggcaggcagaagctccagagagggtggagacagagcttcacggaagaaaaatatgtgaacctggttggtacacatagcttctccagacccacccacccactctttcctgagccctgtgcttcggatggcggcgggaggttgatggcgagtggtgctgaagggacagctccagcagtggctgatttgggggagaaacaaaatctgcagatggaatccgagcagggcgacttcaccttcaagtggtgagctctcctgacctgcggccagtctccactccattcacggccagccgatctgcccgctcccggaggggtcgggcagtgccggctggacccgccccgagctccatggtttgcccaaccctgcgcgatggtgactctgggcgcggaggttggcgactggcaaatccgcagatcacagaatgaaggcggggagcgcggccggcggccggcgggggctttctcccccaccccagcgcccagggaagcggctcaaccacctgaatccggaaaacgccaacaagtagtttctcgtcggagaagggcggctcacctgggcgccaagactcagtcccgctgcccagagaacctcgtccactcggaaaccaaagcagaaccacttttctctcggtctcgttaagtcatgtctgagtcacagagatgggcaagatcgagaacaacgagagggtgatcctcaatgtcgggggcacccggcacgaaacctaccgcagcaccctcaagaccctgcctggaacacgcctggcccttcttgcctcctccgagcccccaggcgactgcttgaccacggcgggcgacaagctgcagccgtcgccgcctccactgtcgccgccgccgagagcgcccccgctgtcccccgggccaggcggctgcttcgagggcggcgcgggcaactgcagttcccgcggcggcagggccagcgaccatcccggtggcggccgcgagttcttcttcgaccggcacccgggcgtcttcgcctatgtgctcaattactaccgcaccggcaagctgcactgccccgcagacgtgtgcgggccgctcttcgaggaggagctggccttctggggcatcgacgagaccgacgtggagccctgctgctggatgacctaccggcagcaccgcgacgccgaggaggcgctggacatcttcgagacccccgacctcattggcggcgaccccggcgacgacgaggacctggcggccaagaggctgggcatcgaggacgcggcggggctcgggggccccgacggcaaatctggccgctggaggaggctgcagccccgcatgtgggccctcttcgaagacccctactcgtccagagccgccaggtttattgcttttgcttctttattcttcatcctggtttcaattacaactttttgcctggaaacacatgaagctttcaatattgttaaaaacaagacagaaccagtcatcaatggcacaagtgttgttctacagtatgaaattgaaacggatcctgccttgacgtatgtagaaggagtgtgtgtggtgtggtttacttttgaatttttagtccgtattgttttttcacccaataaacttgaattcatcaaaaatctcttgaatatcattgactttgtggccatcctacctttctacttagaggtgggactcagtgggctgtcatccaaagctgctaaagatgtgcttggcttcctcagggtggtaaggtttgtgaggatcctgagaattttcaagctcacccgccattttgtaggtctgagggtgcttggacatactcttcgagctagtactaatgaatttttgctgctgataattttcctggctctaggagttttgatatttgctaccatgatctactatgccgagagagtgggagctcaacctaacgacccttcagctagtgagcacacacagttcaaaaacattcccattgggttctggtgggctgtagtgaccatgactaccctgggttatggggatatgtacccccaaacatggtcaggcatgctggtgggagccctgtgtgctctggctggagtgctgacaatagccatgccagtgcctgtcattgtcaataattttggaatgtactactccttggcaatggcaaagcagaaacttccaaggaaaagaaagaagcacatccctcctgctcctcaggcaagctcacctactttttgcaagacagaattaaatatggcctgcaatagtacacagagtgacacatgtctgggcaaagacaatcgacttctggaacataacagatcagtgttatcaggtgacgacagtacaggaagtgagccgccactatcacccccagaaaggctccccatcagacgctctagtaccagagacaaaaacagaagaggggaaacatgtttcctactgacgacaggtgattacacgtgtgcttctgatggagggatcaggaaaggatatgaaaaatcccgaagcttaaacaacatagcgggcttggcaggcaatgctctgaggctctctccagtaacatcaccctacaactctccttgtcctctgaggcgctctcgatctcccatcccatctatcttgtaaaccaaacaaccaaactgcatcagtcggctaaattgtattaattcaagtgctgtttaccccataatggaaataattaaatgtagagttactccaggctccattaatacagtataaatcttgcatgatactacaatttgaagtcagaaatgccacttgggtagctaatgaatcttacccaggctttaaagattgtctaaagtagtgctaagatccctcctattaattgccctgatatccttttgcaataaaatgacagatagtgtcagatattgaccagtgcactaatatataaacataccttcagggagatatatttaaaacagtgtgcttccaaatgccaaccacttcattggaactttatttcttgtgactgtaaaccattctgaagatgtctgggatcctatcttgattgcacacgacatgacttgtgtcagctcatttgcatggaccatcttgtctctatcacctgaaagcaatgttgcagagttcggggactgtggatagctcaggatatgtgtacttgcatcgaaccatcctgctgatatgaaagcattggtcgactgttctgcatgttgaattgtggggcagggagggcacttttctccttgacatttttttcttattatttgaaagaaatatatgttttaaatagtttaatttcttgattgatttacttttcttcaaaaatgctgtattggagttctgaatgtctctggttgtttgcacacagataactgcaaagaggttgtcattactggttacacgcaagccgaggccagatctcttacttaatgacttggggaaggcacaaaacatgagagaaaggtaactgccagccaggcttgcattgtttagccagaaattgctgcttggttctagactctttaaaaaaaaaaaatacccagggtttgtcatcattttcagaggcagagtgccaaatatcacccaaagctcttgtgtcttttttttacccccttattttatttttatttattaattttttgtgcaaacatcaaatgtcactggtgttcacagaaggcttttttgactagccttaaattcctgagtcaaaagattaatcagattttcaggcagtgtttaatcaggtgctttgtcctgtatgttgttcttgtctgtcttagctccctgtctttcctgtatatgccatctgtctccatgaagcacagaaatgcctctgtaagatgtttatgattttaatatttactccctccaaacccgactccataccattttttgctatttggagcagcctctctgctttgtgtataaattaatgatgctctgtagactacctaagttaatcggcactgtgaatctttttgataagcagggtttaagcagcaatttcaccattgcacttggttgcctgctgcagtgtcagtttctactacctagcaaccagcattcattactacactccaacaaaatccttagggagtcatattcagtctgagtggaagaaagtctatttatgcattcctatgaattcaacagcaatagcgtgtctcatgtattgagcatgtgagggaagaaaaagaccgtaatataaatagagggataaataatatcactaaggcatttgggagccttgagactgctgattaattcctatttctcatgtttattttttgttaggaagacaattgtcacttttattattggccacgaaacatgtattactctatatccccaagtcctagagcatgacctgcatgttggagatgttgtacagcaatgtatttatccagacatacatatatgatatttagagacacagtgattcttttgataacaccacacatagaacattataattacacacaaatttatggtaaaagaattaatatgctgtctggtgctgctgttattgactacagtgttgtacagaatttatcatggattattgactgctgagaaagggacagtggaatttagccataccaaggactatactggaaacagacttctgctgctgaatgtgccctgatgtgaccaggttgcacttggaagagatcctcgcgtcttcatgaggcacttaaagcttataaaagaactgcggctggaactcatctggtgctccccatgagagtgctctgcttgtagactggccagtgtccatgaaacaactgtaaataccaacatgtgtgcatgggtcaacagtcttggccatttctcatcaaaagaagccaaattcatgatcaacatctctgaagtttcaagtaaggcccacacttctttgaattactcttcatgggcccacattaggttgtgctgtgaattacttaaggcagtgatactgatgtagtatagttttgtcttaatttcccttatttctacttctttggttgaatctatgaacttgattgtataattttcttataaattactgatgtaatcagcttgtcaattatgttgtgaaattgttagtattcatttatcaaaaatgacctatgtttagtcacatatttgtttagttctgggaaattgttatagcttaaatggaactcaccaacattattcatagtttaagtcttttatcattattacctcaattataaatattacaaaaacataattctggcaatgagagtatttttttattcaatgatcaaggagcaatgtcagtatatagtagaatatcaattaaattatatcctaaaatgtatattttgcataaaagagatattctttaatcaattacttttttgtgagttttgtggcaaatgaagcttgtacgtgtctttaaaactgttgtagatgaaactgtataagatttttacatcttgcttaatcaatattttcagagtctattagttcccctgggattctgaatataacatatagcctattataaatccctgtatcgtggaccttttgtgaacatttcaaggcgcatgcacaaccttgatgataaccagtggaaatgtaactaactgaaatgaagaataaaaggcaaatgagctggggataaacttgaatgttatctgattaaattactcaaattat

SEQ ID NO: 10429 - DNA, 3344 bp, Homo sapiens
  source 1..3344: mol_type = unassigned DNA
gtgcttcggatggcggcgggaggttgatggcgagtggtgctgaagggacagctccagcagtggctgatttgggggagaaacaaaatctgcagatggaatccgagcagggcgacttcaccttcaagtggtgagctctcctgacctgcggccagtctccactccattcacggccagccgatctgcccgctcccggaggggtcgggcagtgccggctggacccgccccgagctccatggtttgcccaaccctgcgcgatggtgactctgggcgcggaggttggcgactggcaaatccgcagatcacagaatgaaggcggggagcgcggccggcggccggcgggggctttctcccccaccccagcgcccagggaagcggctcaaccacctgaatccggaaaacgccaacaagtagtttctcgtcggagaagggcggctcacctgggcgccaagactcagtcccgctgcccagagaacctcgtccactcggaaaccaaagcagaaccacttttctctcggtctcgttaagtcatgtctgagtcacagagatgggcaagatcgagaacaacgagagggtgatcctcaatgtcgggggcacccggcacgaaacctaccgcagcaccctcaagaccctgcctggaacacgcctggcccttcttgcctcctccgagcccccaggcgactgcttgaccacggcgggcgacaagctgcagccgtcgccgcctccactgtcgccgccgccgagagcgcccccgctgtcccccgggccaggcggctgcttcgagggcggcgcgggcaactgcagttcccgcggcggcagggccagcgaccatcccggtggcggccgcgagttcttcttcgaccggcacccgggcgtcttcgcctatgtgctcaattactaccgcaccggcaagctgcactgccccgcagacgtgtgcgggccgctcttcgaggaggagctggccttctggggcatcgacgagaccgacgtggagccctgctgctggatgacctaccggcagcaccgcgacgccgaggaggcgctggacatcttcgagacccccgacctcattggcggcgaccccggcgacgacgaggacctggcggccaagaggctgggcatcgaggacgcggcggggctcgggggccccgacggcaaatctggccgctggaggaggctgcagccccgcatgtgggccctcttcgaagacccctactcgtccagagccgccaggtttattgcttttgcttctttattcttcatcctggtttcaattacaactttttgcctggaaacacatgaagctttcaatattgttaaaaacaagacagaaccagtcatcaatggcacaagtgttgttctacagtatgaaattgaaacggatcctgccttgacgtatgtagaaggagtgtgtgtggtgtggtttacttttgaatttttagtccgtattgttttttcacccaataaacttgaattcatcaaaaatctcttgaatatcattgactttgtggccatcctacctttctacttagaggtgggactcagtgggctgtcatccaaagctgctaaagatgtgcttggcttcctcagggtggtaaggtttgtgaggatcctgagaattttcaagctcacccgccattttgtaggtctgagggtgcttggacatactcttcgagctagtactaatgaatttttgctgctgataattttcctggctctaggagttttgatatttgctaccatgatctactatgccgagagagtgggagctcaacctaacgacccttcagctagtgagcacacacagttcaaaaacattcccattgggttctggtgggctgtagtgaccatgactaccctgggttatggggatatgtacccccaaacatggtcaggcatgctggtgggagccctgtgtgctctggctggagtgctgacaatagccatgccagtgcctgtcattgtcaataattttggaatgtactactccttggcaatggcaaagcagaaacttccaaggaaaagaaagaagcacatccctcctgctcctcaggcaagctcacctactttttgcaagacagaattaaatatggcctgcaatagtacacagagtgacacatgtctgggcaaagacaatcgacttctggaacataacagatcagataactgcaaagaggttgtcattactggttacacgcaagccgaggccagatctcttacttaatgacttggggaaggcacaaaacatgagagaaagtgttgtacagaatttatcatggattattgactgctgagaaagggacagtggaatttagccataccaaggactatactggaaacagacttctgctgctgaatgtgccctgatgtgaccaggttgcacttggaagagatcctcgcgtcttcatgaggcacttaaagcttataaaagaactgcggctggaactcatctggtgctccccatgagagtgctctgcttgtagactggccagtgtccatgaaacaactgtaaataccaacatgtgtgcatgggtcaacagtcttggccatttctcatcaaaagaagccaaattcatgatcaacatctctgaagtttcaagtaaggcccacacttctttgaattactcttcatgggcccacattaggttgtgctgtgaattacttaaggcagtgatactgatgtagtatagttttgtcttaatttcccttatttctacttctttggttgaatctatgaacttgattgtataattttcttataaattactgatgtaatcagcttgtcaattatgttgtgaaattgttagtattcatttatcaaaaatgacctatgtttagtcacatatttgtttagttctgggaaattgttatagcttaaatggaactcaccaacattattcatagtttaagtcttttatcattattacctcaattataaatattacaaaaacataattctggcaatgagagtatttttttattcaatgatcaaggagcaatgtcagtatatagtagaatatcaattaaattatatcctaaaatgtatattttgcataaaagagatattctttaatcaattacttttttgtgagttttgtggcaaatgaagcttgtacgtgtctttaaaactgttgtagatgaaactgtataagatttttacatcttgcttaatcaatattttcagagtctattagttcccctgggattctgaatataacatatagcctattataaatccctgtatcgtggaccttttgtgaacatttcaaggcgcatgcacaaccttgatgataaccagtggaaatgtaactaactgaaatgaagaataaaaggcaaatgagctgggg

SEQ ID NO: 10430 - DNA, 2168 bp, Homo sapiens
  source 1..2168: mol_type = unassigned DNA
gaggttggcgactggcaaatccgcagatcacagaatgaaggcggggagcgcggccggcggccggcgggggctttctcccccaccccagcgcccagggaagcggctcaaccacctgaatccggaaaacgccaacaagtagtttctcgtcggagaagggcggctcacctgggcgccaagactcagtcccgctgcccagagaacctcgtccactcggaaaccaaagcagaaccacttttctctcggtctcgttaagtcatgtctgagtcacagagatgggcaagatcgagaacaacgagagggtgatcctcaatgtcgggggcacccggcacgaaacctaccgcagcaccctcaagaccctgcctggaacacgcctggcccttcttgcctcctccgagcccccaggcgactgcttgaccacggcgggcgacaagctgcagccgtcgccgcctccactgtcgccgccgccgagagcgcccccgctgtcccccgggccaggcggctgcttcgagggcggcgcgggcaactgcagttcccgcggcggcagggccagcgaccatcccggtggcggccgcgagttcttcttcgaccggcacccgggcgtcttcgcctatgtgctcaattactaccgcaccggcaagctgcactgccccgcagacgtgtgcgggccgctcttcgaggaggagctggccttctggggcatcgacgagaccgacgtggagccctgctgctggatgacctaccggcagcaccgcgacgccgaggaggcgctggacatcttcgagacccccgacctcattggcggcgaccccggcgacgacgaggacctggcggccaagaggctgggcatcgaggacgcggcggggctcgggggccccgacggcaaatctggccgctggaggaggctgcagccccgcatgtgggccctcttcgaagacccctactcgtccagagccgccaggtttattgcttttgcttctttattcttcatcctggtttcaattacaactttttgcctggaaacacatgaagctttcaatattgttaaaaacaagacagaaccagtcatcaatggcacaagtgttgttctacagtatgaaattgaaacggatcctgccttgacgtatgtagaaggagtgtgtgtggtgtggtttacttttgaatttttagtccgtattgttttttcacccaataaacttgaattcatcaaaaatctcttgaatatcattgactttgtggccatcctacctttctacttagaggtgggactcagtgggctgtcatccaaagctgctaaagatgtgcttggcttcctcagggtggtaaggtttgtgaggatcctgagaattttcaagctcacccgccattttgtaggtctgagggtgcttggacatactcttcgagctagtactaatgaatttttgctgctgataattttcctggctctaggagttttgatatttgctaccatgatctactatgccgagagagtgggagctcaacctaacgacccttcagctagtgagcacacacagttcaaaaacattcccattgggttctggtgggctgtagtgaccatgactaccctgggttatggggatatgtacccccaaacatggtcaggcatgctggtgggagccctgtgtgctctggctggagtgctgacaatagccatgccagtgcctgtcattgtcaataattttggaatgtactactccttggcaatggcaaagcagaaacttccaaggaaaagaaagaagcacatccctcctgctcctcaggcaagctcacctactttttgcaagacagaattaaatatggcctgcaatagtacacagagtgacacatgtctgggcaaagacaatcgacttctggaacataacagatcaggatatgaaaaatcccgaagcttaaacaacatagcgggcttggcaggcaatgctctgaggctctctccagtaacatcaccctacaactctccttgtcctctgaggcgctctcgatctcccatcccatctatcttgtaaaccaaacaaccaaactgcatcagtcggctaaattgtattaattcaagtgctgtttaccccataatggaaataattaaatgtagagttactccaggctccattaatacagtataaatcttgcatgatactacaatttgaagtcag

SEQ ID NO: 10431 - DNA, 2485 bp, Homo sapiens
  source 1..2485: mol_type = unassigned DNA
agatcacagaatgaaggcggggagcgcggccggcggccggcgggggctttctcccccaccccagcgcccagggaagcggctcaaccacctgaatccggaaaacgccaacaagtagtttctcgtcggagaagggcggctcacctgggcgccaagactcagtcccgctgcccagagaacctcgtccactcggaaaccaaagcagaaccacttttctctcggtctcgttaagtcatgtctgagtcacagagatgggcaagatcgagaacaacgagagggtgatcctcaatgtcgggggcacccggcacgaaacctaccgcagcaccctcaagaccctgcctggaacacgcctggcccttcttgcctcctccgagcccccaggcgactgcttgaccacggcgggcgacaagctgcagccgtcgccgcctccactgtcgccgccgccgagagcgcccccgctgtcccccgggccaggcggctgcttcgagggcggcgcgggcaactgcagttcccgcggcggcagggccagcgaccatcccggtggcggccgcgagttcttcttcgaccggcacccgggcgtcttcgcctatgtgctcaattactaccgcaccggcaagctgcactgccccgcagacgtgtgcgggccgctcttcgaggaggagctggccttctggggcatcgacgagaccgacgtggagccctgctgctggatgacctaccggcagcaccgcgacgccgaggaggcgctggacatcttcgagacccccgacctcattggcggcgaccccggcgacgacgaggacctggcggccaagaggctgggcatcgaggacgcggcggggctcgggggccccgacggcaaatctggccgctggaggaggctgcagccccgcatgtgggccctcttcgaagacccctactcgtccagagccgccaggtttattgcttttgcttctttattcttcatcctggtttcaattacaactttttgcctggaaacacatgaagctttcaatattgttaaaaacaagacagaaccagtcatcaatggcacaagtgttgttctacagtatgaaattgaaacggatcctgccttgacgtatgtagaaggagtgtgtgtggtgtggtttacttttgaatttttagtccgtattgttttttcacccaataaacttgaattcatcaaaaatctcttgaatatcattgactttgtggccatcctacctttctacttagaggtgggactcagtgggctgtcatccaaagctgctaaagatgtgcttggcttcctcagggtggtaaggtttgtgaggatcctgagaattttcaagctcacccgccattttgtaggtctgagggtgcttggacatactcttcgagctagtactaatgaatttttgctgctgataattttcctggctctaggagttttgatatttgctaccatgatctactatgccgagagagtgggagctcaacctaacgacccttcagctagtgagcacacacagttcaaaaacattcccattgggttctggtgggctgtagtgaccatgactaccctgggttatggggatatgtacccccaaacatggtcaggcatgctggtgggagccctgtgtgctctggctggagtgctgacaatagccatgccagtgcctgtcattgtcaataattttggaatgtactactccttggcaatggcaaagcagaaacttccaaggaaaagaaagaagcacatccctcctgctcctcaggcaagctcacctactttttgcaagacagaattaaatatggcctgcaatagtacacagagtgacacatgtctgggcaaagacaatcgacttctggaacataacagatcagtgttatcaggtgacgacagtacaggaagtgagccgccactatcacccccagaaaggctccccatcagacgctctagtaccagagacaaaaacagaagaggggaaacatgtttcctactgacgacaggtgattacacgtgtgcttctgatggagggatcaggaaaggaattagaaatgggcattccatcctacatcacctggataatggcaccaaatgccattatttaagaatcatcttttaaccctataaagctggaagattaaatatgctggaaaaagagttgtccatttaaacttaagtatgctttattggcttaggaaataaaaaatgaaaagagaaaaagtagcctacttatttctctttttttcaagaatacattctgaaatttaaaaatattagtcaagcttatatcttacttaagttgctttgcctaatttttaaatgagttctagtattctatatgccaaaattatattaatgctaactataatctgggaaaaaatatattttgaagtattgtaacaataatttgtgatggctggtttaatcttttcaaaatggcaactacagtgagcttcatttttttagagttataaattgtctcaatattaaattctttgt

SEQ ID NO: 10432 - DNA, 572 bp, Homo sapiens
  source 1..572: mol_type = unassigned DNA
aagctcacccgccattttgtaggtctgagggtgcttggacatactcttcgagctagtactaatgaatttttgctgctgataattttcctggctctaggagttttgatatttgctaccatgatctactatgccgagagagtgggagctcaacctaacgacccttcagctagtgagcacacacagttcaaaaacattcccattgggttctggtgggctgtagtgaccatgactaccctgggttatggggatatgtacccccaaacatggtcaggcatgctggtgggagccctgtgtgctctggctggagtgctgacaatagccatgccagtgcctgtcattgtcaataattttggaatgtactactccttggcaatggcaaagcagaaacttccaaggaaaagaaagaagcacatccctcctgctcctcaggcaagctcacctactttttgcaagacagaattaaatatggcctgcaatagtacacagagtgacacatgtctgggcaaagacaatcgacttctggaacataacagatcaggctccccatcagacgctctagtaccagagacaaa

SEQ ID NO: 10433 - DNA, 534 bp, Homo sapiens
  source 1..534: mol_type = unassigned DNA
gaagctatgtgaagaacagaagtgcccagaaaaaaaagtccagacattagagacggggtttcaccgtgttagccaagatggtctcgatctcctgacctcgtgatccacccgcctcgacctcccaaagtgctgggattacaggcgtgagccaccgcgcccggccgataaattcttattaagggaaagcaagtggcttcagcacatacagaaccaaaccctgaacacagaagatcaagtttcatgcaggaagatttgaacgctttgaccttttttaagaaatgtgtttattgcttttgcttctttattcttcatcctggtttcaattacaactttttgcctggaaacacatgaagctttcaatattgttaaaaacaagacagaaccagtcatcaatggcacaagtgttgttctacagtatgaaattgaaacggatcctgccttgacgtatgtagaaggagtgtgtgtggtgtggtttacttttgaatttttagtccgtattgttttttcacccaataaacttgaattcatcaaaaa

SEQ ID NO: 10434 - DNA, 3563 bp, Homo sapiens
  source 1..3563: mol_type = unassigned DNA
actctttcctgagccctgtgcttcggatggcggcgggaggttgatggcgagtggtgctgaagggacagctccagcagtggctgatttgggggagaaacaaaatctgcagatggaatccgagcagggcgacttcaccttcaagtggtgagctctcctgacctgcggccagtctccactccattcacggccagccgatctgcccgctcccggaggggtcgggcagtgccggctggacccgccccgagctccatggtttgcccaaccctgcgcgatggtgactctgggcgcggaggttggcgactggcaaatccgcagatcacagaatgaaggcggggagcgcggccggcggccggcgggggctttctcccccaccccagcgcccagggaagcggctcaaccacctgaatccggaaaacgccaacaagtagtttctcgtcggagaagggcggctcacctgggcgccaagactcagtcccgctgcccagagaacctcgtccactcggaaaccaaagcagaaccacttttctctcggtctcgttaagtcatgtctgagtcacagagatgggcaagatcgagaacaacgagagggtgatcctcaatgtcgggggcacccggcacgaaacctaccgcagcaccctcaagaccctgcctggaacacgcctggcccttcttgcctcctccgagcccccaggcgactgcttgaccacggcgggcgacaagctgcagccgtcgccgcctccactgtcgccgccgccgagagcgcccccgctgtcccccgggccaggcggctgcttcgagggcggcgcgggcaactgcagttcccgcggcggcagggccagcgaccatcccggtggcggccgcgagttcttcttcgaccggcacccgggcgtcttcgcctatgtgctcaattactaccgcaccggcaagctgcactgccccgcagacgtgtgcgggccgctcttcgaggaggagctggccttctggggcatcgacgagaccgacgtggagccctgctgctggatgacctaccggcagcaccgcgacgccgaggaggcgctggacatcttcgagacccccgacctcattggcggcgaccccggcgacgacgaggacctggcggccaagaggctgggcatcgaggacgcggcggggctcgggggccccgacggcaaatctggccgctggaggaggctgcagccccgcatgtgggccctcttcgaagacccctactcgtccagagccgccaggtttattgcttttgcttctttattcttcatcctggtttcaattacaactttttgcctggaaacacatgaagctttcaatattgttaaaaacaagacagaaccagtcatcaatggcacaagtgttgttctacagtatgaaattgaaacggatcctgccttgacgtatgtagaaggagtgtgtgtggtgtggtttacttttgaatttttagtccgtattgttttttcacccaataaacttgaattcatcaaaaatctcttgaatatcattgactttgtggccatcctacctttctacttagaggtgggactcagtgggctgtcatccaaagctgctaaagatgtgcttggcttcctcagggtggtaaggtttgtgaggatcctgagaattttcaagctcacccgccattttgtaggtctgagggtgcttggacatactcttcgagctagtactaatgaatttttgctgctgataattttcctggctctaggagttttgatatttgctaccatgatctactatgccgagagagtgggagctcaacctaacgacccttcagctagtgagcacacacagttcaaaaacattcccattgggttctggtgggctgtagtgaccatgactaccctgggttatggggatatgtacccccaaacatggtcaggcatgctggtgggagccctgtgtgctctggctggagtgctgacaatagccatgccagtgcctgtcattgtcaataattttggaatgtactactccttggcaatggcaaagcagaaacttccaaggaaaagaaagaagcacatccctcctgctcctcaggcaagctcacctactttttgcaagacagaattaaatatggcctgcaatagtacacagagtgacacatgtctgggcaaagacaatcgacttctggaacataacagatcagtgttatcaggtgacgacagtacaggaagtgagccgccactatcacccccagaaaggctccccatcagacgctctagtaccagagacaaaaacagaagaggggaaacatgtttcctactgacgacaggtgattacacgtgtgcttctgatggagggatcaggaaagataactgcaaagaggttgtcattactggttacacgcaagccgaggccagatctcttacttaatgacttggggaaggcacaaaacatgagagaaagtgttgtacagaatttatcatggattattgactgctgagaaagggacagtggaatttagccataccaaggactatactggaaacagacttctgctgctgaatgtgccctgatgtgaccaggttgcacttggaagagatcctcgcgtcttcatgaggcacttaaagcttataaaagaactgcggctggaactcatctggtgctccccatgagagtgctctgcttgtagactggccagtgtccatgaaacaactgtaaataccaacatgtgtgcatgggtcaacagtcttggccatttctcatcaaaagaagccaaattcatgatcaacatctctgaagtttcaagtaaggcccacacttctttgaattactcttcatgggcccacattaggttgtgctgtgaattacttaaggcagtgatactgatgtagtatagttttgtcttaatttcccttatttctacttctttggttgaatctatgaacttgattgtataattttcttataaattactgatgtaatcagcttgtcaattatgttgtgaaattgttagtattcatttatcaaaaatgacctatgtttagtcacatatttgtttagttctgggaaattgttatagcttaaatggaactcaccaacattattcatagtttaagtcttttatcattattacctcaattataaatattacaaaaacataattctggcaatgagagtatttttttattcaatgatcaaggagcaatgtcagtatatagtagaatatcaattaaattatatcctaaaatgtatattttgcataaaagagatattctttaatcaattacttttttgtgagttttgtggcaaatgaagcttgtacgtgtctttaaaactgttgtagatgaaactgtataagatttttacatcttgcttaatcaatattttcagagtctattagttcccctgggattctgaatataacatatagcctattataaatccctgtatcgtggaccttttgtgaacatttcaaggcgcatgcacaaccttgatgataaccagtggaaatgtaactaactgaaatgaagaataaaaggcaaatgagctggggataaacttgaatgttatctgattaaattactcaaatt
